United States Patent Application Publication US 2014/0057251 A1 - sequence listing, part 68

SEQ ID NO: 110458 - DNA, 8651 bp, Cannabis sativa
  modified_base (2881)..(2900): a, c, t, g, unknown or other
gtcggagcaatggacagagtcatggcttctcatatcaacggtactcttgtccctcttctcaaagaggccggagctcttagttgctaaattaacttggctggaaagcttactgtctgaaatgaaattcaagctaatggcaactctgtcatatagtgtgataacatgagtacaagtgtgcttgcatctaatcccgtctactatgctcgcacaaaatatattgagcttgacattcactttgtaatggacaaggctctacagaagaaattagaaataagatatgttccttcacatgatcaaatcgcaaattgtttgacaaaagggctctcaccaacacggtttcaatttctgattagcaagcttagtgtagttccatctccatttcgcttgagggttgtgtgtcaaaaaaattgaatttgatgatactcactaaagggaaaagatattgttgatgaatgaatgaagcaaccctaagaaatattttatttttgtattgactttctaattctgttaataaaaatttgtaatattctgttttatgtacacgtgtctcttatactatggcctctagttttattcctgttctaatacctttgctatataatgaaaatgcttctattatttataaattttgagttgatttaatcattgtgtttactcctttaatttctctatttagtggttttcttattttttatgggatgtgttgtcaataaattaatatcattcgctttaattatttccaatgattataaatttatttggtaaaaaaagtgaatatattaatattggtaacaaatatatatataacataaaatggaaaagatcataaagttttgatatcatgtgtttgcggattgagtaaaaatatatgtatggcatatttatttatttatttatttttgaatgcaaatatcaactttattagatgcaaacttcagctaccaaaagaaaatcagtagaaacatactctatactgaataaacgatcaggatataatatagcaactttcgtgaagttatgagccaccatattgtgagatcatttaacaaaataaaccaaaacattcatcttgcaaacaagtttttacactcattaataaccatcccaaataaagcaaccatagataaaggactatgtaaagcttgtactacacataaacagtcagcttccactttacactgttgaatgaaagcttgatttctttatccaactaagggcttcccgaatgccaatggcttcgacaaagacaggttccacttgggcgtgagctaagatggtacatcatgtcgttggtgtctctaacaaccatacccaaaccatagctccgtctcccgtcaaatatagcatatatattttgctcattcctttagtatatatattatattaatctatataatgattaatatatatacagttagtttacacacacacaaaatacacattaaaacttaatgattataacacattattattaattaggagacctagctttgcactgcgaaattgcttctcatcccacagtcttttagcaaacctgcaaattaaatatatataatttgtataattattattattcattgtaagcaactcatcaaataattaaattatatataattaataacaatcaaaataattaaatataattacgtactaattaatcatcatcgatcaacgatcatacttttaatatttttaattaatattaatatgtcatatatattggccaattttgattatttacatgtgtagtattctgcctatatatcgtcaataattagaccataacatatttatgtgtgtaaaaatatatgattttgcatacaagtgcagtgtgtttagtgctaggttaaattttttgacataacatactaattcaaaacgtacaacaaccacgactaaacacataaaagttaaatatgagccgaactagcataccttacaagagcctgctcattagtctcgtcgctacaaatttcgtagcggcaagtctccaaattaactctacacattggctttttcaataattcttctccaactttgacaagatcttccaaatttttcgttgtggcaatatctaccgatgatacatcgttctcgagagtatcatcctatcacaaaatatacatatatatttaattattatatattcaaataattaatataattaaatatattatatataacctgaattcgaagatattgatgttctgatttgaaggctttgaaaagcacagagagatgaagatcgaccatatcagaacttgcatgagaaaatacatcaataattggggccgaaccgcctttgtttaaccaacttaccaaaccccatttcgcgacatcttgagcattatatttcttttcaatttttggagatccagttcctaatgaaatcaccaaaaatcgaccgcaatctaatattggatcattattattatctattgttggagacaaagtagctattattttatccttccacacttcaccaattgccaccagagtctataaattaaatcaatacacataatatatgatcagtaccatatttaacatgtgaataatataaatatatacttaagaaaatcagtggaaaaaattgccaataaagttattattatctaagttgtcaatataatatttgtggataaaaatattagtcatttactagtagtaatgatagatacatcacttctaatttgtatgcttaaattatattactataaaaaatcttacttttaatcacaataaaatttataattaaaaatgaaaaaatcgtgattaattgtaaattattatttttatgtcgtgattgtgacaaaaattacaatatgttgtgactaaatatgtttagtcacacttgttgtaactaaaactaaattagtgnnnnnnnnnnnnnnnnnnnnatgttttagtcacaaataacttttgttgtgactaaaagtcatatttagttacaaaaaaatttatgttgtgattaaaaagttgtcactaaaaataattttttttagtgtatataccatatgatgggtaattaattaatctcaattatataataaaatattatgtgatcaagttaaaaatatttataattgagattaattatacatattttttttttgaatggaaattatacataatttgaatgtgttatgtgcagattaaaagtgactaatatatattaataggtagtaacaaaaactacattaatgataacttgttactatataaaatttaataaaatgaaacagagaagattctattttctcatatattttggattgaataaagtaattttataaaaacattaaaacttaattagtctacatattatgaaatttataacaattatatatatctaagtatcttctaaaatttgtagaaaatatttttctttattttttcttcataataaaattgtttttttctttattaaaaaatcaaaaatccaaacaagatcatctaaatataatttttttaattgcaaaccttagtgtaaatgtatttaaaatttataccggattatttgcagcaacaccaccgtctataagattaaattttctaataacttctccattagaatcttttgcttcgaagtaatgagcaggaagatatgttggagcagccgaagttccaatacatatatctgacagaagtacattcatatcggacgatggatttttcttaacctgaaaatcaaataacattatttatttattttattacattatatattaattaaattattttttgtatattaacttaaaattaattattaaaaaaatttaattaattacctcgtagctggaaaaaacagttggctggagttgtttgatgtcaaatgttggaatgacaacattggtcaaagtttggttcaatttggtgtgccctaacttttgtcttataagtttatgtagataatcaccgtcatattttggtcctattaaagacttaatcaccttcttaatacgagggaatactccacaactgcatgcatgcatgcatatatattaaattatacatataatatttattaagtttgaaagtttacctatatattatattattaattgattaagctataaatagttaaggacactatttttgtctttatcaataaagatgcttttaattttagttcttagctaaaaaatttataaaaatcaaattttcttatatgaatgtgtacatatagtgttacaatatatagatacgtaatttatctatttttgaaaaaaattaagataatttaatttattagatcgaaaacagagttcaaatatttagttacacgcacctaaactcgtttctttttatacacgtgttgaaagacaaatgaagacagaggaaaaaaagaagaagaaagaaagaaagaattgtattgcctcactgatcactgaagtgattacaagcggtgtttatatacaataatgaagagatcctaacaaattaaggtagtaagcaagaagacttaactaccatctaagtgatttctaattaaccaagagctaattgattctcattcttaacaatcctccacaaactaattaagtgtggttgaggagacacacttagttcgtccctgagaaaggagaaccaagagctagagattggttttgttaggcaaacaactacttaatctagtgcagggacatattgaacacaaatatgaccttgattcactttgtcagaaacaaaatagagatctatctttattgcgcgtagtgcgagcgtgaagaataagattggcagtcatcatgatagtgctcaaataattattacaccaaatggtacaactaagggaaaatgaagttcctagagtagagattgaatccaagtaactttagtaacaacactagcaaaactgcgaaactctgcctcaatagaagatctaaaagtggtagactgcttcttaaaaccccaagagacaagtgttcccccaaaatacacacaaaagtcagttgtagaccttcgatcatcaaggtcaaaagcccaagctgcatcactaaaggcttcaagatgaaagttagaagctttgcatatgagcaatccaaaatcaagaatcctagctaagtatcaaaggatacgcttgacaacaattcaatgagaagagaagggattgtgcatgaattaactcatacttttcttaattaacactatatgaaatatcatacagagtgataggggcatattatagaggaccaaccacagaccgatagtgtaatatcaggaagtggatcaccttcatactaagatagttgaagactaccattcgtgggggagttttaggagttaactccttgcatattggcttttgtagagaagatcattcaactgtttggtctgagataagagaatgtcatctgttgtggaagtgacttgaatgtctagtgcaaacgtctgaccaagttgagagatgagagttgaaacagtcttgtcatggttgcctatgataataattccatccatataaacaggtacataagtaccctgagttagagttgcccgaatgaataaggaatgatgagcttgagcagacacaaaactaaagtaagtagaattgtagaaagcttcttgaaccaaactcttggagtttgtttgagaccatataaagagatttctgcagtttgcaaactttagtgggatgaagaggatcaaaaaagcctagggcttgatgtatataaattttattgatcaagtcactattgagaagggcattgttcacgtctagtttttgaataggccagccttttataatttatatagtgaggaaaatgtgaatggtgattggctttataactagactaaagtttcattaaaatcaaaccctacttattgatgaaaaacatttagcaactaagcgtgctttgtatctagacatggttccatctgtattttctttgatcctatagatccactaccaaccaatggaactcatccttcaagaagatacacaaaagcccaccccagtacaatttttctttaaagaaacaacttcagtatctatagccacaagccatttgggatcttgtaaagcaactttaagggaagtcagttcaggtgagcggagaaaggcttttggctttcaaattccagactttcctctggtagtcataggatgttgattagcagtagagacagaagaatgagagacacaaataggaaaagtttcaaaagcataagatgaagaagaaattggctctactaagataggaaactcggtagcagtaggaagttcaatagtgacaggaacttcatgaagagtttgagttgaaatgggattagctgaaatgaaaattggttgagtaaatacctcagtttaagatgaaaatggtgagacaacaataagactttgaacagatgtaactggtgtagcagaagcatctgtaaaaagttgtattgcagtctttggaagatagcaatgtttaaaggttggccaggagcaatttagcaagatgagttagatgatgtggtagagatgctagaagcagtagaggaataagggaaatgaaactcatcaaatagaacaactcgagaaatatacattcttccttcttgagagtaaaatttgtaaccttttgtgtgagggactatacccaagaaaagtgcaaggcacagatttgtattgcatcttaacttgtttataaggtctcaaatttgggtagagaaggcatccaaaaactctaagagacttgtaatatgattttactttaaatagaacttcaataggtgtcataaaattaagaacttaagttggcattctattgatgagaaagaatgtagttttgtaagcctcatcctaaaattttaagggtaaagaagcttgatcaatcaaagttaaaccactctttactatgtggtgttgtttgtgtacgccacctcattctgttcatgagtgtgaggaccagacactatgaataattcttgaattctcaaaaagacttgtaaaggcttgatactcacctccccaatccgattgcacaactttaatcttgaaaccaagttgggttccacttgagatttaaacttagtgaaagtcagaagagcttcacacttggttcttagaaaatatatctaagtgtgtctggaataagcatcaacaaaattgataatacttatagccttttaaagaggtaactcgggctgcaccccacatatctaaatgtagcaattgtaatggctcagtgaattcagttaaagaataagaaaaatatcattttttatgcttatcaaggaagcaagcaaaacacaaattagacacctttttattattaaattcaattttacatgaagaaagagcagacttgacaaccttgacactaggatgtccaagccgattatgccacaaactaaaacattgtttttgagaatcacgttgagacattgtttttgagacaattgttttttagttgaaacattgtttgtcaccactggtttgagtgactgaactgcaacacatacttaaagactcaggttgagacttggaatgcagatttgcaatatatgttgaacttgtatagaccttgttcaagcttccaaacaagtaaggttttcctagtatcctagtccttgacacatccaaaagaggggtgaaactcaaaaaagacaccattatcacttgaatttgggaaacactcgataaattcttagttaaatcaaggacatggagaaatttatttaatacaagagactgagatataaaaggtgaaatgaaagaagtttcataaatgtttagaataagtaagcatgttttattgcccataagaatttgcttttgtccattgtaaatttgagaagtgtttagattgcctccatcaactataatgtgatgtgtagctcgagtgttcggataccaagaggtactagcaacagtctttacaatgcttgcatatcaacaacaagaacactaccaagaaagtattgaaacgattcaagtcttgtaaaggacttttcaaacttataaaagtattgctttactgtatgtcccattttttgacatagctgtcactgtgtattttgtccctaagtagaattgggaccatgattttaagagggaccaccactacgttgtgttcatgaagactggccatggctcaagcttggaccaacatctccatgcatttttggatagccagtatgactatgaccataagagataggataaggtgttgtaaagtatttccaaaaccaaacatgttagattcacgagagaaggctcctcttgaagtcgatgaagagccaaaaaaagagcctccatggctgtagggaaaatctctggtttgagacaaatttgcctcaggtttagagatatcaagttcttgttcacttttatgtagtcgaacctgagctaaaagaagagcctcactttcagacaccgtgtacacatcctttcttgtgttaacaaaagtcacaaacacatcaaattcaaaggagagaccattgaaaatagtcttgatattttcttatccagtgattttgtgtccagtcataacaagaacatcgaccaaagctttgatcttcagcaaataatcatcaagatttccaaacatctttgtgttttgtagtgactgatcttaactctgttatgatgtgacagtcagtagtcccgggatccgtaaggggaaatgccgggtaagctgtgcaatcccacatcgcct

SEQ ID NO: 110459 - DNA, 4360 bp, Cannabis sativa
tcttaacatataattaatcaaataaattctcatatattgaactatataataatataattcctcaattattcataattatctaattaaggttttgctaatccacttcaaaattctaaggtattacaataaccgtctatggataaagacaaaagagcagttgaacggttattcaatattatctcatatgcacaataatgaaacgtgagaaatatccatgtttcatgagcggttatgaattaatagatcctagagaataacagtcaccctacacaactataaacagggacagaatctagggtaaagggggatggaaaaatctagagaaaaaaaaaagcaagatataattatcacttatattattgtattctgtattccaaattcttgttctaataatatggactcgtggactttgaagaattaacttcaaaaccatgttaagaactttctattgcttatttattgctgtaattaattttgtagttcatttattacaaacaagctaatatttttggttaacgaaaaatttgcattaacaaatatatatgtataaatatagacatatattgtataaatattaattcataacaaaataaataattaaaataatagctagcttagatgtgcttcatttagataaatatatatatgtatgtatatatatttagcgtatcaagactatgaaacaattcgagatcatatataacaaacactattataccttagttaaaaactcgtgataataacgtattataaaatattataatttagagaaagaaaataaaaaagagataagaatttttttttattatcttattctaatgggtgatctcgtatttataaacatatgagagtcaatgattatataactaaaaaaaaaggaataataattacacggtaataaataaaagattttttttgagataataataaataaaagtttttttttaaatagaaagccttcattaatcaaacaacattacaaggaaatgacaagtcatgcttcgcggcatgtcgagcacaagggggtgtaaccccaatccatatagcactaacatcattacacaatgcataattggcttaattatgagcaacttgatttgcctgtctataaataaaagtcaaatcagcagtatgatgagaatgtagcagctgttttatctccaggatcaagccatcaacatctctgcatccttcatagcccttcttaattaaattgatggcctgaagacaacccgactccaccttaaaacgcctcaaccctctttgaatgccaaccttaaggctataaaatatggcttcaagttcagcagcaggtggagaagggaccctcggcggtgatgttgcagcagcataaaggatccgaccactgtcattcctaataaccacccctctaccacatcaccctttcttctgtgaaacccctgcatccacattaacggtaaaccagccttcatccggtctttgcctactcggtctcttttttcttgctggtttgtgttcctgctgctattaccatcattgtaatcccgtagaaagttgctgctccattccaacatatcttcgtctctaggttgacagccaccatggttgacactattctgaataaaccatatacaccagcaaataaccatgaacagattaaaagtatccttcggccacatttcaaacagagcttggagataagaaatattatcattcacaacgtacctcttaatatcctgccataaaccacatttttttcatattctaatgcttgcagaatagccctataacaagtgagccacatcctcatccttacccgaagaacatcgccgacactttgaacttacagccatcttacgttgagaaagaacagcataagttggaagccatgagtgacaaaccttccaagcaaagtgcttaacctttgggggtagtttcaatcgccacatctcagtccaccatctctccgagttcaccacatttgattgatgaatctcctcctttaatgcagctacaactctatacccgctcttaaccgagtattcaccattacgactatagtgccacaacatagtgtcctccaactcccaatctccacagggaatgctcagaatcaaacccgcatcagtaggattaaacatcccatggataaagttgacattctaggtaccatcaacattcttcaagttcgccacacgcatttgatcaggcatgataggtttatcataaaatcgaaaggacacaggtcttggtaaccacgggtcctcaagaaccctaaccctctctccattgctgattcgccatcgataaccctgctaaattatcttcttcccccacaccaagtcgcgccatacaaaagacgctttagacccgcacttcgattctataatattaccatcaggaaagtaacaagcctgtagaacccgactacacaaggaatctgaataccaaatacaccgccatgtttgcttagcaagtagagcttggttgtgtagctccaaatccctaaaccctaactcacccttctccttaggcttacacaaatatgtccacttgcaccaatgagttgtcttgttgtgttccgaggatccacaccaaaacctggctgccatgcgtggtgcaagcttttaatcgtgtctttggacaacctaaaacaagtcatcgtgtaggttggtatggcttgtaagatagctttgataaggacttcattgccagacacagagaatatggaagctttccagcccctaaccttattccaaacccgattcttaatcacctcaaagagctctttttttgtcctacccacaaaggatggaagcccaaggtacttgccataattatccacagtcttgacccccaatcaaggaagccaaacgcctcagagtattcatccccacctttcgaccaaaacacattttagacttatggaagttaactacttgaccagagtcggccgagtacttagacaaaatgtctcagaaccatacacactcctgcctaatcgctccaaaaaagactaaactgtcgtcagcaaaagatttaaacattcaatattattactaatgtaatttaatattagttttatttattttactctaataatgattaatagtgacttgtgttgtgctatcatatcgaattcccaacctattttgacactagttaaatggggttaatcacgtgaatcttgaatcaactagtagatcattaacacagggtcccaattcattctccagatgagttgggagctgggggagcccgcgcgtgacccataccaatcctacactcctttcttctattgtttatgggcaccataaaagctaacctctaaattttaaggaaatatttgactgtttttttttttcaactgtgtttttgaacctattagtaaagcttatttttcttaacttaaataatatacaatttaatgagtccagcaaaagagtgataaatgtatatacattgccacgtaatgaaattaatgtctcacaaatggcatttgcaattatgtatgctctaaagtgtgcctttgtaaaaggactacagtgccatatattggcgtaatgttagtgctacaaattggtgtcgtctctatgtggtggtggtggtggtggtgacagacaggtagtttggtgttattaaagtgagattggaattggtgaggtacagatcatattttcatttggtaaaaaataaaattggattttgttgacaacactttgacattaatgtttcacgctgtttcttccttttttttttatcaaactcaaaaaataccactctttttatttcaatttctgtaatagaatcattagttcgtacttcattgaatcaaggctttataagtttgtggtcataagtatagtttagtggttcaaacgtcttttcttataaaaaaagttggtcctaagtttgaatcctctcactcttaatttgtatattcgtgtgtgtcgtgctagtccgatctatattatattgtggtttttaaaatatgaattgtgtctgtcatgccatgccatgctgtgtcaatatttttaaacggtaggcccgacacgacccgtaggcccgatattttcgtattgtgtttgaattcgcatcatgattttctcgtattgacccaaaaaaagaaaaactaactcgttatcacattagtgttcgaaatcacactttacttttccacatttattttacaattaataaaccaattgctaaagtatatatatatttctgatagctccaattatatttatataatttttttatcataatataatttttttaatgtaatcatattaaaaaattattataattattataattttaatatttatttataaatacttaaatttttatatcatactttataaataaattaata

SEQ ID NO: 110460 - DNA, 1362 bp, Cannabis sativa
  modified_base (894)..(909): a, c, t, g, unknown or other
ggggacaaaatttgatccccgttctccatttagatggggaatccccaccccattaggggcgagtccccgcggggcccatccccatgaggaaaatgtgcattcatattcgcaaccttaaatccataataaaattttaataattgcataaaaaagtaagggagatatcggatcaccttgtctaatccccctcttgacttcgaagaaatcatgaagtgttccattgaataacaaagaaaacttaattaaaattaattatatttaaaattaaattaataataattattaattaattttattcaatttgatacttgttaaaatcttttagcaattaattttattaaacgtttaaataattaaaatatttgtaacaaaacttattatattttaaaattattaaacacacaatcttaactaataaaaaatagttagaaccacctctaattagaagtaattttacactcaatcttaatttcaatatcattaagtgtatgtgtcaatccaaaattagttcaagttatttaataattttgtaaaaaaaaaattgaaaaattaaattaaaaaatagtttaaaatgtaataacaattataaaattaaagattagttaactattttctcttctcattgaaatcttcttcctcaatctagagattgtaaaaaaaaattactaaagtagctaggtttgttgtttctttttcagaaataaacatataacattaggaaaatagcatgtaaatcactaaaaatcaaagaaaaatctaactatgtagctggttttattggaggaataggtttgtgacagagatataggagactatatcgaactagaaaagtcacatgatgaattaggttaagacagactaaaacctaatatttcattattatttattattatnnnnnnnnnnnnnnnnattattattattattatgttttgttttattatttgtaacggtgttagttctaaatattaagtttaacgaaaataacaaaaaaaattattaaactaatcatttctgttagattatcatattttcttagtaaatcaacttcaattataataattaaaagataacttttcacaactgaactcgaaaaattcatttcaaaatttaattacaacttgtacataacaatctcacccaatttttatcattcatgtttgctaattttagttatatttaattcaaataattaactctatcactgtatcacacactgtatatgcacaagtgcattaaacagcacacggaagataaccatacttcatatataaaattatagggtaaatggcggcaaaacccccaatactttggttttagtttcactaaacccccacaactcaaatttctgcgggtaaaccccca

SEQ ID NO: 110461 - DNA, 1548 bp, Cannabis sativa
aatgaaaactacaaattttttctttcaaaatagtagcatttaagtttttatttatttttcttttttgctgatttttttttttctgaatttaacatagttatatatgtttctcactatcccataaaatgttaatgaaaaaaaaggtaacgtaagggattattgcggaaaaaaaattaggttttgaatgaaaaaaaaaaaaaactaggatttaattgttatagttagaaaagaataagacttaagccgctaattctcctaattagttcatcctttcttttttttttttttcgaaaaattgacgacagtaaaatctcttgagtcttaagtaaattcatgggagaaatctcaaatgtgaagacaatattattaatcaataaattctttattcttctttttcaatattaaaggtatagtttcatttcatattttgaattttttttttttggaaaacttgacataacaatcaaattagtttagtcctaaatttttatatagaacacttatattttaattaagagcaaataacgatataagtacttaaagttttaaatttatatgtgatataagctcaatgtttatttttaacagcataataagacctagtatttgtaaaattataatttctttcagtttcgttagtacagactttgttttaaatttattaaaaaaatatttgaaaataactgatattacatatgtttctgtctagacctaatgatctagaatctgagtcttatatgtgtcatgtttaaaataataacagaatatgtactgacaaaattagaaaaaaaaaattacagttttacaaaccttgggtatgccactaaaatgaacattaaattatgtcacttacaaacttaaaactttaaatacttatgccgctgtataccatttaatattttattacattggtaaattaacattctttggagataggcttttgttatctcttctcatagttatttagaagtggatcgatctcatatatattttttttcctatataattgtcttgtgtgattatcatttcagtcattggataaatagatataattttgtaccaaaaccataaaacatttcattaaaacgttgaaagtgataggtttgccttcaaaactaaatcgacatgataatttaaactatgaaatattacactatatatgactatgcatgttagttaacacagtgttacataatttattagatgccattttccatgtgacaccagataaaaataagctattgtatagttctcacatgtaatgatacatataaataaatatataaattacaacttacttatataatattttcctctcattgaaaaaaaaaatattatccatccccatatgccaaaacaaacatccattataagtattttaattaaggtacatatatatcacatgcagactgagagggtataaatcagactttggaacttggaatattcttagctaaaagattaggatgaaccttcccttctttaatattttaattaaaaaaaaatctgaaaatttaagtttagtttgttcttttgtacatactatat

SEQ ID NO: 110462 - DNA, 3828 bp, Cannabis sativa
gactttttaccttgtagtgtagtttatttttcaaagaaaataagagaatgtgtcacataataagaaaaataggatgaaaaaaaagtaaaaagccacctaaactcttactgtgcattactttatatatatatatatattgattattattattgataaacatgaagaagtgtttaatttattatgaataaaaaagtaattttcttttctttgaagagaatgtttactagtgggccatataaatgggccgaataattgggcttatcaataaggggtaaaatgtaactcaaaataaaggggcattttccgataatgtgtctgaactgaagaagatacaatccgattagaattgggggagagtagctggagaggtcctgcttgcttgcttgcttcgctcgctttccttctctccgttatctatcgtctctttctgcgccgtcaaccactgccttcgtttcactggataagaaaatcctcaactcgcttccacatattcaattataaaaaaattatattaattttttcttttgaaaaaattaaatggctcacactttggtctccacctctacttcctcactccgattcaactcccttgctttggctccaaaccctacttcttactccgaccctcccaagctctctctcgctttcgaacccttgcgttctaggtactcactcttctccctcttcatttatttttgattattttgttgttgttgttgttgttgtttctgttcgctaaatctatggagttacgattttggatgtggtgcatgctcatgttatgatatatatatatatatatatatatatatctatgaagattgcttaattataaatattttccccttgtttagaatcgtttaagatgcgtgtacatatatatatttatatatctgtgtgcttgtgtataattatgggagggaagagatgagaatgggtcttttttgatttggttttataacaaagaaatagaaaaatgttgaccaaagtattgaattaggcagagtattcttaaatctttttgacatgtacgtatactcttcaaaatcaatcagtaaagaccacagaagaataaacgaagtattatttagtttttcggctgagccatttagtattttattgtaggaaatcaagaaagctagttggtaatgtgaataatgctcaaaattcacgcatcaaggccgtttactctagtgagtattgggtgccagagaagaactcgcgcgagggaatttggtccataaggttggttttatgtagttgattatgttctcttaataatgcctgttttttatttcttacatttttctatcgtttattgattattacctattatagttttaaaattggtggctggactttttaggaaggatttgctaggcccgttgctgattatgttttcataacaattcccctcttctatttatgtacttgtggctggattttgtagggaggatgtgcaaaccccatcatcaccgtacttccccacatatgcacagggacaggggccaccaccaatggtgcaagagcgctttcagagtgtcattagtcagctatttcagcatgtaagggagtaggtatttgatgttttaactgattaccttggctttggcttgttagtctcaatcagtttcttccttctgggtatggttttcagagaataattcgatgtggtggtgctgttgatgatgacatggccaacataattgttgctcaacttctttatctcgatgctattgatcctagcaaggtccggcgatggatgcttttttttttattattattatcaatcagcttaatttttaatattttctcatggctactaaaattttaaagattttatgattaatccatattatgctttctgacactaaattgtactcaggatattgtcatgtacataaattcacctggtggatcggttacagctggtaatatatacatccgaagctggtttgcattattctctcttatgaaatgtattgccacttaatttatttaatgctctatatttgtaggaatggccatatttgacacaatgaagcatatccggcctgatgtctccactgtatgtgttggactagctgctaggtacttgattgattcaatacaaaattagtcgccttttggtgacttttaattaaagacaaattactctgtgtgctaattttgtatctccacttttctgtgtacagtatgggagcgttcttgctaagcgctggcactaaaggtaaaacagtttcgatgacaggttctgtttatagtttttcatttcatgttttctaaagcaattcttttgtttgctatataaattaagggaaaagattcagcttaccaaactcaaggattatgatccatcagccgcttggtggagctcaaggtgggcaaaccgatatagatattcaagtaagtaatattttctctcgacttcaacttgtcatcatacctttaactccttgttggttaacatgcttaaaagtggtcttttgatagagtgcttatgtccaaatagtggcctatcacatataaagttacagattagaattgaacttttatttttctctgtgttcttacaagttctacttcaatatttatttaaacagggtaactgcagaaatggagttgtatctattttttttttcttccataactagtttatgattggtcagtcagtccctaacacatgagttatttgtttaggcaaatgaaatgttgcatcacaaggcaaatttaaatggctacctctcttatcacaccggtcaaagtctagacaggattaaccaggacaccgatcgcgatttcttcatgagtgcaaaagaagccaaagaatatggacttatagatggtgtgattttgaatcctctcaaagctctccagcctttgcccgttgcagcagctgacggtgaagctggtaaatctgccgcagaaactacatcagacagctaaggtgatatggcctgtaaacttctcccaaaaagcatatgattatgaataactgttgtagagttcgatgaaaggattcctatagttttcccatctcattttaatgtcgagcaatttagtatttttgttaagacttgagacagagtagtaggaaatctttaagttttgacatttcgtccctctgagatacatattgagaaatagattatttgcaattgacttatttgagttttttctcatgtgaactgctggagataaatttgtgaaagagaaatggaaggaaaaaaattattgagagataggattctttcctttctataactaattgataaaagtgtcaatatagccatagaaagttaacagtttattaatcaagaatttcaattaatattagactattgtccaagttatgaaactaatatatgtctatatcaatttttgcttcaaggatacaaattcaagcattaacttcataagatacatgataataatatatgcctatcattacaaaattaaaatcaaagaatttatcatgcaacattcaaattttgcgtctattaatcacaactttttcaaatttgacaattggctcaattgccaataaggtaataaaacaatagcaaacattttaaacaataaaattacttgaatgcatatacatcaatgacatttaatatcataggcaaagtagtaataattacaaattaagatttatcaatgattctaactatatgaaaggttcagctcataactatccagatttgatcaaattatatgttagatttttccaactgaaatggtaaatactattttggatcctgtgttttgcaaaagttactaattagaccttctgttttgttaaatgacaaaatagattatgtattt

SEQ ID NO: 110463 - DNA, 3185 bp, Cannabis sativa
  modified_base (2088)..(2090): a, c, t, g, unknown or other
gctatatgccaaaaagaataaaataattagagcaacttaagtatatatataggggaaatgaggcagctgccctagaggaatgggccgagtatgtggcccagtgggccaataactttaatatcacatgatatatctatctcatgttttatatgccatctaacataatattttgattattcagttttcctggttttttagattccattatctttggagtatggtcaaattaaacaaacatgaactaattcagtgatccaactatctacctttacattgaatttttagagaggtttatttatctagctaaaattcttgtcctgtatcttatcagtaaaaggactttataataatgtttacgtactttatttatattctaggaatagttgagctattttgagcaatgcccaagatacataaatatatcaagattttttttttggttttttttttctataatgcagttttaaactaattaataaagtccaaaccactcctactccaaccctaacaaattctattgctcatcacataacatttttttttttcttttcattatatataaatatattattaattaaaaaattggcctgcacggttaaaatccaatggaattggatggattatgattttcaacatgcaatctctaatttgattaaattatagataaagaaatcttgatcaataagtggattataaaccgtccaacttgaattccactatttctttatttaatttagtgaaacgtgggcaaaatatcttcccaccaaattaagaccaaaatcgtagccagcgaaatagacatttcaagagagtgaagctcaacaacatacccccaaacccaaaagaacaaaaatcattaccagcttttgacaatcaatacacctttttccattgcatgtcttacttgttccatttttatatatatctatttctatttttgtcatttgctgattgtagggaaaacatatactgactattcatttatttatttttcatcatggcaacttatatgtatatatatacagctttttaggtaagaggcatcgcttttgcccatattttttagtttatggtacttggagaaaatatatctcaattttgtatataactgtttaacttataattatagcaggcatccaactacaatttatagtgtcaataataaagatctaaacaatttgcacaataaaataaaacatacgagtgctactcattatttacatatatattttcagcattataaattattccaattttttaaaaaacaaattggatgtataatataactataccatattgtcgtatatatatttatttataagtagggacaacaatgaagaccctatctaaaactttcatatatattatatataagataaatagcgtgtataagtacttaaagttttgagtttgtaagcggcatacactcaataatttttttagcggcataagtacctaatgtttttaaaactgcaactttcctctagctttgtcaattcagactctgttattgtgttaaataattaaaatatataatgccctaattttagatcattacgtctgaaagaaaacatgcaatatcagttacttctaaatattcttttaatctgaggagaagcaggttcctatccataaagttgtggagcaagggcttaataattctaatattacagaggtttcttcacacaaacaaggccttcatgaaatagaggttgagtagataacacctaagagaactggcactaagaagaatctggagaaagccacaaaaacttcaactagtaatgtgtatgaggccttgcaagagtaaattatgggagacatggttactaactaaaaaactgtatttttatatacaccataaaatttcgttaataacaataaagaaaaatgtggatgtaaagatctgcaataacagattagaaacttgttattgcagaatacagatttacagtaacataatagaaataatagtgcagaatataaaaatttgacacaagagaattatacgtagtatcagtgttctttcaaacaattccagtccacgggaccacgcccagagaatgaaatcaattagtaaagtctcannnaattacaaatacaattgacttaaacatgtttagactccctctaaagctttattgcgctcctttgtaatttactttgcatttgacttctaaataccacctaggaatgtcaatggggcgggtcggatctgatccgactatgatctaacttgatccagattatgtacggatctgccccgccccgccccgctagatcagatactcggatcggatcagatccgacccgccttatacagatcggatctgatccgacccaactttttttaaaaaaaaaaatatatattttatatctaaatttataattatttttttcaaaatttatttgtttaagaactaataatgcatcatttttttgttatatatttttattttatttgtcaaaatcaataaaaaaaacatcaaattcttatcacataaaaatgtgatcatgtataacctcaattctcgcataacctctctctcctttactcccatatgtatacactcatatttccccattcaataactaccctcaataactaaaaaaaataaggaaaaaatgaataattattgtaaaaaaaattagaacaactacgaaatacaatggtccgaaccaaactaattcatttttgagtggtttgatttggcttgatcattttattagtctggtttggttttgaatttttaaaaaatcgtaatagtgatttggtttgaaaaaattaaaaaaccccgaccaaaccaatccgtgaacaccaccttaaatgtgaggaatccaaaattattataattaacataaagtagtgttcagtattatctcccagaaatacagtaaaagaaacaagtaaataaatgaacaattcaatatataggtatgtttattatataataaaagcaattatgtagacatattttttatcagaaaaatatatatatacacatatttgtataagctataagctcattactagaaacccaatatttaattaatttagataaataaataaccgtacgtctattaaaaaattcttacaacaataaaaatagactaatgtatatatgcggtattaattataagatttaccttacaatttatttgtaaaatcatataagtagcaaaca

SEQ ID NO: 110464 - DNA, 901 bp, Cannabis sativa
accacgaccgcaccgcaaagaatttcaaaccgcatttttttgcagtgtggtgcggtacggacggtttgagcggtttgatgaacacccttataaataagtatttaaaaataaattaaaaataaaaaatgaaaaccacttttaaaaaaaaaaaaaaaaattgcttttattgtaataaagaaaaaccaaattcatttcaccctaaccctaaatttttatctctttcaccattcagcctccctcaccatctttctcttccccatctctactataccagtacaacaaccacccacctgccgccaatgacggagacgagactcgctcctcaacaccaaccatcgtgactacagaaccccttcctctcttagctcactcgtaactcaaactgagtccactcgatcgatgttaagtcaaatttgaaacccccaactcgccaggtgatctctggccggtgaaattggcctggctccgtcacgcccttgctctcttctctttgaaattctctccacccccgccttgagaaatccacctcggctaagatagttggaatggttctaggttttaggtcatgtgcttcgactaaaaatgagttggggaggagcggagattgatcgagtcgtggacttcaacatgaaagggatccaaagtttgttcttttggatgtgatttttttctgttgaatatgatattttttttcttttgaatttgatttaggttttgtttgattttgtgggatttggatttggtattatgacaagtgtggtgtatctagaattagtttttaattttttaaatttggtttgtgatgttttttttttgaccccgcgggggggttgggggtgtttgaataatattttaccaggatctagatttactaataagtatgtttttaacatcctaaaca

SEQ ID NO: 110465 - DNA, 3558 bp, Cannabis sativa
  modified_base (1250)..(1264): a, c, t, g, unknown or other
  modified_base (1904)..(1907): a, c, t, g, unknown or other
tacgtataaattaagaaaaatgttgaaaggacaccaataatatttagcacttttataataaattaagtaatattgttatgggtgcaattcaatattaattattattttattttaataaataattattaattaattatataatactaaacactataagtattataagtatgagtgtctcataacaattctcataaattaattgcttctagtctttaatggacgttaaaaaattactattttttttgtttttttttttacttttgtaaaatgatcaactaattcgatggcctatttttaggaataattaaaagatgaaagagacttattaatatatttttttctttgcttgaatataatatatcaaagggtgatttgtagtaaaggtatttcatttttttttatgttatacatatatttatttgaatcttttattaaatcttcgtttaattattgaggtaagatcataaaagaatcaatattattatgaaaaagtgtaattatgcacttgtatgcttttcttaatagttttattataatgtctattacctattattgaaaagggaaattattacaatattgcttgataccttatttatttatttatatttatatatttattattaaaagaattccaacttagaacccattaacttgaaatttatgtatgccaaactatgaagtaataatattaacaaacttgtctctgtaaaatttcttttaaaaaaaaattaaatttttaatatatctttttatatttaaatatattttttaataaaaataaataattttttaaatcgcttaattaatttaaaattttaatttttttaatcatttaaaataatttttttaatatctaaattaattttttatttacaaaaatacgtcattatttaagtagaatgataagatgaacttaatagaagaaccgaatttctattaatgtaaaaattcaaggaaatttttaacatactataaattttaaagaagaaaattagtattgtcgaaaatttaaaaaataaaatttctaattattaaaaataaataaataaataaattgtcggcaaatatatattaatagtgctttcaatttaattgattaaagagcaaaaaaaaccatgtgtaattgaataataatgcagtagtagtgctaaaataacagaggcttaaatcttatgacaactaaaattaatgttgcagttagttatatattggaaaagtttgatcaataatattaacaacaacaacaacannnnnnnnnnnnnnnataataataataataataataggtcgaccgggcacactttcattctattttggaaattgtagtggtccagttgttataaatatataagaaatataaagtgtttgttgtttggcaagtacagttgatatatcatatagttttgttgaggtgatataagtcaacatattttgctatgtagttaataaagtcattatatatacgtacgtacattcaaagttttctagtttcgctgtataatcagcaactgtgcctagctatatagcttaacatatatataatattgtagtttatagaatattaatttggttcaattcaaagcttaaaggatggctcatgtttggtgcaattatataataacacaaaccatacttttaaaaagtttaagacttttgtgggttactggtaattataatgcaagtgtgaaatttattaaagaaaaataatatgtatataataaaaaagttttgttttagtattatatataagtttttggacgaagagagtgatgccttaggctggttctgagcatagtcgggctagatccacgcctagggcgtcccactcattttaggggtacaaattaaaaaattacatttaaaaaaaaaaaaaaaaaacatattcttttaataatttttaaaannnntatttatctttatagtaagggcaaaaaaaaaaatttgcctatagcccatttcaactcaggaccagccctggtgatacctacatattagtttttgtgagacaataaaattgatacattctatgaagagcaaattaataagttatatagaactcgtttagtacattgtactttgtatattgtatagtattgtattgaattgtattgtattaatattcactacaacattgataggatgtagacatgttcaagtgaggcacaacatggtgtagtgcccatagcatattatatttggggtcgacattcctaatgttgtgcccattcttttgttttcttaattttggagataactgggtgcgacacactgtcaatgtgcacaaaattgttatgctccaaaagtttcaaaaaacgaacgttaattcaggcagaaattttcccatatttacaattgggcatgacaatgtcggctccatgccttgatatagcgtgccaattaagggtacgatatcgtcgggcctagtttttccctttttttaaataaaaaatcagactcgagagaacccatttcctcttcaacacctttaccttttgctctctctttatctctctcactcaccacaactccgatcttctcattctcttgccctcacaatgtcgatcttcttcttctctatttacaaattttgtggatggctcaaaggttaggacctgatattcgtctacctactaatgaggagttgttcggaatggccatgcctctaacataaacacttcaacctcaaatatctggaaatgggtctgtttcatcttcacatcctcggacttcctagtatcaccaagcacaatagaatcatattccttttatgtatttttcgtcatcacctcagcaaatgtctaaatttccttggttgtcaacgccaatgtcagagatgcagataatgaatatgcagcagaggcctttgatgcaacaaatgtcatcgatgcagtagccaccacaaatgcagcaaaaaccttcgatgcaacagaagtcatcaatgcagcaaacaccacaaccttcgatgcaccatatgccatcgatgcagaagacaccacctatgcagcagcaaccttccatgcaacagacatcgtagatgcaacagcaaacatcatagatgcaccagatgcattccatggagcaaatggcgcatatgcattagatgtcacatttgcagcaaatgccttcaatgcagcacacaccgcatacgcatgagatgcattttatgtcatcgatacaacatatgtcactaacgactcagatgtagcagtgccaccgattatgacaccaatgcaacaaataacacatatacaacagtcgtactacccatagatgctagaagtataacaacaatcttactatccataaaatgccacatattccacaacaaaagtgtggagagaatggtgatgatgaatagtccgcacatttgagattgcagtgttgttatttgtaattgtatgaatttgacgatataagtattttttatttgaatacttttattttaattattgtagttagttatttgaagggcttttttcataaatgtacaacaaaaacaaaataattacgaaaaatgtgcaaaaaaaaattattttaaaaatttatacattttgaaaa

SEQ ID NO: 110466 - DNA, 4427 bp, Cannabis sativa
aatagcctataacagattctagcttaagagtttggagtctgttccaacagttgctaccaaatttagtagcggaagtcgttatttaaataaagatcaaactttcattcaaaaaaaaaatatataaaaaaatgttaaaatatattattagtggtacgatactccttgaaaaattaagtatggggttcatttaatttgagaaaattacttttaatgaaaattataaccaattataagagggcatattactcaatatcaaaatataaatttgtcatccactcttctagataaatacaaaacttaggagactttccttttaatttgttcactttatcgttcgtagctattatcctttcaagtaaggaatctcttcatctgtattttttattttctctttttctttttcaattcctattattattattcataacaagtttcaatcgtatgatcacttaatccgccgtcgaatttgctttacatattttttttctgtgttgccgagaaattcaatatagaacgatacacaaatgtatttttttttttttttcaatttttttgttgaaaggttttcttttttgttcagatggttgtttgtcatgttgacctaagtgacttattttactaaatttgaacggccgaggaaacccagtactagcttggtgattgtgtgttgaatgattgttttttttttttttgcttaacacccccaaataattttgattccattgttttctgaattcacctgcgtacctttttaacaaacaaatttggatttaagtgttggggactttattgatgctatgaagggtgtgataaggtctaaaatatgtatcttttccctaaaatttatacaatatttcttatcgtacacaggtaggtgatctgatctgattgtgtattgatgggtggaagtgccattgatgatgactgggagcttacctccctttccaatgtggttcgtactgttgtgttagtaggaagaacagggaatggaaaaagtgcaacgggtaatagtattcttggaaaaaaggcgttcaagtcgagggcgagttcctctggtgtaacaagcacttgtgagttgcagagaactgtgttgagggatggccaagttattaatgtcattgacactcctggtatattaagattttaagacttttcaaaagttttggtaggcattgtattgtttagtctaagaactttattgtttttctgttgtagggctttttgatttttcagctgaatctgactttgttggcaaggaaattgtgaaatgtataaacatggctaaggatgggatccatgctgtgcttgtggttttctctgttaggacccgcttttcacaagaagagcaagctgctcttcgtagtttgcaaactttgtttggtaccaaaattattgattacatgattgttgttttcactggtggagacgaacttgaagaaaatgatgaaactctagaagattacttaggtcgtgaatgtcccgagcccttaaaggtcagctggagataatattgttgtgtcttggttgtttggtttggccttgtttacttcttccttttactctatgtttgcatgtcaaatggaaaatctaacatgttttgttcttttaaaatatctatatgatataggacatcctcagtctgtgtgaaaatcgcctggtgctttttgataataagactaaggatgaaagaaagagggttggtcaagttcatcagcttctctcccttgtaaacaatgtcatagcacagaatggtggacaaccatacacagatgagatatttactgaagtaaaggtattatcattgttgtgaacaaagcatatttgttaattatttcattaaaatttcctgatgcaactgtataaaattgacagcaaggggctatgaaacttcgtgatcagcaagaagaggttaactccttaaaggggtattctaaacgagaaatatctgacttgaaggagcagatgcatttagcatatgaagagcagcttaagcgaattactgagatggtatattatttcctagctatttctccacttcacctgcattattgggtgtttggatgtcttggtatttatgtttcttttcaacaagtctttattctttaaatgtggacaggcagtgccgcttcactattatttaattgtaccatttaagactaccttgctcctaaaatcgtagaatggtacgggtacggcataccagtttagaccaaacataatttgttataacttgatacaaagaaattagtggtgcgggttgttaggccctaggattagtatggtgtgctagcatataataaataagatgggtatttgagtctttgagtagttttgagtgagaaattactatatatctagataagggaatagagggggtatgcaatgtattgagtaaaatctttgcatcaaaggggcctaagggctcctattttttgtagcaagctttgctcatacattcaatagcaatcttctacaattttcctactgtttggctactaatttgctactgttactattgttgttactacttgtttgctactggtttattgtgtttctatcatttctgctgctgtgtttgtctatcagtttgagtaatttggcagcaggttcttatcatattagtatccataattagcttagtcatttaatttgcattgctatgacatgtgaaatgaataattcaagccagaagaagtcttgaaatttctagacttcatcattgatattttcactgtctatttgattagatgccctgtttcaccatactacttgctttagcgttggtattttttctcaatgctgtctatgattcatagcgtggtttaaatatgagaaaggtatcaatcatattctttgttaggaatcgcttgtttttttattttcagagattttactcactcaaactgaaatggttgaacaggtcgagtccaggttgaaagagacaactacgagacttgaacaacaattggcagaagaacaagcagcaagactcagggcagaagagtttgcacagcaagctcagaagaattccaatgaggaaattcgtaagcttagagagcatcttgagcttgcacaggaggagctccgtaaaagaggtgaaaataagtgtaacatcctatgaagcagtaatgatttagtaaaaagatatttggttcttcctggtaacgattacttaaaatctttctttttttcatatacttgccttagtaactgttgaaacatatttttgtgtgtgggattttctggcatacaatatcgtctcttaagttaatatagcaaaatggttttatgtttgtattgagactttgaatctcttgtttgagttgtacagctacactatctattttagtatatatatcatttggtggtgttctctgcttctctctcttttcttagtattgggaaattatcatattaatctaaagatggagtacataatttgatatttgaaggaatagaaaagccttttggaatgggggtcatgtttggtttacatcaaaagcagttaaaaaataaagaaaatattatctttagaaacacaatttgatagtgatgaaaccagtcttctctttcaccagctatttcatattgctaattaattatttttgttgaccctatttccaactggggacagtaaagcaaatcataccatagtgtcacaaaatggataaattttgaactaaatatagtactaattcttttcaagctgaattttaattttgattttttttttgaaggaatagaaaagccttttggaatgttatacgttgcatatatgctgaccaagagttcattttcatgtgtacttgatatttataattgctcaaccaaattatgatatttctgaagttacagccttaataagaatatgataataaatttaggaatattgctgttggatattagcggtatctagtattttttattggtagtattttacgattggttagtgatattttttaattttttttttagaattatatgagatttaatacttaattacactaataaaggtataacattgagaaagagagtgttagagaccaataataccttttaacatttctctaaatttagagaaggtattgcatggagtcccgatactcgtggtgcggtgctcagtcctcctagaaacaaagtgtcaccttgggaatagtttgtattatttttataataattattaaattaaagagtattgtttatagcataccaaggtatctaagagtatctctaatggtagtattttttaagaatgctaaaaatttatatatcatctaaaaatataatattttattttatctctctttcccattatttttgacactcttactactaaaaacatgaggaaattacactctataccctttttatattgtcttcttttatttttaccttcttttttaaaatctatcatttttacctctttt

SEQ ID NO: 110467 - DNA, 8065 bp, Cannabis sativa
  modified_base (1999)..(1999): a, c, t, g, unknown or other
  modified_base (2112)..(2115): a, c, t, g, unknown or other
gaagcattggaacttcagccagatctatcatacgagaaacaaccagtgcaagtacttgatagaagagaaaaagtcttgagaaataagacaattgtaatgataaaggtattatggaggaacagtaaagtagaagaggcaacctgggaactcaagacagatatgcaccagaaatatccagagttgttcaggtaaatttcgagaccaaatttctataaggaggggataattgtaatgtcctaagattaatgaaacggattagcaaaccctaactagttaaatgtgtattaatgtggaattatattattatatagtatacttgttttgtccttctgcaggtgttttctaacaagtcggtgcattatagtcacaatcgggtatctcggaccgaactgggtttggggctgaaataccttttcaggattttatattggtattttattgataattgaatattctgaaaaaattatttaatgtggtgtgtgatagaatgacttatttgcccttgagttgtgcatatgttatatattggccctaggggcataatttttttgccatttaatttattttcaactaaaaggatttttggcaaaatgaaaaggcattattctctaattttcttagcctaaatcgatcctctctccctctctttttctcatctcttcaattgatcaattcttggaaaatggccttgaatcaagcttggaatttggtgcttggatttgaaaggaacttgaggtagtctttctaccactttaattttgaattttgttgctgaaattaagttgaagaagcatgcctttgtggtgaaggtgttcttgtatgcatgtatgtagaaattggttttaatcttgatgttctatccttaatggtgatgagaattaatggatattgctcttggtatgttttagatatgattttagggttatgttatgttcaaaaagctgatttttagctctgtgtatattgtggtttttgagcttgagttttgaatttgaggttcaaggttttgagtttgcaattgtgttgaattttcgctcaatgttttggagcttatgttgatggttgtgaatttgtccttgaatgcatatattggtgattttatagggtttgattttgtgtattattttcttgctgatggtaatgttaatctgtaagaaattggattgaatttttaggtatgttttacttggttttgggtttgagttggctgtgttttgtgttagccgaagtggaatttttgggtttgaacccaggcgttgcagcccacccctgataaaatcctgggttttcaacccaggtgccgcgacccgccttgtgctgctgggcagattcgaatgcaatatttgaatattcataactttgtgatccggactctaatttgggtattctgagtatcgttggaaagctcgtttcgagctctatatgtctatctggatttgaatgccaattttataattatgtggaagtggatttaggaattaaccctatttgtgaatcttagaaattgtaactaggattaccgacacttagtcaggagcacccgaggatttggaatctccacgtatacgggacatcaggtaagacagtagttaacacatagagttaagcgcggtggcactcatgttgaatattataaatgtgataaattaagaaccgagattagggttattatcctaaagtgagcggttatatggactataattattaccctagtgattattgatttttaagtgctatgccatgctttatacattgatttaaagaattatgcattcaaggcataatttggttggactgggtaattagaaccgagatgaactgatctaaggctttattgtaaatagacatgtgagcgtaacacgtgggtctatgccacatagacgtaattaggcgtgtgagcgtaacacgtagatctatgtcaatagacaataagtgtaatggcattaatattatataagtgaaagctatattgtgattattgatatttatactgtcttgntgggcttggctcacaggtgctctactgtgcatgaaagggtaaatcagtctgtgatcagccatgagtgcgagagcttggcagtgcttgtatatgttcgggccacactagaccannnnggttggggtctaccagtgattgtatttcataacctctgattttgccgcctgggtcggtacttgaagtaaacttgtaatattttgtgaaaatgtttatgggatcccgaaacttgtatcttttggtttattgtaaagttaaaacttataaatgttatattttgattatgttgttaataaagtttaaattttcacgcgcttatctttcttgtaatccagaattagtgggattagggttttaatatcggttgtcgtagcgtgcctatttgttagggcgttacattctagctgcaaccatggcctattccaactcttcatttcttcgattggattctacaagcctttgactgagttcttgattatctaactccacaatagggacatatcttatggggtcatatgcatttgacttccttctctcaagaatgtcttcctcagagtcacttttctcgaacctctcagtaggacccattccttggttggtcagagtttgtgccccttggggctatttttatggtcgatgtgttgtctctactccacatctagctcatcatgttgagtattttccatgatgtaatgatacaaatgagagatatattttgagttttttttttagaaaaactctcaatgaaagcaccaaattgttaactcagatttttgttagcaataaatgaagacttgtaaatagaagttaaatattcataattaatatatatatatgaaacactaagagttttacatagttttgtagttaaaatctacataattcatgagtcactattatttctgagtatttcttggttatgtatctggattatagaggattaactatgagtaattatttaatctcacagggtcttttctttccaaaatgattaatcactttcccattagatttcgtccctatttttaagggtttttactatgatagttattcttttcgatcttatctaagtaaatgttcatgaaacatagacaatccccatgtttcatgtttacaatatgtggataaaatgaaataacttctgataacgtcttttgatcttatctagaagtggtcttttgttgccaatgtaacacattccaaggatggcccgcatctttcaatggtgttcaaggatagctggttgaattttacgagatgctagttaagatgtttattctcactatagcctttccagagaaactcttagacatagtcttctgagattttgaaataagttgcatcttgcttatttcccttaaatcttttaacatagtcacgagtatgtgggtcaatgagttgcatgctcttaaagaactcattatctaccctttccagcgatacaatattgatccgttacacccgagaagacttttatcattattatcttgccatatgttgcttgtctccctgtcttactgccaatgcgtaatgcgaaattgatattgctcataatcacgtatctctccgagacaattcatttattactgagttttccacaacttttgtgtctaactttccacgtatcatgtccacatttatggatcaaaatatgagcataacaagttggatcggattggatcttttccaaccctaacttgaacccctcacctcctatacacaagcacataaaccactcaatcctaatcaattaagatagcctcaaccatagaaggttgtaactacattatagaaaataagccaaactaaattacattaccctaactaacttcattgttagggaatctatgctaaagaatgctgaatagccataatatttggtttacttttcttaacatgctattaaaaatgtaaaattgcataaaaagatcttagccaccataacacaaataaacatatttcaacttgaattacctatttgcactaaacataagaagtttgaactcaaacctgcattttatcctttgaagcagtatttacagctatcaaaatctggaaaactcaaagtaaagaaatcaaaattaaattccacacaaaaataactgatttagaactagaattgtgaaaatcagaaagaaaaatcaaataaaattgatccaagaaacatttagaaaagaacttgaaatccaagctagaaagcaattaaactaaagataaaactactaataatcaatacgagaaaatgataataatataaaaaacttaataagtaactcaaatcaaacaaaaaataaatgaaatcataaaaagtgacctgtttaataataagaagttatacaaagtctagattcatgccctagacaattagaccctagactaactatgccctgagactaattaggtcatagactaattaggccctaggtagcaataaaatatttgggcaattttcaaaagaaaatataaaatatggtatttggtattttgtatttttgatttttgaaatttgaaaattactaaaaaatatgtgttatgtgtatttttagttttttttttttgtttttgggcccctatgctgggtgggccctagattggcgcccagccctccttagctcagctctaactctaaatccaacataaaacagccaggtgcatacgcatttttgaaaaaaataaaagatagtaagcgtgctattcttttaagtagagtaatttatttttttggatactaactaatttgttggaaaacaaaaagaaagcctaaaaaatataattaaatatatatatatttattttttttaaatatttttattatatataagtaaatttttaatataaattaaatgtaattggattggatcagtttttaattagatattgagattgacatccaataaccgatccaatccagttacacatccaacttttgacatccaattgttattggatatttaatttatttgtaactagattggattggtttgaattggttcgattcagttggatcagattggatcttgtctagcctaaattctagaatgcatgataaggaaaaaagtaaatcttaggtatgttataatttttattttttgtaaaaactggtttctttatggaaaattgtataaagcatacttaaatgctttaaaaaatcttttaatatgccacattaaaataagtacactaactattctcctaaaactcttaaacctataatacccttacaattcaaaacaccctctctctctaactctcccactctctctctctctctaactcacacacttacaacggttcactatccccgacccatcctaaaaatttgaccaccctctctctcttcttgtgagcttgggcccccgcccaagagatgcactgtcgttctaaacaccgcccaactcgcatgaggctcagtttgcaatgacgaaccacgacacctatccccaacaaaccactacgacataccacgacaacccacaagacctatttcgttatgtatttaaatttttgtgtgtttttcaatttgttttggggtttgttttgttgtttgtgtttggattttaaggaaatttgtttcgatttaggttattttttcttgtgtttaaggttgatttttgttgattgttgatgtttctctaaaattttcgttgttttgtgatatcattagcaatgaataacaatatcagcaacatcaaactggaaaaggggttacttagtgttttctacgatatgttgcgacttgtttacgacatgttgcaatttcccaggctttatgcgattggtttataagttagggcttttttcattgtcagtctgcaattttagagacatcttgtgatattctctgtgacatttcacaatattattgatgacagtgtattatcattagacgttgttaaagatatcacaagacattgataaattaagcacacttcaacgaaaattgttcaaatgaataaatcaaacatacatatcgtgacaatgttaaaaacatatcgtaagatgtcgtaaatttttgttgttgatgttgcaagcaatttcattttgtttgcgacattttgcgatgtctgctgttgatatccaattgaaaccttcaacaacccaaacaccatcatatagtacaaccacgaacacatttgaatttgtaaacaacaatgaaacaaaaaaattaattcaaatttcaccttcttattgtgaaaaattgcattttatcgtgaaaatagcctcgcattgcattacatctcaggatgtcacagacaacattgtgcaatattgtgaaacatcaacaatgaacatgtgggtgaaatatcgctacactataatcataacatatcacaacatatcgatacacgtcgtgaaacttcatccttgaactctaaccaacacttacatcgcaatatattgaaaaattcatcgcgatatattgctaaaacacaaaaaataccagaaagttgagaatacattatagacacattgatctacatcgcaacacatcaatagatgtcgtgaaacttcattcctgacctctaatcaacactgatgttgcaatatattgcaaaatttatcgcaaaacattgctaaaacatgaaaaaaaaaaaaccaaaaaactgagaatacattgcagacacagagtgaccaaactaatagaaagtgttatacctaaattttgaccactaataagaagttgacatgtgtatcaaggatggaatatgaaccagctcaaaactgcgcattattaaatgcacattaaatgactcgtctggggaaatacagttaatataaatatttgaactcatcgccacataagcaataacgagacatgaataataattattgactaatgagaccagcgagacaaataggtccatctttgaataaatagaatacataatgaaagttgttcaaaacgagtaaacaatgagcttgcagctcattgatccacatactcgtgagtaagagcttgcagctcattaatccacatactcatttgtatgtttacagaatggaaataacttcaacatttattcgtctcgcttttgatgcgttaaagtaaccaccttgctaatacatttctcaacggtaaaggaagactgcgagatgcattataactcagcaaatagtattttgtacaaagatggttaagaaagataatatgtacacagcgagaaccatccaacacagtcatcataactgtctatggataaagataaagagtggttgagtagttatttaatattatccaacgtgcacaaagatgaaacgtgaggagttttcatatttcatgaacaattactaatgattagatcccaagggaataactgtcaccctgtgtatctataaatagggacagaactcaggataaaagggacggctaatcttgagagaaaagagatactattgctaaatcatatcattgtattctgtattcaaatacatttatccttaataacatgacccgtagactataaagatttaactttaaaactatgttaaaaccttcttgttatttatttattaagtaattaattgttatataattaattctgcagtttatttattacaaaaaagattaatctactagttaataaaatctgcattaacagaaagaaatgtgtagatttaaatatatcaaactaaatacaagtaaagaaattatacccataatttttgccaaggatttggtggctaaatattgctggcattaatagtctccttggtggaagatcagtatgaagagttgagctctgacgaggctggtccggcacgatgaatatgtggatgaggtgtggctatggctttcctacagaaagagaatagatacaatagatatgttggaaagaagtaaatggaataaaaggaaagggaattgaagggtaaaattggtttaaaaatttatgagtagaatataaagcaaatattttaagaggtggtgtactaaaagaggaggtacaccatttaagagtggtatgtcaatttcctttttttttttttttttctctctttttaagtgctagcttaattattttattgttgatttagttgaaagcgacctccatgcaaaatttactttct

SEQ ID NO: 110468 - DNA, 4092 bp, Cannabis sativa
  modified_base (27)..(29): a, c, t, g, unknown or other
actaatcagattgtaaagagttttatnnngggcataaaacccaacaaaaactcatactggaaatgaaagtcgagtatctcgaagcttttagtgattctcaaatcgtggtgcgtcaggtcaatggcaagtatttggctcaaggaggacgtttggccgaatatctctcttatacctgtgagttgttgtttgaatttaaaaaagttattgtcagtagaatacctcgtgcttacaattcccatgcagatgctttggcccgattggcctcaactaggaaaataaaattactcgatgtaattcctgtagatgtgttcacccatccaataattgatcgcggagagattatgcaaattgatgttgttgaacaacccacttggatgactcccatcattgcctacttgaagactagcaaactcccaagtgataagctcgaagccaatagattacattatcaagctgctcgatatgtgatatatgacaataagctatttcgcacgagtttcagtcaacctctcctcaagtgtattgatggcaatgaatgcgactacatcctctgggaggtacatggaggcatatgcgataactatacaggtggaaattccttgaccttaaagattatgcgacaaggctattattggccaactttatgagcagatgcgatcaatttcgccaaaaaatgcgacaagtgccagtgaattgctacctatgtgaatagaccacccagccatttaaattttatcaccagtccgtggccatttgcgatctggggcatagatttaataggcaaattacctaagggaaaaggaggatttaaatacgcagtggtcgtagtggattactttaccaaatgggttgaggctgaagctttagcaataatagtagcggtaaaattactcgagtttgtatatcgagcgatcatttgtaagtttggcattccttacaagttaatttctgataatggaaaacaatttgactgtaaagaaatgcgaaaactatgtgatgatcttgggattcaaaaagctttttcagtagtatatcctcaaagcaatggtcaaaccaaagcggccaacaaaatcatcaagcataccataaaaggtaagctcaaggaacgaaaaggcatttggctagaagaattactgtaatttttgtggtcatacaacacaactccttgctccacgactggcgaaacccctttttcactttcttatgggtgcgaagccatggtcccagtcaaagtaggagccagatcattgagaagagatgtttttaacatcgagaccaatgaagaaaatcagttactttaacttgatttattggaagaaaaggacaatcagactcatattaaaaacgcagtctatcaatagcgcacaacccgttgtttcaactccaaggttaaagaaagaagtttgcgagtaggagacttggtattgcaaaaattcatgcccaatgcacgtaactctacgcatggggtattcgacaataattgggaaggtccttacctaattgctgaaaaaaaaaatcaaaaacataacttaccggttatctaatctcagtgacacaatcttcgatagagcttggaatggagaacacttgaagtattattattaatagtacccgcatgtatatacttagttaatttatttatactctaaataacctaagtataggggatataaccgtacattgtactattgtactattgattatccaatgaattatcaatttcaaaacttatgaaattttaaaaattttcatatttcttgcatttaaatacttagaaaattgatcgaaatttttacttttgaatatgaacatcaaaatgttcatcacaccaagctgtgaaggatagtcacatgaataaaacagcgaccaacacaatatgcgtttaagcgtttaaaggaatcgagttgcaattgtatgcgcataaatttttttacaaaaaatgtcaaaggtacttagaagcaaaagggtatctccgaaagatacattgttcataaaaaataaggtaaaaagataaatataattgtcttaaaaataccaagtaaaaaacgcaagtacccatgtaccgctcaaaagaagttcgaaaaataagaaaggattaagcaacatgggcattgagatcttctgcgactttgctagtgccatccgcgttcaacaacatttgaatcttcaacaacttcaggaaaaaggttcccacctgacacttgagtctcagtaggcgacatggtgcaaaaagcattggccatctcaaccgcctctggttcgaaaactacgaagtcaaagtctggcagcttggtcagtgtggtataaatgtagttagagaaaacctaatcataagctttcttcgcgttttccttctcggtatcaagattgcgagtaagggtagtattctcttcctctaacttcttattcttatcctctgactatttggccctctccttcgcctgatctttggccttgccaagatcttcgacttccttctcttttgcaacaatatccaacttttctttcttcagaccttcttgaagagttgagtcttgtttcttcaaaaggtcaagatctttgatacttgcaccaaaggcccgtgagtacaccatcatgaactgcggtgcaggttcagctgaacgagactagaggtcctcataggaaccccttcaactttggcaacaaagtcgtcgctcaagaacttctcctgtaaagccatgaagtcacgagctttggtagtaggatccatcacgactttcttccctttgtcctgggccactttctggtgcttctttggtaaatcaaccccaggagtagtggtgacttcactcttcctcttttaaggcgtcgcagtagagggagtcacaatcttggccttcggcttgcgattgaaagagggagcctgcttcaggaaagtcatatatgagaaaaagatacgcagaagtaataatttgagaaattaaggtaacattatcagtaattgtcaagtcatattacctaatatttgtctcgaagtctatttggaaagacgcttgtctatcttctcctcttgtttctcaaaaggctctttgtatattggttctcgctgaagtttagcgtcggctggaatcaacttatgttctctagctttgcagaggtacacaacaaacaccaattgcgatcttgaattggaaggctgctcagtacttcagcgatttccacgcgacttttgtctaatacaaattgagtcggtctacctgcgaacatggatagatattagtgtttataaaataacaagaataaaagctaagtgtaaaagtatgcgacatacgaggtcagcggttgaagtatcctgaccccagacatcttaaacacataaaatcattttgacttctaatctctcacattggagaccatgccttctaccccatttatctcaaaattggcttatttactaaaatagtagaagccattatcatgactaacgctttttaaatcataaaaatagctaaaattttcaattgtgtagaatccaaggattatgcgataattgttgggggtaagttggaaggaagaaatgtcgtagtgtgttaggatggcctttacaaaagagtggaaaggaagcatcaccctacaacgaagaatgggaattgaaaccacaacattttgagttgagatgatcgcggggttagtaaatggaagatgaggttgctgcattgacatgggctttgaggtaggagtatgaattagatccagcctttcaaatgtagtcatatcagactttttaactcgcgagactacgtccttcaggaaaatgggtcgtctaattgagcattgtctactgaatctatttcgctaccctcaccatcgacctcatcttcaacttcatgatatggtaattcaaggtccttgcccatctcttccacctctatgtctggggcaatttgcgtataagcaaaattaccttgagcagacaacgtggattgattatcccgcaccactaaggtgactgttatggtatttttaacacgcaagtatactgataactctatgaaaatagagttatttaactctttttgtgcattaaattagctttgttctcaagtatttttagtttattttagtgacttt

SEQ ID NO: 110469 - DNA, 10412 bp, Cannabis sativa
  modified_base (5845)..(5846): a, c, t, g, unknown or other
  modified_base (10259)..(10281): a, c, t, g, unknown or other
cccttttaagggggtgcattgtagaatcacccaaaaaaattaacaaataaatcacatttctatatttcttttgtttaactagtaatatcttcctattcataagcataatttaatacgtgaattcacatattttcacaaaagaggagctctcaaggtttttttttttttttttattaaggataaatacttgttatatattaaaaaaaaaccctagtaaaatggcctactaataaactttaaataaactttttattactaaaatgtttaaacattgaatggcaatggtgcagatcagaagcagtttttcaattactatatacccccacccataggttacccgccccattaaccgtcgtgaatggcgtaggtataagctatcaattaattgagaataattatgattatctgtaactatttataaagctgtttcgaaggcgaatctaagtgtgtctcacaccttgttacaattctgaagttttgagcctcaaattgagtagcgaactgattttccaatgaattttgtgcaaatttgcttattattttattgtaatttaattaaacctcatttattttacacattttactttttttctacaaagttagagtttctctctattcacactttctctttttaaaaattgtgttgaaactagacttaattattttttcttgaattctcttgtaaggcaattagcatttagtaataataaaagctctaagtatacttatcttcattaacttcgtgctacagaaaatgaactactataattttagtgttctcttttttattttctgtccatatattcattagctactactgtttatcagatgttatagagttaatcgcttttcagtatcataattgtaaactagatccaattaaaagtgttgaatgtaaaatgtccaattatttattaaggtgagtttgaatgtaaatgtataattactatgatattaattattcaattataacatctaataattatattatattttaaaatgcatcatttatttaaatataaagattacaattacattgtgacaaaataattggtaattacatagaaaaatcatattatataacaattaatattttacatataaagtttttagtaattataataaaatttctatattttttttttccaatatacaaattagtaactagttagtcaaaactcctcttcacagaaattacaaaataatatttttcatatatatatgtaacttaaataacccactgttaattaattaattataatattcaattatatatatatatatatttattattcgaattataacagaaagttgtacaataacaatttcttcaaagtgaatattaatgattcaaagataccttatacttatatataactccacttttattattaatccagttttttgaaattgaatggagccatagccactccaacaaaagagtacttccacgccctgccctgggtcaatccctcagttgtaagatctgctattcagagagacttgctttttcctttgtaatttctagtttgttctgttgaatgaaatccactttaaaaaataaataaaaagaaaaaatggtaggtaataaataaccttcaaaatatatatgtaatatagtatttaggttatgtaaatgtaaaaattaactgaccacgtaaaagtgcatcgttgggaagaaaaaaaagtaatataattttactgaaacctactcttgtaataaacaataatggtggaagtgtcctaaaatgaattctgcagtttagttttaagtttaagtgtttcttctaaaattgccaaacaatgtagaacattttgcactactcttgtgaaagaaagactgcctaagacttgatccaacaaaacgtaattaattacaaagaaagaatcgtaacagtcaactgtcaacaaaattcaaggctaattccccaaccttcaaagcagtactacctggtcttggagtgggactacgaataagtcaaacttgtacataattgaaaaccaaaaggctaaatatatgataacataaagaaaaatacatcacttggtatatcaaacaacattgagagaggtctacatagacgttcataattaagaatacagataatagtcttaatttcaagagagcaaatataaatctattgcaatattaaaggtacagaccacacttcatttttatacataacaaggtataattcaacctcctaaatgtcctcaccactaagcacgttagcccatggcatacttctgggtccagcttctagcagtagtctcgtacttggccctatccgtcttgtacatatgtgcgatctctggcactagcggatcgtctgggtttgggtccgtcaacagggaacaaatggaaagcaacacctaaaatagaaacaagaacccttcccacccacttaaaaactaccataaatgaaaagactgaaagaatggtgcaaagcaactgtgcatgagactggaagactgaattctctctaaagctttttccagcagtagttcaaaagctactcaaggaatataaattccttgatagaatctagatgatatgcacatgatgacatttacaatacaatataatatacagcagttcatttgtcaactcaagtcaaaaaaatagcaagattatgcaccgcacagactatataattagagaaataaacaacccgataggacattttctgagcatgtttgaattggacagaaggatttcttctcaagtagataacttaaagaaattcactataaaaggggaacctaaatcatggtcgcattataccattcccaatttgcaatacatgctaattggcagagtagtattaagacttctcaagttacttccaacatagtactcactaatagccaattctcatgactaagcaaaccacaaccctcctgtggttatctggtttgcagaaatttaaaaaccacgacatccataaataaagtcattaagagatcatgaccttggatattgtcaaggcagggctccactgttctttcaaaatgtcaagacagatactgccattgctgttgatatttgggtgaaaaactttagttctgaatgcaacctgcaaaaattatataaatggatgatcagaattcagaatacacctttatactgcattaaagttcttttagtttcattactgccaagaacaagtacacagtaacatgccatgctccacaaatacagaaactacttacaatataacataaataatccaatttgaaatttcaaggtcagaaaccttgaaacgaaatgtgcctacatgacatggcatccaatccataatggatccaaatcttttcaaaactatctcctgagcaaaatagattatagataaacttattgagataccctacgacagctaccaagtgccaacccattatagcaaactaaatgccccatacaaaactacaccaggccacttttataaactaagcctaataaccacatcagtcaaacctaggtacgccacttgccatgcatcaataacaagatcattttcaacaaactcaattcccatgacatcagtattatacccaaaaatttcttgcccaaacgagattcttttgaacttcttaacacgagagaaaatgagaggaaccacaaaaaggaattccaaattaaagtaacaggactcatcagactaatcaatcaagaaacatgataaattcttgaaatggataataaataatggcatgaccccatacctttggtggtttaaatggataatcaggagggaaatgaatggtaactagaaagactccccctgcataaggactatctgggggacccattatcgtcgcttgccagtgaaacatgtcttcagctacagggcctatcaccaaaaccaagcttatctcaaaccaattcatttaggagtacacatgactaaagtgttaagcaaatttatatatgtaagtataaatgctactatattgcaccaacaaattcacatggcatttcaagcatttacacaaccccgtaaaaatagctcccttcaagcaacaaatttgtttgcaggtcttacaaaaattgtacgtaaattatacaaaatattacataatcatcatgaatgctcgtacaacttccaaaaaaaatatataaataaaatatctccttaaataaataattaaacaagacccatttgagctaaccctttgcaccaaacctagtaaggaaccataacaccgtcgtcattcctcatacggcatataaaaaaatcccgcagaaatataaagcacatatatttacacttacatccaaaatacacgactttttatgaatacccagatgctcaaaagaacaaaaaactacagatcatgtattggaaagggctaggaaaacaaatagcaaaggtaaagactcaagaaaatacagagggaaaaagaaaataccagcgctgcaagatgtaggcgggtctttctggagatccttgagctccttcaagatccgctttgatgccatggttgaatgtcaaagatcgttacggatctaaaagaaagaactttcgagggataggagggagacacagggaaaaagaaagaagaagaaggaaatctgaggaagcaaacaaaaaagaaaagaggagaggagcaaaggaaaataatttcgcttttcctttttatgtgaacctggttctgcaagactgagatgaattcttaacccttgattttaatgacatatttcagtcaatcagcatacggttctgatgagagttgagtggtgaagaatttcgaccggtgattggtaggtttgtggggccctgttgtacttttgaatattctgtatgtatattatactcctaccatttgaccacttgagcttgagcacttccctcctcctaactttataatttcttaatatataaaaaaactttataatctttttctttttttgatataaagttatgaatatgtaacattttagcttttatattttgtcccattttttattggttaatgtattttgtccatctgaatttattctatgtaacgcttattatatcagttggtttgttcttctcaatttaatttatgcaaattataaaaaaaattcaatagttggcgttcaaaattgatggcatggttcaaattttttttgaaggaactagaaagagaaccgtgatttgttctcaaaacgtgggataaactttgcctccccaagtctcacaagagctaggctttcaaaaaattataaagatgaattgagcatttttaataaaatagggatagaaattcattaataaagatcaattcttatgttgcaactgtcaaataccttaagagtacttatttttttcattgcaactacaagaactctgattcttagttttgtaagaatgtggtaggcaaaagaggttctaaggaagggtgtttgctatttgttgatgggagagatatcaatgtctggaaagattcgtgggtggctcatggtactgttttttgcccaactttgaatgaggttcttactccaagctctttgactatggcaaatttactactatagacaatggggagtgggagcttcgcaagctgaataggttgtattatcaggacacggacacagttgaaaagccattttgaaagtaggaaagccttcagggcaatgattcgaatggtaaaatttcaattgtatacgcttacctgttacaggctcttagaaactaacactgttatgtcgctccttctttgtgaaacaacttttggaatagaaaaactcatgcctctcagcccaaaaggccccttattttttgggataaattaaaaaataattattttttatatccattgataaaaaatactcttatattatattttattataatatacnnacttttatgagtgggttgcctaatacactcctactctctacttaagtctagtatataatttacattaatttaaggggtttaatggggacatcatctataaaagtggatatatcttaaaaaaatacgaaaatagaagtaaaaattaaaacaaataaagtaaaatgagtctacattgtaattttctcatttttttatactcccaactattttggctttttcactccattttcatttaggaggggaggcctcaggtagtgtatctaatgaacaacccaacaaaaaaataataatggaactttagttctcaagacaagacccaacctaaccttaaaagtcctattatgtttaatgtttaaatatttattaaattttttttaatgtcttattttgaaattttgccttaggcttctaataggcttgagacgatactcggaggagccacaatagttaaagacattttaaaaataaaataaataataatttttaatttttttttttatttttatactttaaaatagtttttattatatgtttaccgaaatttacatagtgactaataaagtattagcctaaatctatataacaactcatataacacaaatcgaacatttaaaaagaaaaataaaataaaaaataatatatgaggtaattttttttttacatgtatatggccacctcttagctatacataggtttgcccctgcttcccttcattttggtgacatattccatgtctaacttttgaaattgagggccatttaacacctttaattggcattgcttaaattttataagtttgacagaaaataagacaccaaattgtaagaggagatgatgagcctcctatcctatcctacatccaatactaattattctctatcataactaactattacattgctatcttttcacattaactcaagctaacgctaaactctaccctaacacaatgtaaatcatcgacatgacatgaagatgaacaaaaccattatcgcatcaaatagaggaaaataaataaaggtaatgacaaaatagttgggagacatcacatcaaagcacacatgcatgcatggtccaatttaattatttttcattatgaattgcgagtctgtgataagattttcagttaaaatcaaaagcatatgattaaattaaaaagcctttgctattttgcatatataatagaatggataagttaagaagatcctttcaaagatctcctaattaatctattctacaaagcaaagttcactgtccaccgactcttttttctttacgaggcagacactcttggtaatcaccccacttcatttccaacccaacgaataatatgtaacaccttattctacaaaagaattttcttaataaaataaaataaaataatagtgtatttaaacatagtaatgagatgttacattacatctaatttctcactaatttaagattcgtataattaattatctttccctcttgtctaaactctaaagatatgtcaagctggcaagatctaagagccccacttaaaacctcacaaccactataagaatcttacacttactatgttaaagaaaaaaaaaaacctataataatttaccaattcaagttcaaccaccaaaattcaatacataaacaaatccaatcccacttttaattacaatatatttttatccttttgattttcccaattgaagaatatgttgtataggtttataacataaatatttgtaataaaaactagcaacaacccggggtttgcataggtacaaatgccagccgaaaattgaagctccaaaacaaaatgatatatataattatgtactttatacattatactcttcttctattaacagcctccatatgtgaatgtgaaccataatgccatatatcaataatgtaagttgatcctgcattcaaaataactttttatattaaataaatagaaatcaaccccatttatatatgactcacaaggcaatagactatttaaatcattaatcattataatatgaaagataactatgtgtagattatatgtaaacgccaaagttttcagatcttaatgtgaacactacacatattagttttaaatggttatgattacccaagagtgtaataatgattacccttatgttttaagcgtaattgattattttataagcaatcatttaaccatgattgattatttttaaacaaaagcactacttacttgatataattaacattaaattcttaaacccaaatcacaaataaaaagagaggtaaaaaaaaagtagagaaaagaatcaacaccaataaattaatataatattaaaaagtaaaatttaagaaaagttttggtgtttttgttttggttaataataccatttgaacaaattgatagagcacttgggcatgtcaccgctgtcaagcttcttcaagctcactccaccacacaatgcatccacttccacagtcccaaccttcaatccttgaacgataaacccgacccgagttcgagcctccacgtccaccaccaaacccttgtgtttgaaaccatttttaagcttcgtccctaacccatcgtccaccaattggttcttcaccgccgtctcaatcttcaaactcgtcgtgttcttcttcccctgaaggaacccactaacttgttgcgacccaaacaaggtgtcctctccccctgccgtaacactcacctgggttttaccatagaaaatctccaatttactatttgggttcttcacctcgatccgagtcacggtatgtgcgtcgagataagtcccgtcggacttgaccgtgacattgaatttgggtacccgaaacgactggaggtggaagacgggtagcttcgggtcgaaccagaggtagaagagcccaccggccatggcgaggactaagattaggagaagtaggaaaacaaagaagaagcaacagcaagtacgacaccaattcctacgccgtttcgtgtggtgaaaagaagccggcaacactggttttcgaggcggcggtctgctcatcgggggctttcccggcgtcgtagttgggtctctatagcccggtggtttctgtagcggtggcttttgaggttgatctgccattgatatatcctcaaatcgaactcagcggtgctctgtttttatttttatgaaaccaaaaggaagaagagataattattaaatgaacaaagaattagagaattaaatgaaacaatttccgtaaaggtttgaactgatttggaggagagaaacatgaatgctacctcagaaagagaattttaccacaaacgacattacaatgattaatgtcgtagaaaggggatagggcttgatccaaaattatgtggcttgattggagaagaagaagaaggaaaaaagaaaagaaaatggattgaaagataggaggaaaaagaataaataaaataaaagaaaaagaaaatgtgaagaaatgggatcacgaggagaaaggtcattccatttatgaagaagatagaaaagggaagagagagagagagagagtgggtgttgttgtctcttatggaaggaaatggtggagggtatgtatttaccggtggcacacaattgaagcgcgagattcacgcgcggggtttttgtgctgacgtggatccaaggtttttgacacctactctttacttttttattttaatttaattacttcactttttgtaatttctttttgcaacttttttctttttacattttaagatattttttttatttttacgaaattcgatgtaaaaatttctatagcgactaataaaataattaaaatccgtaaagtaattatggaagtaatttaaatcgtaaatttaaaaaaaattaaaaataatatataaagtaattttttttattttttaatacaatactattaaagattttttttttggcaaaaaccaactgaacacaaattttacaaaacaaatgattaaacaaaactttatgctgattacaatatagaataaagtcctcttaccaaagaacagtacaggatattaattagtgtcattagctcaccctacaaaattaagctagcatttgagaaaatttacaagatgacactctaaaccattggtcacactttcatcagtgatagcaaattaagacaccaaagaaaaggacacaaaacatgaacacattgatttaatatttcaacgacataacatatagtgacacaaacgagatatttgtaaatacaaaatatagtttattttgttaaaattttactctaacagatataaatatgtcacataataaaaaataattcaaatttagatcaatataaatttacattacaataaatattatatttttatatttactattatgtcatttttaatattttattaataattttagttaacaacttcctttatatttaaataatttgtattattattattattannnnnnnnnnnnnnnnnnnnnnnattaaattttatatttatctttacattattagtattattttataatttttaacaaattattaagtaggcattaaataatatattaaattttacatcaaaatttataataatatatagtaaaaaaaaaaaat

SEQ ID NO: 110470 - DNA, 1663 bp, Cannabis sativa
atctaagatcctggtaaagtaaatattccaacaattttttcattggcagccacctttgatttcttctttggaagagctcgcccacgttttgacaatggaggaacaaaatcagagtcatcctcctcaacaacaggtcgtttaaccttgtttctattaggtaaagatttcaactccattttagaattttttttttgaacaggtgaaggagttgatgaagaatgagttacaaccatatttatatatagattaagagaaaataaaaagagggaatacgattaatgggagttgaaaaaaaatttgaagaacaaaaagaagagggaaaatggagttgggattgtggagagagaagttttcagctatgtaggttactattttaaaaaaaaaaaaaaactgaaaagaaatgaaaaataaaaaaaaaacgaagtgaaaaatgagagaaatggtgtatagagtgattgatgtaatacatcaatcactgacatgtcaaaaaagttaaattgtgtgtgcatgtggtaaaatagtaataaaatataaaagataagtaaaagttagtttagccgtgtataggtatttatgtaataaatttatcattttgaatttttggtgtaaaaaattcttatttctttgtatacatttaatagtagtgactgttaaaaaatttaattttgacaatcccttttaattgttatttttattgaaatttagtcatttgaataatttcaattcattatgctcaatcttaatgtgttctaaatatatttattaaaatacttttaatttatttaaatcatttctcatattttgttagttataatctatttcaataaaaaaaaaattaatcagtgaatgtttatatgtttatttgtttaatttaactagagtattctaattaaatatttggtgtttctactcatgattccttaatgaatcattaattatacatgattgggattgaatctcacatctatgaatattttgaattattattcagaaactctaattaattatctttaatttctaagtttaacaatatagaatcaaaatcatattttaaatcattttaaacataagtggagaaacttttcataagttactattcaaaatagttactttttataatttatttaaaataaataatcaaatattaaatttgattttagaattatactatgagcattgaagtcctatttagttaactttgcagataagtttaaaattaaataaatatttattagcaaataaataaaatattcaaaaataaaattatttaaattaaaaaatctttaaatatgcaaatatgaattcaaaaaaaaaaaatagatcaataataatttttttttcaaactttaaactaaaattggacttcttcattgctcttctaaaatcttttctcatcacgatttttgaagaagtttcacttccttgaataatcttccttggcaaagaacaattcattctaatattttttacaaaccatatgagtgtaaatcatatttatctttctctctaatttcataactctatcaaaatgttcatcttgttagggtgagcatgttagcccaagatatgttgccaagaggaggggtgaattggaaatttaaactaatttcagtaaattaaaactttcaacacaaaattaagcaattaaccacttaatcaaata

SEQ ID NO: 110471 - DNA, 11985 bp, Cannabis sativa
gtctgtgatttcgagattgaaactcacgaccatttattttattgctacattttcactaagcaggtttgtgaagaaatcaacaattggctggggaattatagatggcctggatctatagctgaggtgattagcatgtgttgtaacttgaatcatgatctccaacatagagttgtaaatgctcttatggcagcaaccttgtatgaactttcaaaaaatagaaatacgtgtacatttgagttgacttgttcttctcctaaaagtataagtttggaagttaggagaattgttcaacttagagtctcgagtaagggtcctttcaaagcttgtccaaaaagtttatatttacgaaatgtaattaaaaactggtagtggtggtgtgtgtggctgctgccgtgggctgtgtggcttttgccttgattgtttgtggcttgcttgtttttgaataaagattcttctttttaatttttttttattaaatttatttattattattattatttttttttttcatattttaaactttaattattttttaattctatatttttttacattattattatttttttttaaaaaaaaagcgttcatattacattatttatttatacgatataaaagtaaactattttacattttctcatatacacctttattgaaacttggagaggtactattttgaattagattacaaaacacagggttagttggaatgtttttaggatcccagaggtaattttggtatttacattaaattagggatcaaaatggtatattcccgtttcataaataacaagaacttttctattttttttgtttttacaaactcaatttttgtaaaccctagtcggtgaaaaagagtttcctttctattcaatctagaaacctgaatagaacccttacgcacatcgtgtttttctgaaagagaaaacgaagaccacagattgttttccactgggagctaccgattatttgcagcaatgggagttccagctttttatcggtggttagcggagaagtttccgctagttgtggtcgatgtcattgaagaagaaccagtcgtaatcgatgggatttccattccggttgacaccagtaagcctaatcctaatggccttgaattcgataatctgtatctcgacatgaatggaattattcacccttgttttcaccccgaagatagggtacgttcttattatcttagtcttgctttttggatttcatattgtgttatattagggtttttggtagtgaggctttgaattaacggtgttggttcaattacgctaaatatatttatgtaatgaaagatgctggcagtgatttcttatagttgaaagccttgcttaattgttaattaattatctggcggaggagctgagttggtattgatgaatgtgcacttagaattggggagacttaggttttgatgctccttttcagggctaattcttaatttacattatgcttttgattgatgtttcactagattagtttagtatgtaatttggaattcaaaactcctgtttttggatcagttattatgtcaatggacatacagcatagagtagataaggaggtttgtttgtctctagcgtcatattggggttagtctattcgagtaattctcttagtttaattagttagatacttgggatattgagaaatattaaacaacagtgaaggagtttttaaaaactagcataaatgagacaactttccctctaagtgaaatctataaaaagtgttccttttcgagtgcaaagtctagccagaaggcttaacaattttagaattgaaaatgattagttttacccattttgtgtcccacaagttactaacaaccctaagattcccatgtgtctaatccctacctgggatgagatatctgcatctaatctttggtgatttaggtcatattaaataaattgcgagacacttttgttttatgcattgtactacggcaagtttacatttcattctttttgtcatttttcccgtctacaaatttatgtatgcccagtgagtctttttattctatttaatatgtgtttgttatgcaatgttttccttcaccatattgttttgctatgcagccttccccaacaacctttgatgaggtctttcaatgcatgtttgactacattgacaggctttttgtaatggtgcgccctcgaaagcttctgttcatggctattggtgagtgcctgagtaatttaaattgactttatttgcaatacccatatatccgttgcatttgttatgtactaattacgtggaaacaactggtagatggtgttgccccgagggcaaaaatgaatcaacaaagaagcagacgtttcagagctgcaaaagatgcaaccgatgcggtatgtgctcttgtggatgctaggtgggtccttcatgtgtttgcacataaggggcttttgataccttttgtctaatcaagataactatgttcttctgttttcttttttttaatgtacttgtgatcaattaattttgttgacagtgctagcattctatttactttggcatttcttaatgtacaatacatatcaaattattttaattttggctgatgttacttatatatattatatgtacgcacataaaatacatgactgttatttctgtaggcagctgaagaagaacgcctgcgtgaagagtttgaaagggaggggagaaagcttcctcctaaatcagaatcacaagtttttgattctaatgttatcactcctggaactgaatttatggctgtattgtcaattgcattgcagtactatgtccatcttagattaaacaatgaccatggatggaaaaatgttaaggtacctattttatcaagctttttgatcatttaattttgttttaagtgttttgcagctgggattctctacttgcactgttgtgctttggtggttctcagtgatgttgtgtatctaacctttgcaagagcacttatatatgcatttcaattggctgaaaggttattctttctgatgcaaatgtcccgggcgagggagaacataagataatgtcgtacattcgtcttcaaagaaatcttcctgggcatgatccaaatacacgtcattgcctgtatggtttggtatatttatctcttccatttttattgcaattttttttattatttttttaaacatcacatatttggaatgttaactaatttttactgttttattaatgtgtgtctatttgcaggatgctgatctaattatgctgggtttggctactcatgaaatccatttttcaatactgcgagaggtttccatttcctatgtttctgttttcagatgtagaaataaaaagtcttacatttagggtttacacatctcatccccacaccagaataattgcaatgttgtttgatctgtcttatttactgataggcgactgtatatttttcattgctactattcagattgttttcacccctggacagcaagacaaatgcttcatgtgtggtcagatgggtcatttagcagcagattgtgagggaaaggcaaaaagaaaggctggagagtttgatgaaaaaggtgataaaagcattgtcaaaaaaccatatcaggttagtttacatttcacttaatttgaagtcataggcagcatattccaatatgatatatcttttcccccctctagttatatttatttttgtgtttactttgttttcttttatacacagtttctcaatatctggactcttagagaatatttggactatgagctgagaattcctaatcctccatttgagattgatttggagcgcattgtggatgattttatatttatatgtttctttgtggggaatgattttttaccacatatgcccacactcgagattcgcgaggtttgttatttcttttgaagtaaatctatttatctaagactttgtagtttacaaaatttgataatgtttttgcaatttctgttctttatttttcattcagggagcaatcaacctgcttttggcagtttacaagaaggaatttagggcaatgggtggatatttgactgactcatgtaaggtaatagttgcatgtgtatttcatttatttggtgtgtaagatttccggatattgaggccagggcttaattgtttttttggatgttaattactgatttcttttgtttctcagcctaatttagatcgcgtggagcatttcattcaggcaattggatcttttgaagataaaatattccagaaacgtgctcgattgcatcaggtttgttgtctaatatcattcattttgtctactggccatgcgtttcttactagtttagagtcttgctagggaaggagaaatgtgtacattaccattgtcaaagtatcgtagccctctctttttactagtcaaatattggtttgtcacttctattttttgaacctgtaggaaaatataccttctaactgcagctgatttttttatttcttctagcggcaagcagatagaataaagcgtgaaaagggacaactaagaagaggagatgatgcacaacctcaggttcagccagaatctcttgttccagtttctcggtttcacggttctcgtcttgcttcaggttcttcaccttctccatatcaacaatcaggatctggctacaattctaggaacagacaggccatggaatcaagtggaaaaggaaattcacatgcaggcaaagttgctcgtatatcttctgctgctagtattggtgctgccatcgttgaagctgagaacaatctggaagaagacgtatgtagtttttctaacacaggagctttatgcacctttttgtcatggctattttaaaagttgccttaagttttttggtattgtttagatgatagtgaaagctttaagctggagttggagtaacttgtatcttgcatgatgcaattatgaatctttttaaattagagggcttgatgatttgctatcttttgatagttttctttactggggcaatgagttagtccataaaccacaatttaatctcagaaagtaaaagaatagtatgtttgttaaaaaaaaggcaataacttatgttgcaatcttttgtttttcaggagaaagaaaataaagaagacttaaaagcaaagctgaaggagataattcgtgggaagtccgatgcttttaattctgaaaatcctgaagaagataaggtctatttagttttttactgttattgatatgatatataactgggcaaggtttttcagtttcttagtaattatttgttgaaagctatataattgcgtctggtgttgatactaaaaaactattttccattttctaagaataagaaaatattttctgagcaagggtgtttggcattgttcttagaaatattttttaaaaccagagttaaaaaagacagatttctgatgacaatataattttttttcctttatttgttcctcgcatcaaaacttttcaccactttttctgtcctaattttgtatcatctctttctccttgttttctccgtagtcatttatctcattactttgtctccttatttttcctcactcatcgtttaacattgcatttctctggataccttctctacttgctaattcttgtcaatttctcgggtcattttttctcttttccttttccttcatgtataaatctctccatttaatttctctcatcatttcctttttggcattaactttcagtttgtaattgtattcttttttctctttaacttaaaaaagaattctaaaaattattttagaaattattatctgcccgtgttttgaaaatatcaaaaaatattttctttttctatttttcaaaacacaacattagaattagaggacaaaaaacaatgccaaagtaacgtaccctatattttcatgacaaattttcttttgtgcatacaacgtcactttaatttcatactgtttttcagtgaatgtgcccatgacacaacattttatgtttctttcttttggtacaatgtgacattttctttcaaaatgcaaaagtttgaagttaccaccccagaaatataagcaatgtattgccacatgggttatttattttgtgtattgtttatctctatcttatatcattaggttaaattgggggtaccaggttggaaagaaagatattacgaagaaaagttttctgccaaaactcccgaggaacgggaggaaatacggaaagatgttgtaagttatccgtataagttatattgatgtagagttcaatcatatttgttgtacgtcttaccttttgtgcttatgttttactaggttttgaaatacacagaaggcctatgttgggttatgcagtactactatgaaggggttagttcttggcattggtgagtttttcattcattgactcctttatgatcaatagtggatcaaggcaaattgttgactttcctgccgtggaacatttctaatttcaggttttatccataccactacgctccatttgcttctgatcttaaggatcttagtcagctgagcataaagtttgagttgggttctcccttcaaaccatttaatcagcttctgggggttttcccagctgctaggtattctatagaattttcttacctttttttccattgtaattttttagctactaaatactaactacaccaattgcagctctcatgctcttccagagcagtacaggaaattgatgactgatccaaactcacctatcattgatttttatcctactggtatacctctatccgaactgattctttacatttaaaacaaaccttttctctcattgatttttatcctctggtatacctctatccgaatactgattgcctttacatttaaaacaaaccttttctctaaatcatgtttcttacagattttgaagtggatatgaatgggaagagattttcgtggcaggtggatactttattttttttatttgatatgtcataaatcttttgggtgtagtgtgcataaattctaacatcttatttctatcatgaagggtattgcaaaattgcctttcattgacgaatcacgacttctttccgaggttgaaaaaattgaacatacattgacggtatggtttctacttgactctaatgaatcccacattggctgtactgatcatctgttttcctctaaaagtattcaaagcagtttagttagttgacttgcctgcatttttctcttcttttgtctctggctataggcagaggaagtccggagaaacagcaccatgtttgacatgctctttgtggcatcatctcatcctctttctgtgtctatttactctctcgacaaccgctgtaagcaattgtcaaacagggaaagagctgaatttaaagaaaaaattgatccagaaattaggttggtaatgtaattcatagttgctatcagttatttctattttgtacgaaatctttgatgatataataatttcatcaatatagggactcagacggaattttaatttctaatgtttgttcagatatctgttgatttaaacaatatatattttcatccttgctcactaacatatgccaataatttatgttctctgtaaaatatgggttatcttctaacttggtttagggctgcatgcagtgaagggatgaatggatatctatctccatgcggtggagaaccctgtccacctgttttccggtctcctgtattgggcttggaagatatcatggataaccaagtcatgtaagctgttaagcaatgactattagggtctcgcattgtgaagttttgaagctctacaagttgcttgtttactgaaacctttttttttttctcttttgcagatgtgcgatatacagacttcccgaccctcataagcatataactcgaccacctgcaggtgttacatttccaaagaaggtacattgctcttcacacaagttcactgtaggtggatgaaacatgtctttttttcccaaacccaatctatatttcacatacaaatgctccaccagtgcatgttatagacctttattgctttttgtcatacaatttaatattttcttagaaatattttaattattagacagatctgatagagattactgaaatttggtaatacgtatttgcattttgctttcaagctattgacgtatgattttacaccagtaagacttccactgcagtgggaggcggtaaagtttacttgcttctactgttatcttatcacctttgtctctgagacaaagtaatgttaagacagacaccatcttctgtctctccctctccctttgagcaagatcacaactttggttcatgtattgtgtttgcttttctaacaggctctattgtttcttttgttttttattttcggataaaaatattcaattgggaatgagttattagggaatatgaacttatttttctacaacaagaaatatgctgtttttgttcagttctttctattattttatacagtattttaatgtctcggaaaatggtaaatgtcaggggattgcagagcttaatacatatcttttatctcagtttttctagtttgtattaacattattttatgctattttgaatggcttaatgtcatgtggcatggctactatgtcatggcttaccaagatgttttgttctcagattgtttcattgggagatctcaaacctgaacctgtgttatggcatgaagatactgggcgaagaggtcctgataatggaaggtaaatgctatttatgtacatcttttgagaaattctagtcctgtccccttttggatcttctattttatgttgatcatctctttttgttttgaacgatatcaaccttggaattactatattatttcaggtataataatcatcctggaaccacttctggacgacaacttggagaagcagctcatcggctggtttctaatagcctacaagtgaaggcagactacaatggatatggcaatcatggccgttcaccatcttattctggtaaccatacacgacaaaattcctatgggactcatctcaggttccatgatcgggaacattcagacattcaccctcctgaaggtcaataccaatcatcaaaccgaagtagtcatcatcattacaatgatcgacgctggaatagtgacggacacatatcgtcaggtagtcgccatccacacaatgggtctcaatccctatattatgatagaaataaccgcatggctcctccgcatgggtttgttggtccgcataacgttgatcccatttacccaaatggacctatcgcacaaactcctcctgggtttgttggtgccaacccgtatcccggtggtcacaaccaatatcaaaactaccaatcagctggagcaataggccgtcaacagcaatggccggctgatggtggcagtggttggaatgcaccaccacaggctggcccgtacattgcgaggggctacagtcagccacaccaatcaggtaatccatactctgcattggatcggagagcaaataagagagagccgcctcctgcacatgggtatcgccggaattagagtcgaacccttattttctccatgtagtttctctggtagtaaagattgtaccatagtcattcttgtttggatatcagaatgctgtttaactattttatatacttgataaaatcccataatatgtgcgtctgggattggattactcaagtgttagatgttagagggtttatttgattagttattgtattttaactattttttttttctattatttcagtttgatatgataattttgtttcttttcttttcggaaggaattggatcatttttaggaatatgacgctgcagtcttttgttgtactattggttatagtttactgtttaaaggttattttttttttttccccgattaagatcatttttaagtgagttttcaaagcataatttgaggaaattaaaatttttgaaagccaaatatataaattgctgcaatttaagcactaataaagctttaagattaactttatggtgtattcatatgtaaacgagaattcaaatgttattggaaaataatgtaaaagagaaatgaatggtcaagaaaaaagaaaaaaaactcattgcataaagtgtaacttacattgaaaataataatattaaaatagtgtattttttatttggtaatttagaaggatttattgaagcaaactgaaaataagtcatatggtagccacaaagggggctacctcccttaacatgcacctcaaacaaacacgcgaaactctagcataataggatagcctattcgctagagagttgtccgcacgaggaatgaatgacacaacacaattggaaaacaaaggtatcaaagcacggcattcatggaacacagggaaagtactccaagcaaatggtagaacacccgaagatagggccttgacaacaatcgatgaatcaaattccaccaacaccgtattgaccttattctccttagcccattgtcgcgcattaagaatagccagtagctcagcttccagggcattgttgactttgatgtattgcagtatcaccatcgcaacctcatcaaccacatcaccttggaccaaacccaaactagcaaagccattcttaaaagacgcatctactcgcaccttgagttcccatccagggtcaagaggcatggaaacacaaggctcaaagtccctaggctagtagttatcaatcaaaacagcaccaaactcactggctctgtgcttaatagttctgattgagctttgcagatccgggaaagcaccaagaaacaggagattgttcctacatttccatatttgttcaaaaatgcaggccacatataacagcactgagtcattttctgcattactaagccacaaaaatagattctcaaaggataagtttgacaggctgctgctaaagataccccaagggctaggaaaccacaaacatctagcgaaagggcagtcatgatatagatgaatatcagtctctacttcttcctcacacagcccacataatctctcatttccctgaaggaacctcagacaatttttgagaggaagacagccagtcaaaattctctagatcagtgttgtcggtcggggatgcatcttaggtttccagagtatctttcacaccaatttctcttcattaaaatagtgaatatgatggtcaagattcaagaaattggattattgttaattgaatacataatttgatattactgtaaaaatagaataataattaaaaatattgctatgctccatacttccattgtattttttttttattttttttgaaaattcattaaaaatattgtctccagcgaaaactcgacaggaacatcactcccaccgaaacaacgatatgaaaaagaacaagaagctctaacaatacaatgagctaccttaccagccaaacaataaaataaaaatcaaaaagttttttacagtcatcagagagtatataaaaactattatgaattgcatgtacagtaagtaggtaatcaaattcgaggaccaccgaaggccatggtctcgttttgatccaatttaacgcctcctaaattccaatagcttcagctacacctggagcaattacttcctcaaaacaacaagagcgacagaattgaaagaatgtgtaatctacattgaaataatagctttcacgtttcaacaacaagagcgacaaaatttaaacaacaacaacttctgcatttggttccattgtattaaaattgaaagaattgtttaaaaaaaaaaaaaaaaaatagtattaccttataatagaatagtctcaattttgaagaaagtttggatgataatttcttcccttgttgtaaggttctaaaaactacattttagtgacttccaaaataatttaaatactaaatacttatttgttaaaaatagagtaaattatgacataaatacttaatgtttcaaattatacacttaaatgtagggctttgtgccctaaataaaactctctttcaatgtaatcttttctattcaattatcaataaagaaacagatttaatttcattact

SEQ ID NO: 110472 - DNA, 4153 bp, Cannabis sativa
attataataaaaaaaaatttcacttttttgctagacttgttttttctttagagctactttttcctacagacaactgtgccaaactgacccgccccagtctattactcaactctacttctttcttctccgcgatctctcatcatcgtccgtcgtcgtcaccaaagtgggagtccatcctaaccacgacgaagacgaacgaccccttatttgctttcacactaaatttgaagctttttaattgcagagagagcaattcccaataatggacgagaattcggcattaattgcagcgattctgagagaagatgagttagcagctaacgggtaccacatcaatgccagcggaaacgatgattataattggaaaactgtacagaatcacaagcggaccaagaaatcctctaaaccatcctcagatgtctcctccctccgaaatcttaccaccggattctccgcttcgggcgatgttttccggccgatcgagcttcatgccgaggagcgtcgcaagcgtggtctagaggttcaatttgattccgctgcggtccagacggactccgttgccaacggatcgaaccggcattcggacgatgatgacgaagatagcgatgcggagccttctgctcctcagaatggcggtggcgacgagccgaaaaaggtgaaggtgaaggcgaagaaaccgaagaagttgaaggtgacggtgactgaggccgcttcgaagattgatgtggatcatctggagacttttcttgctgagattactgtgagttcaattcaacaattattccttctctttgatctctaatccgtttggtttgattctctttttaatgtattcaattatatttttttcgtggttggctaggcttcttatgaatcacaacaagatattcagcttatgcgttttgccgattactttggtcgagcttttgcttccgtcagtgcggctcaatttccatggttgaagacattcaaggagtccaatgttgcaaaattggctgatgtaagtttgctatatcctattttgtttttttccctttttttttttggggcaacccgctttcaaattttgtctgggaaaaagctacatggatttgcttttagcagttgttttttttaaaaaaaaaactttacgagcagaaactgcagcatgtggattttatgctagaatttcagtagttttacattgaaagtctctctctctctctctctctctctcgttattatatagtgtatgtatatgtatagatataattagattggtttagagggtaatgaatctaaagaaagggtaaatctgattgcagaagcaatctttgaagtatttatccttaacactactgttctgctctcgtgatcctaacctactatgtcattttgattaaagctactttaattcattacattgattgagtcattgagttctttcgatcttgtggataaaatgttttcaaggtttgctgatattttgttactgtattgttttccaaaacagatccctctgatttatatatctgacaaggtgtataagacgtcgattgactggatcagccagcggtcttccgatggacttggctcttttacattgtggttattggatagcattcttgatgacctcgcagttcatcagggaactgccaagggatccaaaaaggtagctcagcaagctccatcaaagtctcaggtaataagtcatatcattcttattgttaaacatattctgctgaattatcgtgaatctggttttgtcatacccgttgttgtatttgtaatttgaagatatgctttcctctatattgaacatgaacagaaatgtaatgtttggaagtagggatggcatttctgatacatttgtggatgcactttcatatatgtccatctatgatacaaactaacggctttcaggttgtatatatatgtatatatatagacatatatataaatatagagataaataatgatttttgggattatttcacaaatacacaaaaacaacaaaaaaaattacaaacatacggttgtacggaattttaaacatttttacgattttattttctgaaaatatggttttgatgcatttttatgttgtacttttgttaatttgttgttaattttttgttatttgtatgttttttttattgtttggatgttatttttgttacttttatgtaattttcttcttgttttcgtgttgtttttatagaacactgtaaaagtgtaaaagaaaaatctttgaacgtaaaaatgtagaatttttacaaaaaatagtgctttatgtagttgtccatgattttttataacgatctaagaccctcactcaaaagaggcagtggaaattgtacattttaagagtaccttggtagtgtatgagatttgtagcttcctaatgcagaagcatatacaagtttaatgagatggacatttgttaacaaatgtactgtttacacagtaaataggattggaagagagggtggggagggtagttaatggcttgtgctacatttttttttctttcattagaattgagtagccatcttaacttggccgtgtaactaacatttccatgtctttaccctatgccatattttcttaattgtgcatgtgttttctttggtttttttccactgagatgcaaagttaaaatgatttttaactaattgattttgaacttggaatagctgttcaacttctcttgaagcttgattgctggtgtagcattgtgaggacattgatatcatttgtacctttacttctctccacaacttatcaatggatgtaatcccttcaggatgattagtttatcgatctgggcatggttttcttactcacaaattttcataagcttatcgacaggaatatagatctcccatttcattatccaaacaatagggaactttgtcccttagccaaatggtgttgatgtcttaaatttcttgaaactctttcttagaattatgtctctctttcaatgacaaatttgttgtgaccatgtggcaggttgccatgtttgtagttttggcaatggtgttgcggcgaaaacctgatatattaatcagcttagtaccgaccttgaaggacagtcctaaatatcaaggacaagaaaagcttccactcaattcatggttagttactcaggtaaatcgagactatttaacattcaaatgttcttacgcccatggatttatattttgctcattggttgtaaacaataaattggatctttgcctctaggctgcttctggagatttggctgttgggttatacgtgtgggctcattttctcttgcccctgttgagtagcaagtcaacctctaatccacagtctagagatctgattttgcaggtagctgaaaggtaagttctattttttctttttttccattgaaattttttcttgtaactaggtatatctcgtttgcttcaatctcactgtctcttcttttcctttgttttgttgataaacagaattctatcctctcccaaagctcgtaccattcttgtaaatggtgctgttagaaagggtgagcgtatagtgcctccatctgcagtagatagtttgataagagccacttttactgtcccttctgcccgacttaaggtgtgtattgtataatttgggagcatccccaaaatttatcattattatcatacagaaattttactggaaattgatttttctgagacatttttatttattaggcaactgagagatttgaagctatttatcctctcttaaaagaggttgcccttgctggttccccaggaagcaaagcaatgaaacaagttgcccaacagatatttaaatttgcagtcaaagcagtcaaagaaggtagctcaaacttttgaagagtgttcgtcctttcctattctttcccaccaccgatctcttttcaaaattacaacaaaggattctatttttctattataatggattagcgtttttacagacgttcctgatctgtcaaaagaagcaagtgacatttttatttggtgtttgacacagagctctgaatgttacaaacaatgggtaagttttgtattttttttgtttcgatccttctctgcttaccaaactcaaaacattaaaataataaaaaaaagctaattagcaattttttttcccaaactttgacatgtactaaatcatgccccttgaa

SEQ ID NO: 110473 - DNA, 2477 bp, Cannabis sativa
  modified_base (43)..(70): a, c, t, g, unknown or other
tttattatcgttttagaggttcatatttaggttgttaaatcannnnnnnnnnnnnnnnnnnnnnnnnnnnggtaaaataattccaacacaagtcacttggagtgatactcttaacctcaatagccgccttcctcttgctgcaagttttaactccagagctcctgcttcttatgagacccactaccaaggactttcttgttatgctcctttctcttaggcaatgtcccatgtccatcactaccccgagagaatttggactcgggatccagagagagaaaagcatctaggccagggattggggaggcatcctcgtcgtcaatatcagagatgaaataatgggtggagatggtaccgggttataccaggtatgggattttctttttcgggtcccaagcatatgggtaataagctctgaaagcttaggcgagttgaagataagtgtctattaggctttgaacttattagtaacctcatgcccatacaatttcaggactaattcttgtagttcaggattattagtgggccaagtaatagggatttcatcaggatagttatgtgccctttgtgatctgtaaacccagaaataagggatttcaagagattgggcagtagaaggcccaacatcaagcactttaccattaccaccttttgcaaaatctgggctaggaaggtccaagtagttaggcccactaggaatagggattcttgaatttccatagtttcctgccaccctgtccaacgacattatctgagtattcgtaccttgtacagaggcacaatccctgtccttcgcagacgatcaggcagcagcactcctcgtattcgtactgacagcccctgcactaaacccttatttgtcgactctggtctgcacaacatcgccgatgctgacccgaggttgtcttctatgccaagacccactcctcgccattttatgactattcagagcacattccgattgatcaacccaggtacgagtcacccctttccccgccatagagaagcaattgctcctacatgtgtcatttttgatccaaggaccatacatttgaattgcagctctggccttaggaatcaccattgtcgtgggtgcatgtcacatcttttctatgtgagcaagccttctgcagttaaaacaaagataaggaagtttttcgtatttaaactggatccaagtctcctcctttccatcaggtttaataaaaaaccccactacaagagggtgagttatccaaacatccaaccaacatctcagataccccctacgaactaactcaaacttggatttttcatttgttttgacgaactcccctgctttcttggcaataatggtagtattgtcacctgataagaatctcgtgggaagatcatggaattgaacccagtaacgggccacttcaaactctgccattcgcacctcaccttccagtggccaaggtttgaggttgagaagaaccccattaacaagccatgggtatttgtccatgacaaaagagcaacccacctctgtgtcaaaaaagaagcctaagactccttctctacatttcttcattcgccaaaccccaagattccgccatatccccatcagtcttttctttacgacagaattcggcatgtctttacaacccataatttttcctacgcaagccttgtttgacactatatcctcgagtgtaatatcttcaaatagctctagcatttccatctccattgcactgtctctttcaagcaatttcccactagctttatcaacaacatcaacaaggacatctagagaaacttgaacctctttctccataataacttaaacaagactacacagaacttgacaatatagacgaaccaaaaaacaagtgaaaacaccccagactctctcacagtaacgagaaaagggcttagaaaaagactcaaacgaaagaaaactcagtccataacagactagaaccaactaggggacattctagttgttttcatttttatgatgttactgaataagctgtaattccaatattggcgtaaataagttgaactaaaaagcgagttaagttagtgtgacatatatgttagcttgtgataattgataccatgtctagctagatacaaagaacttagattgtgtggatatgtaatatactggcgtgaggttatcgactctccttatattgaattaatttttatttttcttgaaaaaaattgtattaattgctatattttcatattggcaactaatcactattgtagtttttataactcggatttagtagacaataatataattaatcaccccctcaaaaaaaagaaaaatatatataatcaatcacatttttttttgaaatgataatcaatcacattttcatgagtatactgattttttgtcaaaataaaacttaataataatctgatatagagatattatgacaaaactagttatattttctgtatctgttcgtgtgagaaattatcttaaagttgattat

SEQ ID NO: 110474 - DNA, 4438 bp, Cannabis sativa
gcctgagaattttctttttgtcaatgatcatgaggattctcctcttaaagccatcgatttcgggttgtctgtattcttcaagccaggtagggataactttctcaatcatgctttttagaataattcttactattactataaagttgttatttgtgacttttctcatagacaaaaatgtgccatggcgactaatgtgattatttgtcaatggtttagttgaagactcattcctttaatgtttttccttcccattttcaaacatgtctattttgttactgacacactcaaaatgacaggggaaacattcagcgatgtggttggtagcccattttatctggcacctgaaattctgcaaaggcattatggtccagaagcagatatttggagtgttggcgtgattgtctacatactcttatgtggggtgcctccattttggggtggtaaggtttttctgatgtctaaaagtttgattacatgttttcttattgctatatatataccagttttgacatgtttcctgttctttctttctcttattagaaactgagcatgagatatttgaggaggttttacatggtgatcttgacttctcatcagatccctggcctagtatttctgaaagtgcgaaagacttggttaagaggatgttagttagagaccctaaaaagcggataactgctcatgaagttctttgtaagtttggctacaaactgtgtggataatgatctatattacactatgagcatttcggatttgataatagtttgtttgatttcatcatgcaggccacccttgggttcgggctgatggaatggcgttagacaagcctctagattcagcagttttaagtcggatgcatcagttttctgcaatgaacaaactaaagaaaatggcacttagagtaagtcaattcgatgtcactaaatttcataaacaatcatgatttgtttttgttttttgagcttttgtcatggacagtgtgcattttttcttgactaactaagattaacttcttgcagatcattgttgagaacctctctgatgaagaaattgctggtctaaaggaaatgtttagaatgatagacactgacaatagtggtcaaattacttttgaagaactgaaaagctttggtgctaatctaaaagagtcagaaattcatcatcttatgcagtcagtaagtatcaggatcatcattggctcagtttttatcttacacaaatcaaacttggaaattctaatttaagtcgtatactcgatccacttaatcggttagaggaatcctcacctagtctgtgttttatgtacaactgatttataaatctaatcttagttcatacataaactgtattttacaactccttcaatgctaatcatacattgttacttttcatctgaactgcaggcagattttgataacagtggtacaatagactatggggagttcatagcagcaactttccatttcaataaaattgacaaggaagatcatttacttgcagctttctcatattttgaccgagaaggcagcggctacatcactcaagacgctcttcaacgagcctttgaggagtttggcattgaagatttccatttggaagaaatgattcaagaaatagatcaggataatgtaagtacatttttttcctcataaaactatcctatatacatgtaagtatatattgttggttgttacattataagtacttatgttgttgttggtttttttgtgtttcaggatggtcgaatagattacaatgagtttgtagccatgatgcagaaagacaatgctgatttggataaagtattacatagtaatagtttcagagttggatttagagaggtactacatgtttgttaacacaccttattattaagaagaaaagagaaaaataaataaaaaaattgactgactgactctattgtaaatgtgtgaatatatatatacaactttttatggtcttgtcttttatgtcagtcttaacatgtaactgaacaatttgattacatactaggctttacatgtacatgtatatatataaatataaaagaaattattttacttcttctttattatttcttttaagtacaaagacacaaagaataatctcatttttgattgattggaatgtcattcacttaatcagttcaagaaatgcatagaaagaaagttattccctttcaatctttgaagaacccaaaggaccttcatagatgtgtgtcagttgatttttagatgtttcttcatttttagtacttgtactaccgacaaagaataattggcaagctccaattcttaattatttgggaacttaatttatgtgtgaatttcttgccttaaaaattgtttggatgacaccacagacacagagtgacacagcaatggaagaagtggttggtggaaattgcctttcaaatgccattatttaacactaatcattccaaaagcaatgaattccctcttttatttctcatttgactaatataacacaaacaaaagaagaaaaaaaaaaaaaccaattccattcttatgttaaaataaaatttgatcttattaggaacaacaacaatatttatgactcagttttagagtttatttttattattttgtagacatttttttaatgaaaattcaagatgaacctatgtggggtaatgtttcttgagtcaaaacacagatatgacactatttataaaaccatatatacaaagtgggggcactcaattatatgcttaaggacactttaatcagtagttatatacatatttgggcacttgaatggactttgaaaactaccaactgtcatttgggccaaacccaaataggacttcaaaattaataatatcaatcccaaataattttcaattataagacagattagccaaaaagtggggaaccaaaaagtatggtaagctgttctatctaagagactgaaaactgaaaaaaaaaaaaaaaaaaaaaattggagaaaatgatgtagtttggcctactaattaaaacttttttgtataatcaggtcccaaaaccttacaagctgaaatagccctcaaaattcaagtaataaaaattaaggactgaacaggcaattagacctttagggattcaattataaggtaccttttcaaatgtatacatttatttgtgtgatatacatagtcatagataccctaatgataggacaaaacacaatgaaaatgaacaataatgtttcacaatgggacaatttcaatgaccaagaaccaattgtttgtttatttggttatagacaaaacccatagaaagaccttcaagacatcccatgagcaatagcatgaggttcatcatccatttgagaatgcagtcaataatgtaatgtggtcattctatttctctctcaaaaaaaatatatatatttattggacccttttttgcaaataagggattgtcttactcattggaattctttgttaagagcttgaatatgaagcctttattatttatttctgttcctatttgagatgaaacgaggtaggccataggtctcaaagagacacttatctttttgtggggccaagtagtttgtgtgctatcttttagtaatttgaggtccacatggatgagagagagatgttatctttacattagcaatttagcatataaaatatgagaaatgtgaaatggtataattgctccttagtatcttctttatcagtatcaaactcttattagtgaattaagtatcggatctcatataacttaagaaaataattttaaaaaatatcgttaatcaatcgtaacacatcacctatagaaaatactaagataccactagtacccaataacaatacttataaaatatacaatacatacacatatttgtagtataaatattttatatttttaattttatacacttatatattacataataaatactatatattacatttttattatagtctttaattctaaattggttaagtcttattagatctgactaaactaacacatatcaattgattagtgattacggttgctccgataattgttccagtagtttgttgtgtggattatgattgtgatttaagttgctatatgtgcatttttatgtagatttccgtaaaaatacaaaattaaaaaactgttttgaaatgtaaaaataaaatctctaataattatttaattataaaaactaaataaagaaataaaaatatatttttattatttttttctcgatatttcaacttttatttattttaagattatttaatgatattttaaaaaataaaaaatgagttaaactattaatttattgacaagtgatattttcctttagggtgtgtttggaagtaattactaggtagggtaattactagggtagtaactacacagtttagtaattgcactatattttaaaatgcaaggtgtgtttggacatcaggtggtaattacatatgaat

SEQ ID NO: 110475 - DNA, 4979 bp, Cannabis sativa
taattattgtattgttgaaactttgattttttttcatatttattttaacttgatgatatttttgacaagtgttgctcaagttttgttgtatttgtgatgatttaattatttggtgtgcaaaccgcaaaaactgcaccgcaccattttttgcggtgccgtttctacggttttttagtttcacagtgagggtgtggtttggaaaggaaaattgaaattgaaaaaaccgcatgcatgtatgggttggtttgaaaaaataatcatccgcaccgcgaacatccctataatgcaatggagaagaaagaaaatttgtaggagttttggcctcatagtagaagaaaacacatcttattataaatggacatgaaggggtgggttatgtacaaggactagtttcgacatctttttggctttttgtgataaactggcatgaagttgagaggatcagcttttcacacatccctccacctactcgcccaccctatccctaattatccgaaatgaaagataaagaaaccagtacacataccccgtgtacagaaggaaaaaagagttgaaatttcaaaatggatttgtccaatagtaccaagttaacagtgatttttaaagactagctacctcgtgacatcaaaatggataaaatttgagaggaccttctgacattggtacaataataaaatggagttggaggaaagatatctcaacttactgtcttgttgtggtgattgagcgcaaccagtcaccaagacaaatactatgaaaagccttgtggcaactgatattctcgcacatgtagtcggttccactcccacttttatctccaagctcatcatctacataaccaattaaaaatcaatagaataccttaatatgtaaacactgactgtctgtcttcgtaacattaccaactggaaggcattgagcatagcaaattccacattcaacttgttggtcattcttctgggaaactggggaactaggcagttgagtctccagaaggcatgttagattctcaacaaaagagctatccttcttcctgtgcaattaaacagagttcacttactttaacattcaaaagctatggaactgttgtattatcaaaattaattgtaaatattttggtccctttcttcaaacatataataagttctacaacattatgataggtcctaatctgatcgtaacagttggagtgacagtagagtaacataagagaggaaatgagacagagatgagagtagctgaatgattctttttattgattaggtaaatctcaggtacaagtgtgaaggtagtttgaccaagatacaaagtctctaggttcctatagccgaatacaccctctacaatctcataggattgttatttatactccaagtgatccagctgaaatataacaaactaatctaatacaaaaaactaattaatacttaggctttctgttttgcctagtatatgttatagttgttggggggcctattatagtactccaaattacagtaattatatactgagaagagccaacctttaagatgaaggttgtcatcatattgccttacactgaacgaatcatcatcattatctgagttaatcaaacaagttctgaacaagaggatgtttctccttaagttcgaaatggagctattgtcaagtaataagactacacttatttgtgtcatacacatattgaagtcaaaactcagatccatattcaaggaaattgcatagtcataccactgttttctatttctttgccaattcattctcatcatgtcgacatgttgacctgaacctacaaaacgaatcctaacccaacttaaaatattcatactatacatacaaaatgaaaagtttgtagaaataatgattccagttactaatttgctctgaaatctcactctggtaaagatctaggatccatgacattaatagacaagataatgaagcaatcattccctgaaaatgtttcaaacaatatttgttattttcaattgatgagaaataccaattattaacacttgagctataaaccagataagtcacctatattgattgaacgagaggacattgccaaggatgacatcttatggtcaacccaaagtgctttatcaatatcctccaaagtagaccaaaattcctggagcttctccaagtgcttaacaataataattaaaatccatcaacagactaatacagatcatccttatagccagaagcatgtaataacacaacttatgaaactatatcaaaaattacaagcctgcaacttatacctcctgaaactgctgcaccacatttttcaaccttgagtgtgttgaccattctaaatcgaaaatataaggcacatcctgagaaagaatcctttttaattcaacaccagaagaaaaatttaatttttaaagagacatcatcaaacttaaaaaagtcatactgctgaaatggagggtgggcatttggggtaggttgtgtccaattgtatttcaaggaaatgtactctgcccttcttatctctggttgtagaaagcacagagtccaaagatgtgagtaagacagtacaccaatgtaataagttagaaattggcagctaaaacaagggataaatgagaatagtaaacaaggaaaatacatttacaaacaacaccacttttgttagaaacaaatggtcttgaaggtactatgggttttagacttctagataagtaaaaattgtcataaccgtgttgtttcttagaagtttagatcatgaccggtaatataattgtgataacttgatcattaatcatatgttttcaacagatcaataagaatcatcttaaaattttatatcatatttatggagaatacatagtttttctcccacactcttagttgggaagatatggagaaaatgaagttgggatccttttatcccaatatggaggacactactaggtgaatggaacaaaaaagagtaaacatcttacaaaatgcgaaggctaagaaatgttaggtcaccacccaatctccctagatgttcccatccaatctcttctatctgcatatatatcatcaagtgagaaaacaagttactaagacactctatgccagaaagataattaaggaagtgcttttgatacagtgataattgaaagttcagtgtattaagaaattgagtaggaaagataaagactggttggaagctttacataaagctttgtaactttggttgtaacagttttgtgaagcaatatacagactctaatttaccaaaaaaatagttcatagtgtaataaagatatacgtagagaacatgaaagcaagagttgtttgacatatacacatataccaaacttaatgacttccaaaaccaaagaatttacaattgcacacgctctcctaatgagatgactttatttatgcatcgaaaaatagaaaacaattaatgaacatatgcagtttgtaatatgaaatacaaaaccaatgaccaataaaacataatccataaaacatttatctctttcaatgaagattaagcacaaaatattgaagaattttaagtagactgcagaaagatgcaatgaattgatgcttagttgaacaaatatatcatcacagattcacagccaatgggagtcaatgagagaaagtagaagtgtttagaatgaataaagctcaatgtaaaggattagattagagcaaatctgtaattctattccagccccatgctgtacaaatatggttacacaatctaatctctagactaacaaactataacattagtaagtataacagcagaacttaaaaactttacacaaagaagcagttatgtacatgtgtaatcaagtaggttgggtaggcatatccataagaatataaataaattttacatgaatacaagttttcaagaaaactgatgcatatataatttaaagggtcaccatgacaatgaatattcaacaaacctccgagtacactaagcgatgaaatctagttgatgtgcacaactcttcacttctagtctgctcaccacattcctgtgcaatcattaatgttgttcaatacgtacatacatcatagtatcacacgataaaccaagacacacacacaagggaagacatgaatatatatatatatatacacatttgttaaaatgttcagagaatctcctagtcagcccacatcttcttgcttaggtaaaatcattacctttggttaaacataagactacaattttgaagatgaattcaactaaacttaacagaagcacctcagtaactattattttttttttattattattttcccttgaaaagcttaaaacagttagtagtaacctgccattttttcaaaccttccagagtttttaaagtaaggaaatatattatatctctgctattacaagaaatgttaaattttctctgtgcacgtatcattactcataaatttatgtaaatatatattacatagaaaaaaatcccctataccccacgtctacaaaagagaaataagatcactacaaagcagtatttactattttgcaagaaaaacgtattatttgattcgagtagttctcgtgtgggaatttgtcaaacaggtggtgagcatgatgataaatcgagcaaaagcagaataacaaaaactgaataatcaatatggggaagcaaattagcaaagaggagaaaataccattgggattggatacagtaaatgaaatgactgtcaccagtttgtactctagtgtctccttgctgcctttcagtaatattttcttcttccattcaattgatttttttttttttggagataaccattcaattgatttttaaatcaaatgattttgttttaaatcaaatgattttgttttttttttttttttgtttttttgttttttttctttttgccaaggattataaaaaaaaaaattgaggcttggcttcttttccttcccttttaatcaaatcatatattattttgggaaaaaaacaaaaaaatacaaaaaagga

SEQ ID NO: 110476 - DNA, 6178 bp, Cannabis sativa
ataatatacacattaaaatgttatattttaaattatattatttaatataaatatgatatatatatatatatacataaaaattataaaagttgaacaacaccctagtttgtattattatacataagacaatcgtaaaaggaaaaaaaatgctgagtatgctatataatgtgcactgtagtgtatacacggaaaaatgctgcagattatacgttagagctaattgcacactaaatttagtgttttaccgtctccatgaagctcctcttagacattttactttttaagcaaagttccgcttgccaacgcgtctttcttttctttattttttgtggggcatgtataaatgcttcttagtacctagcccataatttaaaagaataaaattgataggcacacttattttatacgtttaaaatacacataatgatgcagtacacatcttaaattacatataaaaatagtatgtccaccccataaaggtttaaattcttcatggtgcatgttgaatcattgtgtgtattttaagtttgaatttagcatattacacagtctaacaatgcaagtttaaaataattttcttaaaagtttgcttctacaaattgcgactaaaatatcctcttacaaggttttttatctctttcttgtttctctttctcctccccctacccatggccgcgaagcaccacattcccaattcccacaaaacagcaacatcgttttgacattaaccccacctttccctcatcatccaccaccctttgattttgtttttaatggtgaaaacttaatccaaaacttaaaacccaagcaaatatccaaatgacactaatttatatgttttgaatcatttgagcataaatttttggttttgatcgcaattttttttttcttttatatctaaaaatttgaaattaaaatttggaaaaagaaaaaaatgatggttagcgatactatgcgatgtattatgaaaatttggcttctaaaataaatttttcataggaccatcatcaactatcgcttttagcatcatatttgcctctgaaatcaaattttatgggaccatattattaagtattattttgaccactaaaatcaagcattcaagagactatcgtcaactaacgtttttagcattgttacttcctaatttattttatataaattttttcgtttgattttcattttgagtttacaaaattaaataaatatgacaagaaagtgaaagttgtcacatttttattttatttttcaaattttataaatgatgattgacaagtgaagtctaatgaaaacttgattttagaagccaaaataatattaaaaataacggttaatgatgggaccatgaaacattgatttttgagaacaaacaatgcttaaaacaatagttaatgatgaaaacttcatatttgagcgcttgatggtaaaatggtgctcaatgatggtccaaatcaaaatgatgctgaaaaggatgcttaacaaggattaacgatggttcgttgaattataaattttagatgccaaaaagaatgtttaacaatggtttcatagaaaaataattataaatggcaaacgataattaacgaaggtcccaaaaaaaattaattttagatgtcaaattttcataaaatcatcacaaatatcgtaaaatatcattttcactctaataatgtagatttcagatttttaaattaaaataaatagtaaatatattcgatcaaaaccaaagtgtatgcacaagcacaattgtgttcaaagacataaattagtgtcttatgtaaatattttcttaggcttaagtttgaattaaaattgtaatgatttttaactaaaatgattattggtggtgggtggtgaggaaaggtacgtcaaacgatggtgctatgccacctgagtagtgactagtgagaggagaaaccaagagaataagagagagagaagattattttagtcccaatcaaatgaggactcataatttgtttagaattattaacttggtatattatgaaattataagttaattttgtatgccatattacaccgtattgtattgtatattaaattgtattttatgctctatttttatataaaactatatgcagtattaacttttatgattacttaaatatataatattttaatataaattaaaatttaacataaaatatatatatataaaaatataatatataattcaattcaatataataaaatacaatataatacgacttaatacaatataccaaacgatgtactaggaagcatagaagctcaaatttcccaatgattaacaatgtaaatatgggaagttgcgaggcatatgtcaatacataattatattaactcattggtaattttgcaattatatcgaaaattagatgttaccaacgaatttcacttgcaccagaaaggtgaacaaatttaaaaaaatatacatataactgcgtcgagtggtagaacagagaaatatttacaagattaaattacaatcaggacaggaagcaccaatcgatccgtagcaagtaaagaaggcaaataatgttacaagaaagaaaccatacccaattgaattggcaaccacagcccacaaatacacttgagttccaaactataataccattttcaaccaaagtgatcaggttagagaagctttgatataacttggcaagatgtccagaaggctttggatgcaactcttataattacagggttttggtatatcctgcaagtacaaaccaagttcaaacacattagtattgaaatgatgcagcataacaaatgtagaatataaaaaccatttgtattatctatgttctgattggtactaactcacccaattgcagtagccccccaggatgctacattgtaaatgactttgcttccatcccaggcctttcgaagctttcccttcttctttttcaccgaaaatgttttccgaagggctgaaagagaatttaaagcatgagtacccgctttagtattcaaattacaattctttggtgagtgtaaacttgtttaggtgaaaactacacatatctgcttaggtgctgagaatgacaacatctttatttgtacaatttctaaatgctagttttttagatcactagatgaaacgaaagacaaatttaagtgatgaaattattaaacagcttatttaatgctgagaaggtaaaaataaagcacccagtttcttcaatcttgggccacatgacatggaaaggatactccctatcggcaatgtttccataatcatagtgaaatcagattttaacacggacctggcaaagtggaacagcctacaaattgtactggctgatattttaactcttcatcttattaggtacaacaaattcactactccttcccatgtgaacccaatatatcattttcatatattttcatcttaagcttatgttttcatctaacggtgcaggtgcatactgtgttgtgcaattgaaatggactacatgttgcttctttgtcattctacacattgaaaacatatggatacattcaactaaactttccagaaaaagccattaagcttaccttcttggagttgattaggaggcaaatcctgcaaatcatgttgcaaatttaaaacattagacatttatcttcctgaaagcaaaattatcgcaaaatataatcatggcagcttaagttaacacgctacatattcttactactgaagaaaaattctcagtaacaaagatgcaccataggacattaatgagtgactcatatgccttaactactaaatcaccaagtgaacagaaagaagaactaagagggctttcatacacatcatactgcttaaccagattgtttgcatttgtcccagtgactagaaattagtttgcactattaaattaaccaaaagttctttgatgagaagttaatcaactaaaatatgcacaaagtttcatttaccttagtttgtttaatgctctccaagtatgctgtcataaaacatgcaatgccctctaatatatcctcctggctcacgagaacatactcatcttctttcaaatcagagttctctccctcccataaatcattagcactgaccacatcccaagaattaccttcttctgctgctaaaagagaatagaagcaaatagtcaattataacatatgtatttacagtttgctcttgtaaatacataagatatcaaaatatataaatgcttaataaatgaaaatttcatttaataaaaactcagtagatatcagagtctagcaaattagcgcatacctgtcaaattttgtggaatagatgcttgtgcgcaagccaacttttgaaggaaatcagggcactcaactctagatttaagaagctcacacaactgcatcagtaaaatgggtaaacatcagactgatgaaagtaacatccttgagtaacacaattgttacaggtttatgtagatactaccaaattaagaaaaaaactcgtgtaactctttgattagtacaatacatagttatgaaaacgttattaagcaagtttcttccattgaaagcatcgatcgtaacagacccacagaatgttgtcgcaaaattataataattcggtcatcaactcaagataataattactcgagagaaagcctaacgtttaaaaaaagaacaaaacacaaattaacaattaccctcaatcggaatatggaaacaattttcaaatcgctcaaaagcaacaccgacatagaaatttcaacatcatcatctgcctttctcaggcaataaacatgaagtttatccaaaatcaagccacaaacaaattaaaattaataaataattacgccaaactcaaaatcaaacctcctcggcctcgccgctgctccggtcctcgccggaggaaggttccgcagtgttgtcgtcttcttcaccttcatcgtcttcgtcgtcatcatcagcaacaccgccggtggtttcgagcaattcgagagctctctggcactgctggagcacagcttgcaaggtcttcctcttaacgagtacacgatcgttctcagaattgtcggtattaacattcaccatgaccgagggtttagagtccaagacatcgacaacctccatcccaacttgaatgaaattatttagccccaaattagaaatcagaaaccctagtaaagaaaactttgaaaaggattagagttgcttgcagccttggatctaagaacagaaggatgtgatctttgtagagacgtactagtttggagctcgaggggtggatttgccgtacggctatggcgatgataggagaatgagaagaagcgtaaataattggtgtgcatcagctgctgctgctgcaatcgaaacaacatgttgcatgtgccttttttgttttttattatattattttattttattttagagttttgtttgtttctgcaatttgtgcttttacgattgcagtcttgcagcagacgacgttgctttggagtttggatttactggcgttgggttgggttgggttgggtgggtgcaacgtctgcgggtcttcatttgggctacgtctcctttttctatcggccttctttttttattcttcacatgaaaatgagcccaaattgataaaaaaaaaaaaaaaaaaaaaacaaattataaaagtatcaatatacaatactttcacggatttaatttttttatatagaaactagtaaacaattcacgctttcgcggccgatgtttaaaaaattttaaattatatatatgaaataaattatgtattttatttgatgataactaagtaataaaattatatcaattttaacttaagttaaagattaaatcagcccaatccaacctaacgatttagaatttgagtcttatatatgtcttgtttaagacaattacggagtttgtactgaaaaactaaagaaaaattataatttcacaaatatttgtatttataacacttacaaatttaatacattgaatacttatgttgatatttactcaaaaatcttactgtgattctctcttacgggtaaaataaagcatcccttgttatgttatctctatatttgaaacggatattgtcatcatacttttcttgatatataaataaattaaacaattaataatcaaccaaactaatcaaaaattgattattatttttaatttgtgatcatcactaatttttaatgtaactattatttgaataatataatat

SEQ ID NO: 110477 - DNA, 6233 bp, Cannabis sativa
cccccccgatattccctcgtcctcttccccttctccttggtggaaaaacctctgacatcttaatatcccgcctaaggtgaaacattttgctttccgtgcctccaactcaatccttccaaccaataggaaccttgcatataggaaaattatccagttcccagtttgtcctcgttgtggaaaccataatgaatcagtctctcatgccctgttcttctacaagagcgttcgaagagtctggaaagttacagttttctacccttatattttttcttcttctttcactgtttattttcatgatattgttcacatgatatatattactttaactaaggaagatgtagaatgctttctttgtgttgcttggtttatttggcacaataggaacatggctcttatgagtcaatcgcaggatcagccccatgccatagtgaatttggctcaaagctttttgtcggactataagtcgtcatcttcagcccgcaagctctctgctcttgtgactcggtctccctcagtcacaacctggattcctctggctcttggtcgcctcaagttgaacactgatgctgcaattccaaagagtaatgcaaaagtcggttttggaggagtcattcgtaatagtgaaagtcaagttgttgccgtagtcgcctttccccacattggcggtggggatgttgccatgcttgaagcgaaatgactccttgcttcccttctctactgcattgaagagagttttcttgtccaccaggtggaaacggattgcaaagctatcactaacgctttggcgaaccctaaagaagacctttcgctttttggtgaccttattaaacaaattatggcaactttgtctctcctcccagatgcccatgtgtcccatattagccgatttgcaaatatcttcgctcataagtttgctaattgggctttggagttagatgaagtaccggttttgattggtgatgacccctgtaatcttagttctcttctttttctttaagggcatccctcccttcaaaaaaaaaaaaaaaaaaatatatgactctgtgtcctatggtgccttaactaacaatgctcaactaaaatatttggatgatggacccaatacttattaattagcatcttgtttgttaaatgtgtacttaacattttaattttaaatgagttagataaataaaaataaaataaaaaacatatcatccccagttattgaaactaattaagaatatacaaatttttattaccaagcaagctatatacaaatacaatttacattacatgtgtatgtacacgtatttataagatctaacaagtattgatcctccaaactcgaagttctacaaatatatatatacatgaaaattaaaaacacaaattaattagcagtaattaattttgtaaatgtaactaagcattattattattactattaggtagcattaatgatagtggacaaaatttgagaaacatctttcatggtcggcctagattgtgggttctcatgtaagcatgcaactgcaagctttaagatacgaacaagttggtccaacgtttgtgtgggtggaggttgaagacgctcgtccaacacatcttcaagagcaacctctgcccttttcgccggagacgacaaacacaaggttagattccccgggtgccttccttttatagtttctattaccaatactccaaaactatacacatcacttttttcggttactttcattgtgtaagcaaactctgcagaaacatacatacatattttaaaaatttcaacaaagaattgaggaaataaaaatatttgattagtattaattgattttaatgttacctggtgcgacgtagccgaaagtgccagcaaggacagtccagttagatgaatcctgttctaaaagcttagcagtaccaaaatctgaaatgcaagcctcataattggaatctaacaaaatgtttttggtcgatatatctcgatgaacaatcggtgggaaagtctcagaatgcatgtacgacaacccatctgccactcctctaatgatattcactctcttcttccaatccaactctctagcttcctggtcgttttttagctttgaactcaagctacccttttcatggtactcgtagatcaagaacgagtgcctcaaatgggagcagaacccatgaagcttaacaatgtttcgatgtcttatatgggtcaacgctatcacctcgttgaaaaactccttctgggataataaggtcaacggcctagaatgaccatattctagttttttcacagctactactaagctacttcttgatgatgatgatggtgatgagtaagaagaaggaagctcagctttgtaaacggttccaatacctcctctccctatgcaataagcagaatcaaaatcctctgttgctcttataatttcttcataaagctttttcccgtcgaaatttgaaacagaaaacaacggtttttggctaaccatttccacctgttgaccatcctctgtctcttgcttcttcttccttgtccttctccgtataattacaaaaaaagctaggcaaaaaacgacgacaagaactacaagaattgggataacgacaataaggtgggtgcgttttgatccagggagagaggatttgttgcagagctgtagacctccttgtccttgccctcttgtaacattaccacacaagcctctgtttccttctaatgattgtatagaagcgttaaggaatgctttgttgttgggaagtggaccccacaaattgttataggatatgtcaacgtacaacaatcctgggattcgatcaaaactgctgggaatagagccagaaagattgttatgggagagatttagtgtcaacaagctttgtaaaaaccccaactcgtttggtatttttccaatgagatagttataactcaaatcaagtgtcgagagctgagttagcttccccaactcaaatgggatttcgttgcttaacatgttatggctcaaattcatggtgtgaagctttaacaagttgttattaagaccaaggcttgttgggattgagttggtcaaagtgtttgaagacaagtcaagagactctatttgagttagtaaactgagttcagaaggtatactgccagagagtttattgctgtacaagtacaatttcatcaaagaagagagtttcccaaatgacttgggaatctctcctactaaaaggtttgatgaaaagtcaagtactgtaagtttggataagtttccaatctctggtggtatagtacctgagatgtaattcccaccaatgtaaaaactttgtagatttttagaactaccccaattaggtgaaatttcgccatgaaatttgttgttattcaggtttaacatgaataagtaaggatagatatgaccaaaatactcagatatatttccagtgagatggttgtcttggagggttagtctatgcaagcttgaacaatttttcaagacttttgggattggaccttcaaaataattgccattggctgtgaagatttgaagaaggttgttatggcatatgttttggggcaagtaaccggtgaattggtttctggcaagtcttaaaacagtcaagctggtgagattttgtattgattgaggaatggtgcctgagaaattgttgtcacggatgtgtagagactttaatttggtcaggttaccaagtgaagtgggaagagttccattgagttgattctcccacaattctagactaacaagagatttcagtcttccaatatgatatgaaattggacctgaaagtctattacggtatagataaatataggaaagatttgttaaatcatataaactttcagggattggaccagaaaggcggttgtgattaatggacaaaacttttagctttttaaggcttccaaatgttttagggatatgacccctgagattgttgtaatccatgtgaagctctactaaacgtgatagattccccatttctaaaggaatggtccctcttaagttgttaaaagagatatcaagataaatgagtttggaaagggaagagatttgagttgggattttgcccaaaatagagtttgtgttgaggtcaaagtatttgagattaggcaatgaagtaaaaggaaattcatgaagcgtaccttgtaaaccagatttggtaaggttaagcttgataacacttccaactttgttgcaagaaactccaaaccaagtgcatggacttgtcctgttttttgaagagttagaattactactattattattgttataactccatgaagctagaattgaaagagagtagttttcaagggtggctttccaattgagaagagcaacatgttcttgatgataagttgaagaagtactagtagaatcaccatcaacaatggttggtggtacaacaaagaagacaaagaaagataaaagtacgattttttgtgagttcgaagttcccatggcatctgaaatatatgatttgaagtcggtcccttaatataatttagctttaactctaaactctagcttatcagattattcccaagaaatgcacaaaagacttctataagtttttctactctttgtgcatcattaccattaagtaaatagcaagcatgaaaagggcttccttaattattttaattggtcaacgctttaggctttttctatttttggttcgaattaattctacttggagaaagtacttgttatgtgctaataaaatttgatatcatacgcaatcaaattagttagtcaaagggttttttttacatagtttaatagtacaagaatggttcctaaaatatggtaataagaatcaagcaagaaaccaagtcaaatggtaacttgacacttaattacattaaaagcatgtgaaggtgatcattataacgtgctgactcactaaagataatatccttcaccgaggactgaagacataatttatagttagtttaataacaaaatgactttgactaaatatgtaataatatattctacttctttgagtaattgtctctatctagatgatttccatatttattccttaagtgaaattttttatatcgatataatactctcatttgattgcctttactggttgttatgaatatacgaatatcgatatttattttatgcttcattgacattggctctcatgctacgtacctatagcctttaatatacataaaacaactcttccaagtgagcaagagacaatttgtttgtatgagagagagagagagagagagagagagttttgttggttgacaattataaatctaagccagctttagcagatttcacttcacgtgaatgtattatgcaatgagaaagcattatgttgtggacgcgcgaagtatttctagtttttaccattatgttattaggctatttatgactttttacaaaagtactaaaatattgactaagaatttcagtaaccagtaattagagcggtatgaagtagttaatgaatgttaaaagagatgattttttacgtggttagagcattaatgaatcttagtccacgagtcactatatatatttatgagagtatatattacagagagttttttagttgatccccatttttatttattattggggaatttataacttatgatggtggtaaaaaagccactatatattatcgtgtttgtttacaccatacctggcacaatttcctaactctaactttgggcatgattgcttactttatgatgagttttaggctgcctataagagtttggcgggatgtgatttattccttgtttatgacttgatggctcatttatgcagttttcgactgatgtatagatgttcttaaaatcaaggaataatgggcttaaactcttaaatacgcttggcagagtaaggtgtgtgacgctctttcccatgtcgtattaaatgcatgtacagtgtcttgacccttgagtgtcatgtcatctttcattagttctctcgtaccactgaatatgcttctctctgcgagagagcaaacaagaggtgctcgcggtccagctagattctcccgaaaatgactaacttgttattactccatggaaataatagacttcgagaggaattaaagcaatgtgtcctgtaacatgagtccattgctacctggcttcctcctagactaccacgtatttatggagaaatcctagacaacaggaggtaattgggaggccttaatgacgtaaaggatgatttccttcgagcttaacaaaacgaaaataaatggtggag

SEQ ID NO: 110478 - DNA, 3736 bp, Cannabis sativa
  modified_base (3689)..(3696): a, c, t, g, unknown or other
tttataaaaacacagtatttttaaaaagatttctgtttgacagtatttttgtaaaaattaacccaaattctagtatttttgtaagttttccaaattttttgtcctgttaatactaaaaaataagttgaaaaaaacaagggaaggaagcaatgcgagccatgaaaaaggccatgctgcccatacctatcatcctctaaggtctcataagacatcaaagcctgttactaatacgtccatcaactttaattctctgctcttgggcttttcattacgtttttttttttacttccttcgtttttgttttatgttttaagtgctttttttttccctgaaactgttttaagtacatttatatatgacaaatatctctaaccatgtattcggattggattggtgaaagaaagcaagaaaactagaattgtagagaaaagtagagagaaaatgaaaatgaactaagtggagatggagagaatgaattatgctgctcaactaaattgtgaggaaaacttttgatatttatattaatagaggtgcagagtacaagagaaacaagaaatggttgtaacaactttttaactaacataaagtagattacaacagaattaactgattaactaatcttcaaagtcggtgtagtcatcttcatacattccaatatcccccctcaagttgtacgggtgaacaccaagtttcaacttgtgcctgaagtagctgaatgaagatgagcgaagcggttttgtgaaaatatctgcaacctagtttgtggaatcgacatatcaaacatccaatttattggctagcacacgatcacagacaaaatgtaggtcgacttctatgtgctttgtcctagcatggaataccagatttgaagcaagggaaccagcccccatgttgtcacaccatagaataggagtttgaaatagcttgactgagagttcatcgagtaaagattgcagccatattatctcagaggttgctaaagccatggccctgtattcggattctgtactggacttggaaacaacttgttgctttttggaacaccagctgatgagattgccacccaaaaagatgctgtagccggaggtggatttcctatctatggagcaactggcccagtctgcgtctgtttatccttgaaggtcaaggatttttgctggtgtgaatgttaagccaaggtgttttgtgccaactaggtatcttaacacacgtttgcaagcaccccaatgttctgttttcggttgattcatgaactggctgagacaatttacaacgtaagcaatgtttggccgtgtgtgacatagatattgaagagccccaataatgcttcggtattcagtgaaattaggaagagatgttcctgactcatgtgtgagtttggagttggagcacatgggagttgattgtggtttagagtccaacatttttgttctcatgagaagatccttgatgtatttttgctgagtgagaaatacagtgttggcctctctttgaacttcgaatcccagaaaataatggacatggcctaattgttttagagcaaattgcttatttaaagcttgaataacctgctgtatttgctgagtgtttcctccagttatcaatatatcatcaacatagaccaaaagtaaaaagagagtgccttggttgttgctgaaaaacaaactagtgtcagattttgactactgaaagtgtaaggacagtaagaactgtttgagtttgtcataccatgcacggggagcctgtttaaggccatagattgctttgttgagtttgcaaacatgatttggaaattggggatcaatgagcccttgtggttgagccatgtatacactttcttgaagttctccatttaagaaagcattgttaatgtcaatttgttgtatctcccaattgtaagtagtagcaagggtaaaaatgactctgattgtgcatggttagacaactgggttgtacgtctcaaaaaactctatcctaagtgtttgttggaagccctttgccactaatcgggctttgtatgtggagataatgttgtcagcattatacttaatttgaaaagccgatttgttgctgattatttgagcatcaggtggtttaggaaccagaacccatgtgttattcctttttaaggcattgttttcaacatccatggcatttttccacttaggatgggcaagggcagcagtaacagttgctggtttaatatctgtttctgttgtagtgcaatatgttttgggtttgaatattcccatctttgctcgagtgagcaggggatgtacattttgactcacaggttggttgttggagttggaagtggaggactgatgtgatgatgaggattgggaagtggtttctgtggtgttactgtcagagatggtgttgctgtctgatgtggtttcttgtggaggttggtatggtggaggaggagggtgatgtggagtgggtaaggttgggacagtatatatgttggaatcaatgtaattttgttggacagaggagggggacttagaattggaaaatagattttggtagggaaattctaattcattgaaggtcacacttcgagccacatacacacgaccactaggatttaaacacctatagcctttggagttgagacaatatctaatgaataagcattttgccgatctaaaggagactttgtgtgtctcataaggtcttagcatgggaaaacaagagcacccaaaaaccttgaacatattatagtcaggtttttggtggaatagcttttcatagggtgaaacatggtctaatgtttggttggggagtctatttattatgtaggctgctgaggtataggcttcccaccagaaatttaatggcatttgtgcttgagctagaagggttagacctatgtccactacatgcctatgttttctttctactctaccttgttgttggtgagtatgggggcaagaattcctttttactatgcctagggactgaaacattttgtacagtggctcatattcctttcccatatcagtttgtacacttttaatttgtgtttgaaagaacctttccacataggcattaaattggagaaataagctattcatttcagcctttgttttcataggaaaaagccaaacatattttctgaagtcatcaacaaagcttagatagtatttttaaccatcattagaagtgtgaaaagagggtcccaaacatctgataaaatcaatttaaaaggcattgttgttttattgatagtacttttgaaactaaaatggtgttgcttgcctatttgacaagcatcacataaaagagctttattacacttggtttgaggtgctatatgagaaagaactttggttaagacatttaaagaagggtgtcctaacctacaatgccatatatttgatattttatgtgtatcaagaacaagattgctggaagtggtgtgattgagggctgtgggactcaaggctgagtgatctggtgtagtagtgggaggaatattcaactttggattagtgacttgaagttgatagagaccttcatgaactgtaccccgaagaagtacttgcttggtgttcttgtccttaataagacaacaaacatcatcaaattcaagggtaacattattatctttggtgaattgggaaatacttaaagggtttttggatacatttggaacatgtaagtgttggaatatgttttaccannnnnnnnatttactaccatgtatgtaatttaacatcctaaatatgaa

SEQ ID NO: 110479 - DNA, 3901 bp, Cannabis sativa
gggattgcacagcttacccggtattttcccttgatcacgggattactgactgtcacgtgggatgccttggcaattttataaagcacattgtgattttattagggatgatgttatgggtctgttacccaatttttctaaacagaagagtttgtttgttctttgaattagacctttgttatcctcatcccaaaaagaggtaatgcacatagctccaatgactatcgtcccattagtctttgtaacttttcttataagattatctcaaagtttcttgctaatagaatcaagaggttgctgcctagaattatttctccctattaatctacatttgttatggggaagtggattgtagataattgcatcatctcccatgaggttatggattcttttaaaagttgaagggtcgaaagggctttgttgggttggaatcggatatgtctaaggtgtatgatcgaatcgggtggaggttcgttgacaaaacaatggaaactttcaatttatgtgctcaatttcggcagttggtggctaaatgtgtgtcctctgtgttcttctccattctcctaaatagtggcccattgaagtagtttcttcctagaaggggccttaggcagggggggtccactctcccgatacttgttcatcttgtgtatcccacttgttgtttaagtctgaacattgcaatttgattaatggctttacatcctcccgaaacaactaatctctctcgcatctcatgtatgctaacgatatctttattttctacgaagctaacttggagaatattataaaggttttcagcgctgcttagagttgtactatatggtctccagacagcatataaaaactcataaatatgccttgattttctcttctaatgtagggacaaagctaagaaatgatataaaaaaattaatgggggtaaagagatatgattggtagtgacaaatttctcaaaaacctaattttattttctggtagcaaagtcaaagatttgagtattcttattgatataatggctaggcggattgaaaggtggaaagaaaaacttctttctcaggccgggcactctaccttgatccagttgggtgctttgagtacccctatatatgctttgtctactttcatgatctcggaattcatttttcatgagttagataaaatggttcgtcaattttggcagacgggatcagtggacaagtcttgttttcttgctcttgccaattgggattcactgtgtgtgccgaagtggtggggtggtcttaacttgaagaaatgtaaagatcttaattttgcgcttgtggtgaaacttggttagaaactgtctttcagagtcgattctttgtggtgttaaatcttttgtgagaagtattttaggcgtaacctctcctcctgggctgctcccattcgtaattctatgtcctttggtacaaaaggtattatgtccactatagatttcatccgtaatgaagcatgcttcttaatgggtaatggcttgaaagtggacatttgacattctccttgggtatagttgtacgattgggatcattatgaagcttccttcattccaagaactcgagagaggagttttgattatttcactgttctttggtgttattggaaagtcgaggaaaaagtttagttaggaaatcttttgtccccactctcaatgaggccgtcatgtctattccatatcttatccttgatgttgatggtgatttgatttggaaggcttcctctgacaactcattttcagttaagtatgtttatttggcttgtgttcgatcttgctgtcagaagatggatgatctttggggtcttatttggaagagtaaggcccatgaatgggtgaaattctttctgtggaaattagtaaagatattctactatttgggagtaggattcaacagatatttgaaaattgtacacattgtgccttctgccacttgggtgaggactttcctcttcatttgttctttcattgtgacatttccatacaactttagagatcttgcctctggggagtttgctcggatactttacagtttgctgacacgaaagacatggtgagatggttactactacctttgaatattccctgaggtgatgatggtgatagagcctccttctccctctatgttgttttttgatgctaacacctgtggagggcgaggaatctagattttcatgaaggatgcccccattttagtgtcaaagattcaatgtgggatccttgagtaggtttcttgttactctgtgaggtcaataattgcagttgtagagagacttgagaacattgtagtttttcatactcaaaattatacgtggaatgaccagaatatctttgttgatgctgctttttgaggtaattttgggattgctgtgattttggtctgggatatttcgggcacggtggtggaggttctcacggtgcagagtgtggtgatgtcctcctttgaagtagagttggttgtaatttagtaggcgtgccttcgagttctgtagcgtggatggttgagtgtctccattttcttggactgtcaagtggcagtgcaaggtttgctggctgggaagtcccctgtttggaaggcttgtgggatctttgatgccgccgtgagagttctttctagccttacatatgttcatctatgctggattcctcgtagccttgatgttgctgcacataacttaggatcttgggctgcctctaatgtttgtttttaaggagttttctggcaaggaagtggcaccctttgttgccacggtcaaattttgtttttcagcacctccttttattcaataaaagatagttttaataataataataaaaaaaagagagattaactaactatgatttgttttttcattttcaggctgaggttgaattctactcgaatcataaggatgcatacaagcagctaatatactattattgagcaggactattttgttttcttgttctttgtgtactctaatttattattgttccaggttgtttaaggtttattcattctatcctaataatataatacttttaataatattggttattctaataaacaataatttgctttggttattttatttttttctatttaatttgatatttttgtgcattacatattatctatatgtgtatatatatattgagaaattatgagcatcacatttgtctatattgagggcaaattttctttataaacttgaatttgaatcatctaatttaatgtgataaataatatttagtcgtatagaatagtatttttttcccaaattgtaacatattatatgaatctacaaatattctgtataaatgatgatcataaaaagagttgtaaatcttataagatagtcataaaatttggacacttaattttatcatctagtgtataggtggtaagaatttaaataaaaaatatttatttgttttatttgatgataaaatttataaccttaaattatttggtaccaaatattatgataaagtttaaaatattgagtatagatgatgatgataaaaagagttgtaaatcttataagatgatatttataaaatttggagagttaattttatcatttatggagtggaagatggtgaaacttattttatcaagattttaatttactaatcatgtacgataaataaacatgtaaaagtataagaaaccatacattgattgcagcataaacaatatgacttattctgtttagtactctaacccttactcctttttgtagtagagtatcaccaagcactgaacctgaatctctttcatttacccgaaaagtaacagttcttcatattttcacaaggaatccaaataaaatatcttcagaaacagaaaaaatattttttattgaaaaatttttgtacaacacatacattcatcaaataagcacataa

SEQ ID NO: 110480 - DNA, 2003 bp, Cannabis sativa
  modified_base (1953)..(1969): a, c, t, g, unknown or other
gaacagtgtaataacataaatacaacatatcccaagcttcaaaactcaacaattcaatcatattgaatcaaaattacacattcaggtgaagaaaactcaactttagcttcacctaaccaaactcaattcaaatagccaaagaaattgctcaaaacactctccaacatactcaaaaacctagtctaaatacaacctaaactcagtttaattcttacataaatacaaaaccctaacctaaaaccaactaaaattcatagaattcacaatctataaagtgtaagacttaccttagtttcttctagattgatcttaagcacaagaatctacttaaactcaatggagattggtgaggaaatctctctttgctggctggttctctcttgcacgagaaggagagggggagatgaacatttgaggttccttagtttctaagttattaatacaatacccttaaaaagaaaagtcagccttttattaatcctaaatcaattaacttcatcttattatccactaaaagacaaataaattaaacctatgaaatgaccataatccccctccctaaacttaaactatttaaaaatctaggggcattttagtaattctagctaatccgtcaaaccgacattctaaaattttaaactagtccaaaatactcccaaaataatccatccataagtgtcatgacattcctaaccatattgtccattttccacgattgccgagcccggaaatattttattctagaaacggtatccacaataatcacatattccaataaaatctctgtaattaataaattacgttttatttgatcatttaataaatccacaccaattaccctaagtaagatcataatcttactttattaccaaaataattacatatttaataaaatatgtccaattaaattccatattattttccgggatattacatcaatgaatcttggagcctgctacataaaaactatttcagtaagctcttcattaaggaaagcattgttgacatcaagctatttagctggccaattcaaagaaactactaaagtgagtacaattctacttgtaactagcttaattactggagacaattttttcctcatagtcaattctagctgtttgagagtagcccttcgcaaccaatctagacttaaatcttttcaaagagccatcaacattcaacttgactctatgaacccatttgttccctataatatgcatcacatggtaataaggaacaaaaacccaagtacttgcagctttcaaggctttaataaactcatctaacttagaagagaaccaccatggaatcctgtaaggcaactttaagagaccttggttcagattgtattaaagactctggaagagagtgcttggtagagatataagcctttggtttagtaataccatttttgagatcaaatgaccatggaatgttttcttacggtaatagcttgggaagtatcacttccagtaggcagaggagataatgttgctcttatggtattattttgaattttctccaatctgttagcaataggttgaggatttttagtggatgtaaaaggaagattaatgtgagatggttaattggcatttggaaggactattttttggccaatgaggttaattagtgttgggattaattgtttattgtaggttctgattggtgactggaataggagattgagaaatgatggagcaacatcaatttgtggtgatgatgagcatggaggagcatatatagattgagaaatgatgggcacagaggtaacattggtattcatagaagaaacaatagtgttagaacttgaacaagttgaaaacgttggagtaggaaaataactagtagaagaaccagattgtaccttaagtgttgatgatggaagagagatacctgggtaatgtgtgttgggttttatgccctaaataaaagtcatttcaatataatcannnnnnnnnnnnnnnnnagatcagaaataacatttaaggttgcatggttca

SEQ ID NO: 110481 - DNA, 3505 bp, Cannabis sativa
tgatctttttaatttttattgactaaaataaaaaaaaaatatgtttggccggtttggataggttaacccgactaaaccgttggtcagtttacaatttattttttaaaattaaacaagttgcacttaaattttaatattaaattaaaaaatatataagataaaccgctcaatgtacagccttaacttcgagttcagttaaagttgtagtaataagctaagaataaattaaaatagtgaagaaaatgagatgaagggcgaaggaatggagagcagaggcagcagccattcagattcttcacgcctctcacaaaacccactttctacgtacttccattccacttgtttatttcattaatttatttatctatggaaagaaggaagagatatacatcactattcttattataaaatacatcacttaaaaattaaaatataagttagtgtgcgcagaggggagtcattttcaagtggatagagaagaatagaggttattttggagcatatgcaggtgtggggtttacgtgtctactcccagctttttcttgattagaagttttgtcttgttctcaaatatcccaatcccaaccaaactacacacacatttacatttttgactcttcttcacctttatcttcatccacattccattattcaaagttttaaattaataaaaaagaaattgtgaagcctctattaacatcctcttgagtcaagaatctcatccaataaaaaaattatgtttagctcttaaaggacttactatcctcttatgaggtgtaagtacgtagcaataatccagatttccaaaaaaaaaaaaaaaaaaacaatgaaccaattacaaacctctaatacccccacaaacattttcactttaaatttgatctcaccatcacgagtacctgatacccttgttgttttatataacacaaaatctaatgaactccagctagctaggctcatccttattatgtgtgtgtatgtgaccatctgtggtactatataacattccaacattattgagattcataaattatattccccaactaaaaagctataccattcacttatttatatgcacaataccaagaatcattcaattcaatccaaatccaaatccaaatccaatcatcagaatatttaactttatacattttatatttttattcatttactttacagttctagctactactaaaaaaacaaacaacatacatatatcagtttctattgaaatcattctactgtacaactatagtactactcctacgtacgtgctaatctcttttaggacttgggctaattatacatattatattatatatgatatggcctgtgtaacattcttaattctattgtttgtttctaattctatatgtacatatatatgtaaaagaaaagagctttgtagttgatttggattggagaatattaaaagggggcgcgatgaggtatgccttttcttctacttgcattacgatggttgaaaattgggggagttgaaggagaaatgtttgaagtaccattttcagagctctgtttcatcatcatcatcatcatcttctgatgatgatgatgatgtcccttttcatctatcgtcatcttcctcttcttcttcttcttattctttggaatagtactccatgaatcttcagactctgatcctctatttccatttccattgatgtttaaatttgtattattctccttcattctcttcttcatgtgtttcccaatcattgttgatattgttattgttgttgttgatgatgatgaggaggatgatttcatcataaatgtcaagtctttatcaccccgcttcattcctcccagctatgccaatatccaaacatacatagtaaaattcaaatgtcataaataaacaagatataaatataattattatgtgggtaataagaattagtgatgaagagatgaaaccttgcaacccaaagagcagaaacgaaaagaatcaagaaggcttctgcaacaaatctcacaagtattagtaactccttttccaggtctaggctgaggacgctcattcaagaacacaatcttggcactgttgattatgtaagtctgaatacaagaaatgtctatgtacttctgaatctcattcactctcaccacgttatgataagacgacctccgaatctaattaaattatttgttaattaataataataataataataagatagaaagaaagaaagaaagagaaataattaaatatacctgaatgaggtggtgatgtttgtgatggtataaacagtaggaacagagtgagttgcccatgcagtcgagacagaacatattgcattcacttttgtttgaatctccatggattgaacatcccacgaaatagtttcctctaagcattggtttcagccactcaggacaccttcccatctcccaaatctcctctgagtattcttttcctattctctcccccactaccactggactcacctataaaaacaaaccatgagattagaaacactatacctactattattcttatttaatagttgaaacataataataaaattctgtaacaaaaacatatataccatggtttaatatgactgttctgttctgttctctgtgtgtgtgttagaatagaagaatgcaaaacagagaaagaaagaaaagggttatgttgtgtgttgtgtgttgtgtgaatgtgaaaagtcttgagtttaacaccaaaaatctttaaaaatatatatatagtaggtgaataaggcggtgtacactcaagatagaagctatcttatggccgtacgattgtcttgtaaacattacacgtgtcttctattccttaattccttatacatataactagaagagaatcaaataaacaataaacaaatagaatacaactaaatatgtattgggacatgctctttaaaaattattacattaaattatatataatttgagcttttaaaaaattatatataatttgatatttaattagactaataactctactaattcattttagcatttctcgaactaaataaaaatatactaacaaaaaatcaaaacactaaaaaatatcaaatgtaacaatagtaacaataaataatctttaatattatatcataataaaatataatatttatacatgtattacaatttaaaataaaattatatgagtatgtattcattccacaacttattatggacaacctaacaacactacttgggcctaaatatatttctaattatgcttacaaatgagcaatctattctcgatcgtctaaagcagataattgttttgacaactgaaagtgaactctacttctaacctcgtactcaatttgcctaataattacatgaacacattgtacacgtggaaccaaaatacttgatttctgcttctccaaatgtgataaacaacacatgtaatgtccccgcttcaagcatctattggactcttacacccacggactaatggctcttatacacaggttcgtcactttagctgcttcctagattg

SEQ ID NO: 110482 - DNA, 7349 bp, Cannabis sativa
tttttttttttttttttaacttggcaataactcggattacgagatcccccaatcccatcagctaccgactccatccttagctttttaatctcatacctacacatacaaaccacaacaactcataaattattatagaaacccaataaatttatcacaactatatatataactcaacaaccaaaaatgtattcataatcataagtattattaatgcaattatatgacaccaaatcatcaactatatataatgtcatcaggctaagtacgagggtatcagcgactgtatagtggttgttccaaagaacagatgtgataggtcccacaattacggagtacttgctaagtgagtacacaacaaacacaccatatactcactgctgactataaactttaaactatatttgagttcaacatgcagacaaagtactatatattatgcataaagtctgtctatatataatcctactatcattatattatactagctagaggcatacaaagaattcaataacatactaacaacacattctaaaatccatctacagttccttacctcaactcctaattattagctttttcttgagtttatcattgtgactgttttcctattgtttccaagttcagtaaacatatactgaacttagtttttgaacaattaagtttctatactaataatttaataaaacttagtccaaattcacattccaagtcgttggtcctcatccgtcttagagtaaaatgaccaaattaaatattcttttttaaagtggtcatattaagttattattcctaataataatacactacaaaaaactgctacttttagttacaattttttagtaatacatactttttttatgactaaatgtgatttttagtcacaataaaatgttacttgggactaaaacatagtatttagatataagttgtcactaatttagttttagtcacgataagtattgtgactaaaaatatatttagttacaacaaattgtaatttttgtgactaactttagctacggaccttttagtcacaatatagaaatgatgatttataattggtcacaactttttcacttttagtcacaagttctgctttgactaaaagtaaaaatttttatagtgataatataattttaaattatgtctaaattctcaaataaaaaatccaaatataagtcaatttacaaattctcaagcctcgagccccaaacccgagcctaactcttatccagatctaattgaaagcaaaatttatcactattaaaagcattctaagtcccaaaatactttatggatcttatttccaagattgtgatttctagagtatcccaagcgacgaattcaaagggaaacttacaaaaatattggaataattaactcattcattatctatttttttatttcttttagcttagagtattgatagctggttttgtaaggagttgtgctcattagtgtgatttgttatcattattcttgtaattaaactctcaagttaattgaacaagaagtgtaataaaaggctgagccattctttctgcattaagtcttctccctcatctgtttctttgctttaatttctttgtttattattttttgattctgtttttgctactggttggttgttcttgtttggtgttcaaagtttttgatcctccattgtgtgattgttaatcacaacgaatagtatcagagcaaggtttgaattagagtgatcaagaactgtttgactaaagatctaaatatcaagaactcgatcaagaaatggcagcaacaaagtataaagttgacaagttcacaggtgccaatggctttaatctttggagaatcaagatgagagctttgttggtgcatcaaggaagatagaagaccattaattttgatgcactcaaagctgttgaagatgagaagaagaaaatggagatcgaagccaaggcacactctgcaattctcctcagtgttggagatgaagttctcagagaagttgcagatgaagaaaaggctcttggtctatgggacaaacttgatacaatttacttgaagaagtctcttgccaataaacgttatctgaaaaagaagctatacactttgaagatggaagaaagtaaagaactcagaagacacctagatgatttcaacaaaattgttcttgatttgaacaatattggtgtaaaagtggatgcgaaagaccaaactattattctactaagttctttgcctaaagtgtatgaacactttgttgatataattctttatggcaaggacactctcacaatgtcagaagtaaagtcaactttgaactcaaaggagatgtagaagaaatcagatgaaaaaccaaaaattggaggagagggggttgttgttaaaggcagacatgataagaagggatacagaggatccaagcactccaatgagaaagggaaccagaagtcaaaatctaatcctagaaacaacactgacaagaaatgttatttttgcaaaaaggaaggccattttagagatgaatgtattgctttgaagaacaagttgaagaaggaaaaagggaaagaaagaggtcaagttgatgtgactgtagatggttatgattctgctgatttctttgttgtgtctaatgcagattctggctaagaatggattcttgactcaggatgttctttccatatgtgccctactgaggatctgttcagtaatcttgagaagaaaataggggaaactgttttattaggagacaacaaggcctgtacaatacaagggattggctctgtgatgttgcagatggatgatggatcatagaagaccattacggaagtaaggtatgtccctgaccttaaaagaaatctcttgtcaattggtacattagcatctaaagactgctctattaaaatagatgaaaatgtgcttagaatcactagaggcactaaaattgtaatggaaggaagatataaaaatggcctatattttctaaaagggaaaatagttactagtttagtgtccaatgtttcaaatgcagatgatgatgatttaaccaagctatggaacttgaggctaggccatgtgagtgaaaggggtattgttgaactcaagaagcaaggaatcttaaaaggaagaataataggaaaactaggattctgtgaagaaagtgtctatggcaagagttgcaggcaaaagttcacccctggtaggcacaacaccaaggaacaattggcctatgttcactcagatttgtgggggtcacctaggattcctacccttggtggtgctcactatttcttaagcatcattgatgatttctcaaggaaggtctggatttacctcttgaaatcaaaggatgaagctttcaacacatttgttaagtggagaaagctgcttgaaaaccagattggaaaaagcgttaagaagttgagaacagacaatggattggaattttgctctaaccaattcaaggcattctgtgacaaggaagggattgcagagcacttgacaattagagacacaccacatcaaaatggacttgctgaaaggatgaacaggaccctcctgaagagggttagatatatgctcaaaggtgttggacttgaaagaaaattttcaggggaagctttgcatacagcctgatatttgattaacaagtgtccaatatctacaataataagttgcatggcaccacaggagaaatggacaggtgagattcagaactatgatcacctaaaagtctttgggtgtacagcctgtgcacatgtgaagcaagacaaattgaaacctagagccttgaagtgcatgttccttggataccctgatggtgtcaaaggctacaagatatggtgtctcgaaccaggttttaaaaggtgcatactcagtagagatgtaatcttcctagaggaagaaatggcaatgaaacccctacttgtcccaacactcaatatagatagcaacttcaccaaactgaacattgaggtggatcctcccaacaacttaggtgaaatgccaacttaagaagataatgctgactctctgaaagctcaagaagatcttgatgattatctcctggccagagacagaagtagaagaagtgttaaaccccctgctaggtatggcattgcagactactctgcatttgcacttgcagcagcaaatgagttagaaaactcaaaacctacctcttacaaagaagccattgaaagtagcaataaagagaagtggttaaaggctatttatgaggaaaatgcatccatcataaagaacaagacatggtctgttgtccctaaacctcagggtcaaagacaaattaacagcaaatggttgttcagacagaaagaaggaatgctaggtactgaaaacgtgagatacaaggcaaggttagtggcaaaaggatacactcaaaaagaaggtgtagacttcaataagatattttgcaccagttgtaaaacaagcctccatcagagccattatggctaaagctgcaaatcaagatctagaaatagatcaaatggatgtaagaacaacatttctccatggaaatctagatgagaagatctacttgaagcaacctgaagggtttgacaatggagacccaaaccaggtatgcttgctacacaaaccactatatggcttgaagcaagctccaatacagtggaatgttcgatttgatgaattcatgacaaagattaaattcaccaggagttgctatgatccttgtgtctactttgatgacaacctttacctcctattatatgttgatgaaatactaatagtaggaaaagatagacacaaaatcaacaagctgaaagatcaactaaagagtgaatttgagatgaaaaacatgggagaagctaagaacatactgggaactgaaatcaagagaagaaggcatgatctcatcatgctttcccagaagaaatacctacagaaagtattgatgaaattcatgatgggtgaagccaagctagttgtcacaccattggctcaacattttaaacactcaaaagatcactcacctctgagaaagaaagcatatggacaacataccatatgctagctttgttggctgcaaggccaaatttggcctatgccatgagcataatcagtaggtttattgctgatcctggcagcaaacattgggatgtagtcaagtgggtgatgaggtatgtgaaagggtccttaaacactggtttggtctacaaagcaagcaggagagaaggctgttaagttgaaggctttgtggactcagactatactggctgtattgacacaagaaggtccctcacaggttatattttcacaactctaggtggatgtataagctggaaatcgaatctccataaggtggtagcactgtcatctactgagactgagtatatggctgctacagaggcaataaaggaaactatatggttgaatggtcttactaaggaactaggattcaaatctgaagacatgacaatacattgtgaaaatcaaagtgccctgcacttattgaagaacccaatgttctatgaaaggtcaaaacacattgacataaagatgcatttcattagagacatgattgccaagaagcaaattcaagtaaagaaggtgagcactgatcacaatccaactgacatttttaccaaatgtgtcactcaagccaaattcaatcactgcctgaacttggtgaacatcagcgacattggatgagctttcatccaacctcagatggttttgcctctcacttctctcaagtgttcaagcccttgtgtttataccaaggtggatttgttagtttatggtctagtcacttagtcttatacacttggcaacacttcatttgctactaaatttagttaattagttgtttagtcctataaaaacctaaccgagcaactgtaataactaactcattcattatctaattttttttaattcttttagattagagtattgatagcttgttttgtaaaaaggagctgtgctcatcagtgtgatttgctatcactattcttataattaaactctcaagttaattgaacaaaaagtgtaataaaaggctgagctattctttctgcattaagtcttctccctcatctatttctttgctttaatttcttggtttatttttcaattatgtttttgctactagttggttgttcttgtttggtgttcaaaaagtttttgatccttcattgtgtgattgttaatcacaacagtttggtacgttgtagtacattgtattgtattatatagtattatattgataacttatatctaaatactatgttttaatcacaaataattttttattatgactaaaaatcacatttagtcacaaaaaatttatattaccattacaagagttggtcactaaaagtatttttttttttaataatatataacttagtttcattaaatttaccaaataacactttctagaattatctaatggttctaaagaaaataatatacctaacctatataatcaaatatgtatttctcactatataacactaaacagcacaatactatatatactataacaatccactcacataagtaaattaaaatatgattttccaagtattattttaaaaattttaagctgtaataatcacataaatcaatatttcactattatttattaaaaaaaacttaaaactgagttgttacaagttgtttatttaaataaattaataaggtacctgggtaaattaaatatttacccattattaatatatatagtttgtcctctaactcctcaattaataatataaataaaattaataaaagaacaaaaacaataatttatagcatatatatgccatgcaaaatgtgatcaacttattattatatgaaagtaattctaattgatttaaaaataaaaagtaattctaattttgtaaaattccaaactctagaattttgtcataattcccaaacaaaaaataggtgaaactcatcataataaaattatataattattcaaaattcctaattaattctaataaatggatcacaataatagcacaatttcatattgtatcaagaaccccaaaacgtaaataataaacaattaacaaataagatatataaatattttttaaaaaaaaattagaatattttcaaaatattcttaccgttttatcatgagttttgtgttgaaccaacttaattatttggaagaagaagtagaagttgcatgctcttcattagtcgctcgttctgaaacaacatgtcaatcaatgaatttatagaacataaaataatgtccagagagaccaataatttataattgatacacataatagagttataataagggtaaatagtggcataagtacctaaagttttaggtttgtaagcggcataaactcaat

SEQ ID NO: 110483 - DNA, 11452 bp, Cannabis sativa
aaaaaaaaaaaaaaaaaaagtacgatataattaacaaaaaagaattttattatataagcaataaaaattttaatattttttatatactctcttgtttttttaaatgatcaaaattaatttgatgtagttttttttgttaatgatgattaaaaattacacaattaattaatgctcaagatatattatttctgtaaaaaaaaaatgactatagcagaatcaagtatatatatttatgatcataaagctagactgtttaaatatgaaacattagttaattatatattttatttattacttgggaagaaaaccaaaaccaaaagaaaaaacagaacaaaaaaaaaagaagttacaaataagacttttatgtctctctgtcttatgacttaattaacagaattaattaattaattaattaattaagcagtagctccaacaggaacagctcccttaagccttgaagatccatatagagtttcctcaaacctaataatctcatttttggaaccataagcaacttgagttctatcatcaagattgttaatcactttgtcaagcacagattgatgcccatcactactgtgacctccagccttttcaaccaagaaccctaatggtgctacctcaaacaatagcctcaatttggctttggctgttggagatatcacatttgtgaaaatacccttctccttcacaataatctataacataattgattgtgtcaataacaaattcaaaatatacattgttaattatagtagccataatatcaatttttcaaaaattctaaaatttttacagagtttattatgttgaactctgtttttggcatcataaattatttgatattatctaaaaaaaaaaactattaagatgcatgttgtaactacaatctatagtgatatgaaagaaaaaataagttatacaacaaaagtaccttatagtcagggcaaaaattatgttaatcaactagctgaagtagtcataaaaggtatgatggaaggatgcgtgtgtgtagaaggtcttacaattgtgtcataaattgtacaatgtaatgtatatataaacgtttgaatcaataaaagaacaaaaattatgttaatcactcgaggttagctcaagtggtcataagggttataggagggtgtttgtgtgtagaaagttttggaattgtgtcacaaattctgtaatgtaatgtatatataaacggttcgataaaaagagcaaaaattatgttattttaagagtattgctataacgcaccaatactcaaaataccttgatgcaaaattatgtattgagtccaacatattgtattttaaattgaaatatgtcggcggtatcaataacagtatgtcatattaagtgatgttaggtaatactggtgccttgattgatatatgagtgtgttctaacctggttaacatcaggaaccattcctccagtgtatctcaatgtgtacttctctttcacatagtaatcaattagctgtgaatggaaaagtacttagaattatatcattcaattcattgttgagaaaattagaagaaaaactatagttaattactttgctgtattctgggttatcaaatgtagctctcaagtttccaggggagaaaagttttccttcattaatttctgttgtgtccttcacatgctgccattttcctttttacacaaacaaaccaaatcattagttttctaatgaaaaatccagttataacagtttgaaatagccaatgtcaacagtttggtactctgtgttttacaaaacaatattgctttgactcaaggcccggccttaagttaaggcaggataggcccacgccaagagccccttaacctaagggcccaattttttaaaattatcatttaacatcatacaattttcttaatattttaattaaaatggctctaaatctaattttagggcactcgggtcaatataagcattattttttttattattttataaaatacagagtactaaataagtattaacgataataaaaggttaaatttgtattaaacaaaaacacaaagtactaaagtagtatctatcgaattaatgataatgcatcatatcatagttagttaagttagttagttaccttcatccaaaagcaagaactcatgagtaccaggaatatctttaagagcaagaacataagtagttcttgggccataaattcccatggctgcagcaacttgatctcttcctgtgacaccggttagcttatcgcccggccacactccaaagattgttcctactgtgaaattcgtgtcaacgatactcgatccatcgagtggatcgaaagccacactgaatcctcctgttgttaatcatgattttttcgaattcggttattagaagacaagaacattcaaattatgaatttttttagatcaatttttttgtttagattttcttaccttcaattgggcctcccatgtcttggagttcaggtacttcttcagaacaagcatacttacagaagtgtgagtattgtaaggcctattaattaagtaaaaaccaattaatgatttaggaacttaacaaagttgttaaagctacactaattgaaataattttgttactctttacatcaaaataaattgaagtaaaggaactctgcatagctatatcactatatggttacatatttgtgactaaaatgcattacatatataataaaacattttactttttaaataataattatttactaatgcttcatgtggagagtaattaataaataatcatagaattattagattggattgaattaagaaaaataagagagaaaaagtataaaaaaaaaaaatgaattgatcatatatatgtaaataactaaatcaaattgtaaaaattatctaatccaatcaaatttgaacttattatgaaataaaacctcaaaaagacctattatgacaaaaaatagaaataattacataaaatactaatttttgtaaattttttacatttttacgtttaatttttttttttatatttttacggtattctataaaaatacatgaaagtaataagaaaacaacaacataaaaaaaataaagaattaacgacaaaataataagaatacaatcgtaaaaatgttaaaaactccgtagaaattgtatttttataatttttttgtgatttttgtgttttttttttttgaaattatcccaaaataatatttaggtaaaggaactctgcataactaaaaaagattatatcactatatggatacatatttgtaactaaatacattacaaaatgaaattgattagacataaacaaatgacaatttgaaatttgaactaattttactgtgcatcaagagataatatctgaattgaaattagttgattaagtaagaaaaagaaaagtaattaacctcaaaaagaagcttatcagcaagcatatcaacagcaagttgctcatcaccaaaggagttaacacaagcagttccaccacaagaagctgttcttactttaaatgcaattgttctaagtgcttctcccattgacataagcaatgttctcagtcccttatctgttgttgctttgttcaaaaactcttcctaccacaacacacatattttactagttttaacattttactacaaatcctcatattttatgacacaattttaatcttcttaccaagctatcaccaatttcgcattttgttactgatgtagagttcttcgattttacaacttttagcgacgattttggcgtcacacgcaatgattccccaaacaacgagcttgatttcaagacctgtcatggttattcaatattttgtaaaattctttaggtatgtaaattttttcgtggcgaaaatctttatacagtttatttttggcaatacatatctcaacagttatacatttgatgtcacatagggattaatatggtaacaaaatgactacatagagatttttgctacaaaattttttacataaaaacttaagtgcaacaaagtaaattacataagtagaatgagatggtctatattaattttgattttttgttaaaacaatgaaggactaaaaaccttattctaaaccaaagatatcataaatttgataaaaataaaaaatgcccaacaaagtatataaatacatacatacatacatatgtatatattatatagtagttaagattatataaattatgagtaccttggaattgaaagatggagaaatggatgaaggagagaagagagacatagaatgctgagatgaaatacttggaagaaaagttccacgagcacaacatgccacaccagtctccatactcaaattaccttaaaaattattcttctttgatttttaagactcttaaccaaactaaaacaaataaaccaaaagaacactaagctaagctttttgcttttgattttgtgttattgattgcattgggcatgagaacttggaaggagagtgtagtattagataagtgtttggacacgtggcaccctctcagtagatagacccaagtatagtagcattggctgagaagtaattatcttcacactcgtatatgtgtggctataaaataataagataatgataaaaggcctctgtcctcaccaatgataagttatgctgatgaaataaataaataatttgcaattttatttaattaatatgatgaaattctgttgaaaaaaccaactgtttttttttttttgttagtttataagtttttatgggaatgtgtatttgtatacgtatttggctaaggtattttatattgggatgtgtgttgttttaaaaataaatcaatgatagtattaagcaaaagtaaactcaaaagtgaccaatttaattccaagtcaattcacttctatgattttctcattcaatcatttttttctctttaatttttctgccttttttttttatctttgatgggtgttcatattcaaatctaacgacaacaaatgttacaaaaaaacaatatggaatagagaatgaaatattataaatggtacaaaaattaaataatactcaagtttctcaaaattttcaataccaaaaacaatatcatttaaccaatggatcaagtcaacttggcattgattttcttggatttggtacttttagcttttcccttctgttgtttatactcttcataaagcttcaaggaatgttttgtatgatccaactcactcatcaatctttggttctccttaatgtctcgaagaagcgtaaaatgttccgagagtttgtttttcaacatgtcttcatcaacgggagttgtatcgattactgattggactccagccgatttgaaggacccgcttccttttttcttaccggtggatttagaggaatcggttggtggggttagtgactccagctcatgtgacaagtcgttgaaagcttgtattggggaaacattggagaaaaagaactggtcgtgagtaacgttcatgtttgaaattccagtagccattgttgaaacagcaggatgataatgcttcacaagaagattcagttcccaaaggactgaagcaagtgcaccacttaagttggggtctgaagcatatggatggtatttctgtgaacaaaaatgccgttagattttgttgttcaacaccgaaatcccagaaatttgccctcaaaattgttggttattaaaacaaaaagaaaatatacttagaaaccaagcaatctttgcataattgtataacatgagatattaccgcaatggagccggaaaccgagccacccccggcatcattttccaacaaatttcgacacttgacatttttctgaagaagatgcttcagagtgaccaaagctgaaaaagttcccaaaggacatgttatataactttacaatgattcatatcttatggttgatacaaaatgggaaatttcaatataaaaaaggcctacccgccattgcttcggcagagccaaaacataatgagaaagtagccagacgctttacaaatgcagctgccttttgcatgtcatgttgtctatcttcacacaacattatcttcaaagcttcggctaagacttctccctgatctctgttaaggaaacgaaattgaaaaaagactaactaaagaaatacaaacccgacttgacatctcaaaatgcacttgtctcacacacacatatatatatatacactaaaacaagagagagcactgaccttccaggcctgtattcaaggattatattatacagttggataaagaagtcctgcagatcaacattcaaggcgtcgaggttgctcttcatcactttaaaagcaacaatgcagcattgaaggcgctcagatactgtcaaacttttcccagaggctttttcagaactatcacaaccatatgcaagccttcttagatgacttatgagatcactcatgaaatctaaatctattagatgcgaaaatttccctaaacctctcaaacagggagccagcagagggtgggaaccaccagcatttgcttcagaactaagatacaaaataagaaaagagaaaaagtagtcaaaaatatgtagagaaaatttattagatagcagtctatcaaaagtcattctcgaagtgtcaactttccaggattcagatttctgacaaaatatgtggaaaataaaatataacaaggtttcctaaacaatcactactctgctcacccatataaaatatatttatacatatatacactaaaaacatgtaattgaatggttttgataatcaagcacggttttactttccaagaagaaaaaccgcatgaaaattgccgctccccaatctcacttagacaatattttatgtactatgtatctcaacagcaaaattagacaacttaatacactaaaaagctcaggaataattcaagaaaaagccatctgtgagaggcaatgatgtaaataaatatatgtacatacaaccgtttccaacctaatcacccatatgtaaatttgcaaggacaaatagacaatcatatatttgcttcctgtagtatctgttaattcaatgtaaatgagtcttgaacctaatatcacaaagcttttgtgtatctttactaaacaatactacacgacattgcatgttcaggtcaatagaattatacgatgaaaaattatagtgaacctggcaactgttgccactgtatgcttcaagatacgaaaatatgttgcaaacacagcagaaagtgtctctgtctgcatccttctccgctctgtaatatcaggggtgtaagctacagacttgtaatcagcttccacctagtacagcaacatagtgttcccatcaatagaacaaattaagagcaataaaattgtaaaaggtaacagtagttcttttttaatatgtaaaaatctacctcctctcttatctttgacatggtctctcgtttacttctctttttgtcattctctggcaactgacttgcatcatcaaaattctttctcttcctacctctcttgggtttgactctattctttggatcttctttgtgcgacctcccaagatcttcatagaatgacaaagataagaaaacctgagaaagcaatgcaaacaatgttcaggcgaagtttagaaatttaaaacaatttgcgaagttttatccaaatgtgcccatacaaaaaaaaatgtatatataagctgaaagagggcatcacacctcaatggtatcaggatgcaattgacaattataagctttcacatgatctgcaatcaatcgaacagcctcccctgtgagttcgccaccatgtttaccctcatttgtaaaaagtgactttatcgctgaggaacaaagtctcctgttaacaagaaatatacatgtaaacaaaatgtttccattgaaaatacttaaactagatgagccactgcagctatattacaagaaaaagtgtaaattaaccagataagccaaaaccaaattagaattgccccaaaagggaaagcttttttagacttccactccctaagcagattcattcaggtacattaatcatcttcatcttcttaaacaaaagttaaacacaaaatccaagaaaacattgtactgagattttcaagctcgaaactgtctttagcccctaaaaggaaacttatcaaatcttaaaaagaacaaggaagaaagaatgtagaaacagcaaaaccttacgacgtcatcttgggagcttatgtttctgacaacaacacctaacaagctctcgcgaaagttaaaatgaggtgctgcatcaagcaaagagcagagacatcgaatggccacatgttggaaagagggcacattaacaagtgctgatagtttctgcaagtatgcctgtaaaatcatgcatgaaaaataaaaaattagccgtaatttactgaacttaaaagttattcatgcctgaaaactaaagcaatagtattgaaaagcaaatatcagaacaatttgacaatagattcaaattctcattcaaattggagtaccaaccttgtatgaagataaaagtgttgactcataatatcgcattttcttgacatccttagagactttcatctgaagctccttctcagtaggaagcctgatccggtagctgttgcacaaatggaaaatgtgaaaatctaaactgaatacaaacaccagacaccttctatacaatgaaattattcatacccggggatgatatccttaaaaattgccaacaaagataacagtccaagtttgacaattggatggttatcgtctttacaaagtagtaagaactcatttagagattttatattagactctggatcagaaagcagtgcagttcccagctcagcaatcttacgcttcttattttcaaatgcttcttcagctgtgagatcttctttcacctcagcctaaaagcaaaaggggaaaaaaattatgggacacacaaaaccagagtccaagtattttatctacttggtatcaatggaatccctatatgcaaacattgtgatacaatttaagttgtgtatttgatacagttccaaacaatacgggcatacaacaaaaaatgaaagcatattgttctaaattctaatacatgtcaaattgacaataaatattatgaatactcaatatctcaagtatattccttatatattttatgactaaggttcacatttgttacttaataatcctaacaattacaagtaaaaaaaatatgacataaaacttcagtcatagggaaaacaaagtaaaataagaaacttcaaaatagtaattaccaaagcagctgcttgtggggtttgctccacttcaggtgcgaccaccacttccttcccttgtttctttgcctctttcctaccctttttgagcttcgccctcttctccgcctttgtcaacttaaaaacacctgtaccttccttatcatcttctttctcttcttcttcattaagattgctttcagattgctttgaagcctttggaactataccagacagcatatacaaaaggcatcataattacaacttcaaagactaaataaaagacagcaatgtaagatagtgaaaaactaaaaacctgttctgtagacaagtgtcccatctaaagttttcaccggaagagcatctacacgatccacttcaagcttgtcaacctcttgctctttcagcaattgtttcttctttaatcgcctctcgtatatcgcctccaaagcatcctctttcacatcagcaacacgagtaacatgcctttttgtacgcaaatacaaagttgatcagtagagaaaaatcccacacaaaaaaaaaacagcacagaagttaatttgattcactatgacagcaaagacattatcttcttcaatatgaaagttaccattatataatttaaagcaagttcgattcagtttcaatgaaaataagactaaaacacacacacacacacacacgcattatggtataaaaaacttcaaacactaaagaaaatcaacatttccagtacatatttatgaacagagtttgatatagaaactagttgaatgatatcaaattgatcaaatccattaaaatcaatattctgcatagaattaaaggtataaaatacagaaatgggaatgaattaaaatgaaaaaacacgaacttggtgatagattgggtgtccaagcgtgaaacgaagccagcataatctttattgtggtgaacaaactccaagtcctcatcggagacttcaatttcatcatcagcaatctccggtggaaggtcaggtggaagaattatcttctgctttccaccacccttcttcgtcctcgtcctcatcatgagtttggctagggtttcgggtttttgggtttggtggttttagtttgaagctacttctgttacgacctctcttacagggttttagcgatttttttcacttacaattttctcagaaatattatccgttggatggaaggatctaacggctgagatcaatgatgagattatttttattatttattatgagtaattatttgagggtgctaactaaaatacataaacgacattaatcatcaattgtgtaaaacgacattacaaaaattagcttcatttttaccaataatttttctctttttaagtatcaataggaaaatagattattaaagcaaatcattcaagtaaatcaaaccaattataataatgattaaaaggttgtgtttagtaacacttttgtttttaaattttttaatcacaaaaatgaaagtaaaatttttaatttttgaaaaacaaaaatatgttcaatgaccacatttattttcaattttaaaaataaaaaataaaagtgtgttcagtaaattttatttaagttgagtctgggacaaggtttggcccaaagtcgaggttcgagttcgagtccttgaggcaatagtcagagctgagtttagggtctgggttcgagtctggatttagggtcgaaatccgagttcagctcagggttcgactttggagtctaggttgaggcggggggttcggtatggatctggatttgggaccggggtctggattttggtccaggtgttaaggtccaagttgggaacgaagtccaatatattgatttaaaaaaaaaaaaactgtttaaatttttttgaaagtgactgttattccaaatttcgtacagggtgacgtgacactcattagagtgacacaatggagttcattttaagacctgaacgggtatactcgcataagattttgtccagaacggctcgagattaaatcgacaaagtttagttcttcaacaggtagtacccgaacatattctatgcctcttaatgttctgagctgaatacatgtgttaaacaaagcactgctatccgcacaaaaggatgcgacagctgaaataaacaacaaacttagttttagttggttgaagctttgaaatgtctgagaagagtttgaggccttgtaacatgtaatagatgctcttaaaattgcctttggagaataatagaacatcatctgtgtaacgtccccgcttcaagcctcca

SEQ ID NO: 110484 - DNA, 2987 bp, Cannabis sativa
  modified_base (39)..(50): a, c, t, g, unknown or other
  modified_base (654)..(655): a, c, t, g, unknown or other
  modified_base (734)..(751): a, c, t, g, unknown or other
cagggtcctatttgtataattttaaaaaatatagggtcnnnnnnnnnnnntaacaaaatagagagtctaattagtaacttttgcaaaacacaatattattatttaagtactagtggtgtccagtattttttttttataagtaatactttataattagttagcaatattacttaaaagttaattttgtaagttaatataaaatttaatacttaattaaactaataacacaggataagccaaaaaatattagggaccaataatacttgcaattatctaatgaaaactacattataaataaatgtctatatggatgtctatgtcaagaaatttccatatatattaatgcattacatattgcagtatgaagtgatgtaatggtcaatacatcacttaacaattttcataaaaaaatataattgacataacaataattaaagaataaaatatatatttttttatagagagaataaagtaactttaatgcctttatatatttaatttactaaattaataaagagatatttttgtctgcatattttattacatttttacaaaaatatttaaaataattttgattctaatattctttctaataataaaataaatattattaatcaatttttattaccatttttatttattattttattttannattattattattattattttattacaacaaactagaatgcaagatataataaaagacaaaaataataataataataatnnnnnnnnnnnnnnnnnnaataataataataataaaagaaaagaagacacattgatttgatttgaggctggacaaacaagtgggatattatttatcaaatatagtttagaatttggataccatcactataaatgagtgattgtgaattgaaaagtacaagtgtttcatcaaaaagtaattgaaaatagagattcattcaaatcatattttcttttaactattttgtggaaaaaaaaaataaataatatttttattttatgaatttttgatattatttgatcatgcccctacaatatatagcttgttaaaattcattaaatgcagtaatttttttatgatttcttgttaagcaatctacttttgaataccctaagattctagttgtaacggcctaaacctttcttgttaagcaatttactttttaggttcttattaaattgtctactttcgaattttttgaggttccagttctaatgacttgaacgtttagattttgcctaatttactttaacccgttaactttttagtggaaatttttataaagttaatttactcatggtttcctgaagtttcggctccaaaaatttggacctcttggacttctattttttaatttcctttttaaaattttcatatcctaattttctcgaagcctaaacttcttttaatttttaacttgagctacttataatttattgatctgagcataatttttacttatgagattatagatatttatttttaattattaattatttataagaaaataaataaaaagtaagttactgtcagattatagataatttattaattattttcaattgatttctaaactaatcaaaattatttaataattattcaacaattaaaaataaatataatgatgatatagttacatttaatgtaacaaccctctccatattttaacctaagaaaacaactatggtaagattgatataataattagtttatctaaagacaaaaggtaagatcaattcgatcctttcattttctacttggagtgccgtgaatagagactagagagagtgtttgctaacttattttatttgtaattactagttttcaataatatttaataatttgtaaaatataatatttaatacttacaacactcacaataattttttttagagagattttaaaatatttaaagagtcgtagttttactaattttataactgagcggtcggtcacaatttttattttttaaaaattgtaaccgatcgtttataaattataaccgtttaaaatcgaccagttttcggtaacttttcgatttgacaagttttggtagtttttggccatttttgacagttttttgatttatttttttttttcaaaaattgaaaccaaccgccgtgtcaaaaaaatcgtaactgaaaccgaccactaaatttgatgatgacgtggaaccaaaaattcgattacagttggatcagtttcggtttttcgatttttatgaacacccctactaaaaacacactacagtagatgttataaatttctttttcattttaaagtttctttaaaatttactattgatactttatatttataaaatattatttattgctctaaatatattttattaattattttagattttaataattatttttgtatgagaatatgtatatatactaatattatatatttgaaatgtaaaaatatattaaaatttttaaaaagtagagttttagtaatgtattttaataatgtatgatgtaatgtaaaaataaattgtaaaataaaaaaaaataaaaaaaaaaagtatagttttaatggtgtattttaaatgatagagtaaaaaagttgttagaagtgccatcaaataaacacaattctaaaattttaaaaatataaattatgcataaagttccacattgtttagagaataaaatttcttctaattgcattcaatataagctcattaacttaacataatgtaatataaactttttaaaaaatgtcactaagaaaagaacatttagcccaaaaaatctcaatcactacaaattttttagtatttgcaaatttggttttaatacatgtccaaaagtgaaaggtgtattgttccctcatataaataatttgattttgtttgctttattaattaattagtttttggttaaaatctatatatctaaataaaggaaagcataagagcattgatgtggcatcttttccttccatttctctattttctctattttcttatgttttgtaatttttt

SEQ ID NO: 110485 - DNA, 7475 bp, Cannabis sativa
tatttagaataaatatatagtatgcccttcaattattattattaagataggaagaaagaaagaattgaatatgttcagtatagatagaaagaaagaaagattgaaatgtgctcagtatattattactaaaatgattagagtgattgtttatatacagagctgaataaagaccaagaaaataaaatcagtcctaatagaaagtgaaaactaactccttaaccaactcctaaatgattacatatgggttgccccctcaaactaagagtgcttaaaaaagtcacacttagtttgtcactcaaaaaggagaagatgaagggagaaatttgtttggtaaggcaatcaaccacttaattaattgcaggaacacactacaaaaaaaaaaataccacttttaatgattagtcacaacaatttttttttttttactaaatgtgacttttagtcacaacaaaaaagttatttgaccaaacatagtatttagtcacaacaaattgtgatttttgtgagtaatacttttagctacatattttttagtcacaacataagaatactaatttataattagtcacaactttttcacttttagttacaaattttattgtgactaaaagtaaaattttttgtagtgacttgttaaacccaaagttaacattgtagaactttatctcaaacgaaatagaggttaatctcaatatgtttagtgcaagtatgtaatacaggattggcaacaaacatcacagtactctaatatcacaccaaacagtaggagtatgcacatgaaaatatagcttgttaagaagtgtttgaatttaagtgagttcagtaactatactagcaagactgtgaaattcagcttcagtagatgatcgagaaatttttgtttgtgtgttatactactaggatactatgctgggaccatagtaaatacaaaagcctgtagtggatatttggtcatccagatcggaagcccaatcgatatcacaaaaggctttgatataaatttgagaagctttaccgatgtgaatgccagaatcgatctaaggtgcttgcaagatacctcaaaatacgcttaacaactaactaatgtgacttaagagacatatattggttgacgcaatttttcttcaacttaatctaagaagataattaattaaagaaaagaatagatgattaaataattggtaaaaaaaaaaaaaagatagatttattttcttattttgcacttagccaaaaagaaaaaaaaaagatttaactcattttagtaataattgatcaaaagaccattttttcttatggcataaaaatcatataatagaaaataagggcatttgtgtcctttcaattgtcacacatatttattcggatactctcatatatattatgttataaaataattacacaataaaataattttagctagatttcgaattgggttcgagccaaaatattcgattgtgactatacagtaccaacttgtcagaattcacttgcagtaagacaatatgaacatactatataataatatagtctaattataatttttacccttcttgggtcaaaattacaaaattgcccctaacttaatgcaacaattctcaaaaatttcatataattaattatctaataatataattactcaattataataaatatccattttaattagagttactaatccttggatattaccccatctcatagaagactctaatacgatcaagagactaaccaccatttgttggtaaaatccttggattcgaaaagaaatgaaaacaatatgagattagattaaaagcatatcaacaaaaggtggctaggtactttaattcaagagtcaaggaaataaagttcgatgtgggattcttagttctgagaagaacctttcctacaactagagatcccagagtactaggaccaaactaggaaggatccaagttacaaaagtcaatgaacctagcatgtatgaacttggaagatttgatgagaacctacagttggttctagtaccgatatataagaatgaagaacaccttaagaatactaccaatagggctcaaatgaagagagatgataacctagggggcatgatttcccctgggcagcctactagtaccacttgggggcatgttcttcaattctagcaaataatattaaggaacaattacacaaacacgctttgcccctacaatgtaattgttccaagataaaagtctaaggacaattacacaggcacgttatgctactataatgtaattgatgtttagcagggcatgttatattgtggaacatacccaacctcctacgcatgcttaataaaaagtcaaagaacaattacaaaggcatgctttgcccctacaatgtaattgatctaaagggataatcaacaactgctcttaaatagggcatgatatgttgggtaacatatcccaacccatgtcattgtcatgttgcttgataaaaagtccaatgacaattacataggcatgctatgcccctacaatgcaattgatccaaagacaatcaagaccttctcttcagaagggcgtgctatgctgggcggcatgccccaccccaggcatagtcatgttgcttaataaaaagtcaaggaacaattacacaggaacactttgcccctacaatttaattgttcgaagataaaagtccaatgacaattacacaagttcactttgtccttaaaatgtaattgtgtcaagggacaatcaataccttctctttagtagggcatgctatgctaggtggaataacccacccctcaggcattgtcatgttgcataatcaaaacttactcttcagtagggcatgctatgctgggtagcatacactcccctctaggcatagtcatgttatttaaggcatgcttatgcccactttgagattgcaaaaaatttaccaagtcacatttttaccactttaaagtaattattccaaaatactagtaaaagtaagtcaccttggtggtgacacttacaggaatattttacccatttgtaagatttattactacaaacctactttgtcccaaagtaaaacgtccacatatgttcatacttcttacgaatgattaaatatgtgtacttgctaaattaatggaactgatcgatcccacagattgcagtgtgtataaacccttgccccctcaagaatatgcccagtgagtgattatagaaagcccgtttaattaaaaaagtgactaaggattagaaaaagctcactaagttacttgaggggcaaacagacatatacatgctcaaacatgtgataaaaatacatagaatttttaaaattttataaagtgttcgtgattacttaggaaaatcaaggtaaagggacaatggcaaagtagaaaggtaataaaaaatgaagaaagccttattcaaaggtcaagtagttaccctaaggtcaaaagatactcaataagccatgtccttacaaaccataaaaaaatattataaggattgctagacacttggaaaaagaaaaaaacaagacaataatagaactaacaaagtgcactacttggactcctcaagccttgttgccaaactgggtagtaggctcttcaacaaaattagtgtcatccaagttttcaagacagatcacatcttcagtggaactatcgattggcaagttctccatggaacgatagtaagcaatgaattctttatgatcatcagggtggaggtagttgaagtttttcctggggttttatttccagaagttatggaagacttgaaaagcataccaggatgacttctttttcccattcttatttttgtagtggacatcttgcagctcagcctgaagcttaataacctcctcataggagtccctggcagacttctcatgctttttcgcctccctacatagcccaaccgagtctacttatttgagaagaaaagatgccttcacatcttcttcattcttctttgcaaccttcaactcaacattcttctgtttaagtacaaacgtcgtcagagatgtcatgcgctttgtgcattggtgatggtatgagacgaaaagagaagcctgcaagaaatggtggtgattagtcaaaagaagaacaatgaaattcaaaaacaaactcaagaaaatagatacttactgtggacaaatcttgacaagcctggtccaatgatttctcattcccctccttctttagggcatctatggtcgattgccaagttgaagccatcgaattgatgtgttcctcatggctataaattgtcttcctcagaatctcaaaaatttggctagaattaagattcacatgttcatctggcatctaaatagtgttgatggttgtcccagtaccaatcttctttgtgtcgggtgttaccttagccttcttcggtggaggcagaggagagtgtgtcactccgcacccttgaccacccttctcttgggtgggtacaaggatttcttcttgtggagctttatgaggtagttttttaaccttcagagctcttataaaggaccaatgaagcacccatgctcctaatgagaaatctatcaacttcaaaagatatccctaaaacatgaaggcaaagtgagttgccaaaaattcaaataaataaataaagcatgtcattgcatagtatatgcaaacaaaagtaaaagaagggtattaaccctcatcttgtccccccgatggatacttgggggccacgccatcatcaaaagagtcgctatcagaaatagagccttcatctgtaatgccttttccattgccctctatcggggttgcttttcatctttgagggaaaggtatatgtttcctctaggaatacgaatctcacccatgttatgcagtacaaaaaccaatgtggagccttagaagtttcttatatcctttccaccagggttaaaagttttttcttgttgtgtcacggatttggtctttcactccaatgatttcctccctgtaatataatcaaaaataccccccatagtgagaatagaaagggtggtgtaagtcttaagctccttcaactctaaaggaagattggccaaagtttgggcccttcgccacatgaaaattgtgtgatggggccgattgaacgagcctacccgttggaaaaaagaaaactcaacgttaacttcggggtggaaaaatactctgtgaggaactccccaacttttgtcacttaccttgtttggctcaaaaatcttaatttgtcatagtgactaagtcttgaaatttcgaaataagtttgaaagggcttcgaggaaataagttaattttaataaattctcaattttctttcgctctaaaagagaggaaggggtttgtggtactattctgtctatgtttcatatgtgaatttttgatgatcataacacttatcttggtttgtcgaatgttgtgggaaggaacaagtcattagcatttggtgtcttaaaggtcaaagtgaggaaaataattcaaagttgggatagcaagttgttgtctacaacaggaaaagaggttttattaaaatcaattatatatctaatccctcatttcttatgatatgagtgttttttttattccttaaaaatttgtaaggatgtggatacactcataggaaagttttagtgtcatactaattcttcccatggtaaaaggattcatttgaagagttgggatgaacattgcttgcacaaaaaaaagggtggcttgggtttttgacacttgagagatattaatttggccatgctaagaaaataaggggggaggttattgacaaagtctatttttttgttggtcgtatttttaaggttagatgttatccacaaagttctttttttgatgctcagttgggagcgaattctagttatgtgtggagaattgtatgcaaagttccaaatgtggttaagatgggagctcagtgaagagttggatcaagagtcactatagttgttcttaattaaccttggttgccttccaaggataatcctcaggttatttcttcacatgaggctcttcagggttgtacagtgaataatttattcaaagttcattcaatggagcgggataaagagattttagaagattttttttttgctaagtgagatgtggaagttattcaaactattttgctaggttctttcatggatagagatatatgattctaggctcatgaatcctttggtggttatacaatcaagaatgcatatatacttttgctataatgataggtgaaattcggagggtaattttggtttgtggagaagattttggaatctgaaaatgcttccgaaagtgaagaatttttttttatggagagtcctttctaattggcttctaactcttactttattacaatctaaaaatatcaatgtaaatgacatttgttcaatttataaggttgaagatgaaacgattttccataatatggtgagttgctattttgcttaaggaattggattgtgggttggattttttttatagagataattttggctgctgatttgaaaggttctgcaatatatattctatggttatattatctaaattagctatgagttattggggtgtttggcgatcccagaatgatgtggtatgaaataataagatcacaactacagaaggagtggtttttgctgcaattacttacctgaatcactagatgactgcccaataaaaagagactttagtctcggtcgtacctgttcaagatgaaaacacaattgagcaatagacgaaacaaggaattgaagaaattaaggttaattgtgacattgctatttttccaattgagaagtactgctggattgctcaagatggtcatgggcgtttcattgaagccttttctatgaagaagtttgaccagttggatcctcatatcgttgaattcgtttccttgaaagaagtacttagctgggttaaaatcaaatgggatatgacttttgaagccaattgtcctacaatggtcgtgggttcggtgggttggagagacttcaagagaaagagagagagggaagggagagagagcaagccactttctcgaatgagatgagtaaaatgaagttttagtaaaaattgacctattctacaaatgttgatagttttggtttagtggaccaattttagtccaataaatacataaatattcaaacttctcctatattattagttgattggagttaatataattgcaattttatgttaaaaaaaattaattaacatatttgtagcttgttttgaaaaaataaaaataaaaaatttaattactagcaataaaattaaaattaaagtaggaagagaaaaacaataagaagaacatataaatgtagaatatgatataaaatgtcactgatgacgtttagttaaggataaaatggggaaagcataattaatcagcaaaaagttagaggggactgatatttgcaccccttaaacttataaatacaccccattattaaaaaaaaggggagttctatttacaccccacaaaatgataagtacaccccat

SEQ ID NO: 110486 - DNA, 3520 bp, Cannabis sativa
  modified_base (27)..(29): a, c, t, g, unknown or other
ttgatcttaagattaaaagaatctaannnctgatatgcttaggctcaactcacctggtccaatggccaaaactggaagagactaattcgtgagaaacttgatcgtgtggtagtgtctactgcttggatctcctattttaagaaagcaggtgttagaaacctcgctgtgagacattcggaccatggtgctattgtgcttgaaactcgtatggatagagaagtggtgaagactccgtttcgttttcttgatgcttggagcagtgaccctgggtgtcataggatcattgatgaggcttgaaacattgcgattgatggctttcacagttttatgatttgtcgaagacttcattccactactcaggcccttagcaagtggaatagagaagtgtttggacattgccaatttaaacttcaggcccttgaacgtctcttgactgatgttcagaatcgaattcccaccaaggagaacattgaattggaaggatcaatcatgcttgaaattgatgaagtcgaaaaacgcctagaatctatttggaagctgaagtctcgggaaaattggctcaaggaaggagattgcaatacaaaattcttccatgcttctatcgcggtgagacgtaaaagaaatttcatttgggctattaaaaaggaagatggttcttggattgaggggagggatcatattggagactatttctaaaatcacttcatggagttattcacttccacgaatccgcacttcaactctgagttttaagatcttattgagccttgtatttctgatgttgagaacacccttctaagtcagcccccgactttggaggaaatcaagaaggtgctgtggaacatgccccctttgaaatctcctggaccggacggctttcctacgaaattctttaaggattattgggacatcgtgggacctcagaccatagagttcgtgcatgaattctttcgttttgggactttcagcaaggagattaaccaaacgtttatggttctaattcctaaaagacccaatgccaactgttttgatgaattcagaccaattagtctgtgtaacacatcgtataaaattattgccaagctcttggctaatcggctgtgtatggtgttagacaaaattatctctcctaaccagtccacatttgtgcaaggaagatggattgtggagaattcaattattgctaatgagttgttctttgaattaaacaagagacaaggaaactctgcttatgttggggtcaagtgcgacatgtccaaagcctacgatcgcttggaatggagctttgttttaaaggtaatgcgttgcattggttttaatcaccatttctgcaaaatgattctctgctgtttgtcttctgtaaactttcagctgttgcttaatgatggtttaactaaaactttctatcctaaacgaggcctcagacaaggcaatcgtctctcgccctatttatttattataggcgcggaggtgttaactcgaattcttttgttggaagaaagtaagggtaatctgaatggtttttctttctcttgcgagggcccttcaatctcccacttgatgtatgcggacgatcttctcatttttcccaaagctgaccaacgaaaccgagatacggtcattgatgctattgataaatattgcaaatggtcggggcagaggattaatgtgtctaaatccaaattatttttctctaaaaattgctctgccaggtgccgtgaggattttcttcaggttttgggttttgacgaaatgtcgggggaggagaaatttttgggcaacccgatcattttcaatggccgtcgaagttctgattttgattttgttattgataagatttgctctcggttagaaggctggagggccaaccttctatctcaagcggctcggatgactcttatcaaaagtgttcttgcctctatccctatctacactatgtcaactttcctgctgcccaggaagactacggatcgcatagactcaattgtgagaaaattttggtggactggtcagtgtaaagaaggtagatttctctctctaaaggcctgggattgtctctgtaaacccaaagcctgcggaggtttgggatttaagcgtgctaaggatataaatttttgtctgttggctaaattgggttggtttttggcctcggggactgtatctctttggacttcggttatcaatgcaaaatattgtagaaatgctgggttcctttccacttctcttccttatagagcttccccagtggcgagaggcatctgggctactcgagacttcattactgataatagtgtgtggattggtggacataattcctttattgatttttggtgtcaacaatggttgtgtggagatggccctattcttcacaagggcgttattaacccgctgataaagaatctgaatttggttagcgatttggttgatattgactcctccgtgtggaatgtccgaatggtagaggatgtttttgtccctgatgcggcttcgatgatcatctcttctgataggaatgttttccctgtcgtggacatcgcctgttggaaatcctctaaggatggaagtttctctttgaaagcagcttactgggattataacaagtctagatttgctgaaaaggataatctttgtgaaaagatctggcttgcaaaaatccatgaacgtttcaaggtcttcttatggaaactttgtcaagatgctcttccttttggctcaaagttgcagagcattttagggaagccccttggctcgtgttatctctgcggctgcaaggaaaaagacactgctgaacatttcatctctggttgtttgatcacgagacggctttggttctcctcccactggggccttcgactatatgctctctcttctctaaatggcagggattcggtcgcatggctcctccatcctccttttcagcatcttctcaattcgcaggagctttatagtttttttctttatggtactgtactgtatcattaactgtggctctgtcgtaatgaagcctatcataacgggattcctgtggagtttaagttgctgcaaaagaatattgagacttgtttttctgagcatgagaaggttcggactgtggagaatgagaggccggattcgggtctaggtgtggtggattacatatggggactgccaaggcctggaagagtgcagggtttcgtggattttgcctcggacagggagatgggggccatggctgtggttctctttgatgcctctggttcggttatggcttttggtgcgaagaaagtagtagttcatgatgtctttcaaggggaattggaggccttgctctttggagttacactggctcttgacatgcagatagaaagggtggactttcactcagacaactctatgctggttaaaggcttgatggaccgaaactccccgtcttggcgttctcatttctcttttgctaaactttatgatcttttacttagttttgattgctctgtttcttggatttctcgtgttttaaataaggctgcgcatactcttgcta

SEQ ID NO: 110487 - DNA, 3902 bp, Cannabis sativa
tggaggcttgaagcggggacgttacatgtctcccttgcaaatcatcccataattctcccttacaattgataagtcagttgcgattccagcttctagggttgttaattgaatgctatcattcaaatttctgactttggttgtagccgtactaaaatgacttaagtatgccttaagggattcttctggttattgtttgatattggttaatgacatgctactgattgccgatctcttgcagcttggaaatactttttgaaatcttttacaatttgctcctaggaagttatgaaatagttggtgaatttgtcaaaccaactacttgctgctcatgtcaatgaagttggaaataatatgcatcacaagttatttgaaacgttacttgctcacattattgtgttaaaattgttaaggtgggcgacatgatcagttgtaccattatactgcatgatatgatggtttttaactccttgaggaaattgagaattcaaaatatcagggtggaatggttctatttcttcatctgagtcatatcctggtaattttctatattctccatcttggtattttcttaacttgtcctccaattgtattactcgtaactgtattggatccacaggctgctgatctgcattttgattaagttggttacgcaaatcgcgctgtattatggtgtaaatgctcacgaaggtctggctgcttttgatttaagtgctagtagagaccaggttcgcgacatctttggtcataattactcacagacctagttcttgagtaacttttagattggtaactactcgagttactcatactttcttggtcactaaaataatttcgtgacctatccatgcctcgcgtttgtctatgagtcccagcttctggttattagccaaattttgggtataaaaataatagaataactaattcccttaattttagcttagaaccaaagatctacaccaaaaaatctaacgtaaacaaaataaaaccaaaaaaaagatagaaaaaaaaaagctgaaaagaagaagcatatattgacttgggttgagtagccaagtagccaagtaggtgggtcatgggagagagaaataggagaaaaaatgagatcagagacaaagaagatgaggaactaaggattgagaaagagaggagagatcacatatgagaatggtgtgattcgtgtgcatgaactgggttgggtctgaagagtgaagactgaaactgattttggatttttgatttaaggaataaaatgaaatcattaaaacatttagggatttaagcgggctgggtcagacccgatccgacacaactattatcgggtcgggttggatcgggtcaatgacccgaataaagcctgattgtcacgggccaacggccgccctatcgggttaggattccgacccggcccacgaaaaaatcccaaattgccattcctaggtttgaagcataataaacttagaacacttaacataagaaattctttcaaattgagtttgaaggatttgctaagcatccttagcagattcacaagaagatataagcttaataaaacattcacatactctattaaatatagcatgtaaagcttcactattgtaagcaaataacttatcctcttcagtagaccatccaagttcaggttttaactttgaattaccttcgaaatctaccacaacatgatgagaccatcctaaaaagaatcattctccatgttttctcatcttgactttgagacttaataaatatcctcaatctaaccttccaataagaatagttagaatcattgaggaatggtggacgagatatggaactttcttctgtaaaggaaaacatattgtaaaaacacaagaaaacgttagggtggcgtttcgtttgaggaatgaaatggaatggaatgaaaaggaaacaacttttattctattcatttgtttagttttattataaagtattagaatgtcatccttattctagctatatttttattccttccaaccaattacgccacctaatgaggtgtttgttatgtgagtttgagtgtgagagagtagagttggaacgaggagacttggagagaatatgaaactcacgtgttggaggggattaacattaccactattttaatttaaaaagtaaatttcacttggaaacacaaatcccttgattattaaaatttaatatagttaaatattatcattcctatcaagtctaaacctcataccaaatattccttaaaggaccacactaagagtttagtgtcccacaaactaaacctctaaagggtgttagaagttcaatttttctagtgtacccccttgttacatatcaattaggttcacaagaaaactttctccatcagtttcatcttaccattattttagttactaaataccaataaaataagggtaaatattattttgcgtcctgttttttctaaaagttattgattggaccctctgttttgttaaatgacaaaatagactctatattttctaaaacagtacaaataagacctcagctcaatttttgacaatttttttttatataaccaacttgaaaacaatttctagcatgaatagatacagaaaatgtatccaattttatcataacacttctagataaggttattattgagttttatttcaataaaaaaaatcagttcaggatcctatttgtactattctggaaaatacaagctttattttatcatttaataaaataaagagttcaatcaacaacttttgcaaaatacaaaatttaaaataatatttacctatttatggattagtcggtacaaccctaaaaaaataccaataaaaataacaaattagttggcacaaccccaattaatagtgtaagcataaacaatgttcaagaactagagaaatgagtgtttgagcacagccaatcaataaaaacaagtataaacaaaacaaacccaaattacccaccaacaatttaagcaaatacttgcccgatcctatacacaaacaaatacttgatatgatttttcttcaattcaataaaaacaagaagagaaaatgatatcttcttttttggaatcttgagttcaagcatgattggaagagacaaatctgattcaagcaagatttaaggtttttggtaaatgttatgagcgaattgataatagtttgaggtttaaaatgtttgagattttattatagtagaagaaaattaaaatattacaactttattgcaatataatataatgatcaataaatagattaaataaatgttacaatacataatatataatatatatacatatatattatatataagaaatgtagaagaagatatatatatataaatatatgcatacactcactcacaatcttaagtgtagaatagtagggatcactatgacttgaacaaggtattacacttttgtccaaaagcttatttctcccgatctctaagcactaagagaactctcatgaaaatagctttgggaattatcaagccttttagggttttctagcaaagttatttcttgataaaaaacttgatctctctcaaatgagcacaaaatatctccttttataatgtttaggtgatcacacttagaatttaaaatacacaacactttatttctctcatacaaatgagttttaatataatttgtaacaactatatttcataccatttgaatcttatcatcaaattgtataacgacccttttattacactaataatgtgtgatcaacacatgagttacaagtgataacaaattgtaactcctctccaagttacaacatgtaggctacaaacgtgtaggttaaatttataggttacacatttatttactatacacttaatatatattattcacataataatatatttatcatattttaatctatacttattatattataaaataa

SEQ ID NO: 110488 - DNA, 7903 bp, Cannabis sativa
  modified_base (5069)..(5075): a, c, t, g, unknown or other
ccccccccctcctcgctatgtttggtattaaccaaattgagcttgttacatagaaattgaaatctaggagatgacaatggttttgtgaacaggtatgcagtctgttcttgagtagggatgtagcaaactttgatccttttttctacaatttgttctcggatatagtgcacatctaactcgatttgtttggttctggtgtggaaaaccggatttaaggcaagagcttgcgcactttgattgtcacaccataacactggtggagtcttttgaagttttataccaagttcaccaagtagggagctgatccagattatctctgttgctgcagaagcaagtgctcgatattctaactctgtgctagatcgagctactgctttttgcttcttggaactccagttaattagattgccaccaagaaataggcagaacccgcttgtggactttcgatcatcaaggctagatgcccaatcgacatcttaatatgcttccaagttaagtagtgtggagggcttgaagtgcaggccgaagtgagtggttcccttgatatatcgaagcactctcttgcaagcgttccaatggtggattgttggacttttgagatattgacttaacttgtttacagagtaggcaaggttaggtcgtgtcatggtaagatattgaagaacgcctattgtgcttccatataactctggtttgttaaagtttggactgtcatctagagacaatttgttggccattaccattggtgtgtcacattctttggagtcttcaaactaagttcgagctagtaaatctgcaacatatttagattgagtaagatacaaaccagagttgttcctataagcttcaaatcccaagaaatggccgactgatcctaaggatttaagggaaaatttctgattaagggcatcaatgagagcagagatggcagcactattttccccagtgatgaacaagtcatcaacatacaccagaataagtaagagtgagccttgatttttgctgtagaaaagtgaagaatcaaatatacatgctgtgaaaccccaagtgattaaggtgctctttagtgtgtcaaaccaggcccgtggtgcttgttttaggccataaaagggacttagttaattggcacacaaagttcggtttagtagggtcttcatagcctttaggttgttccatgaatactttttcttgtaattctccattcaagaaagtattattaatatcaatttgttgaatatcccagccaaaagtcactgctaaccagaaaataattctgattgttgaggcctttataacagggctgaatgtgtttttgaagtataaaccaggtacttattcgaaacctctcacaaccagtcgagctttaaatttattgagattgtcatctttgttaaatttagtcttgaagagccatttgttggagaggacattcatgtctgaagttcttggaaccatgactcaacttttctttttaaccaaagaatgcttttcatgatccatagcctttttccaatgtggtatgctcatggcttgttgaacagaccttggttcttcatagacttgttgctgagatgctgtaacaagaaaaacttttggtttatagatgccagatttcgatttggtctgcatagggtggccagtaggtaatggaggttggattggtatattgggttctggaatgatggtgtcctcaggtattgtggtgtccatgtgtatgtttctactgctggtgtgtgttgcaggggacacatttctggtttgaacagactggcgtggggaatttgggacagtggcagacttatttggctcaatatcaattgtgccaaattgtattggagtggtgtgattatgagaagatatttctggtatgatgaaggctggggcaagaagattttggtgacaaactgtggaagttgttgtgggaataaggtgctgtaagggaactcagtttcattgaaacttacacttcgtgctatgtaaattcgtcccgatgtatgtaaacacctatatcctttgtggaatggactgtagccaaggaacacacattttgaggttttaaattgaaacttgtgttggttttattgtctaagaaagggaaaacaagcacacccaaaaattttaaggaaatagtaatcgggtttatagtgaaaaagacattcaaatggtgatttgtaagcattaactatagtaggaagtctattaatcaaatagacagtagaaacaaaagcatcccaccaaaaatgcagtggcattttagcttgagcaagaagagttaaccccatttcaatgacatgcctatattctctttccactctaccattttgttgatgagtgtgaggacaagggtgtctaaagaggatgcctaattgttgtagaaatggctgtaattttctatattccccaccccaatcagtttgtaaacttttgattttgaggtcaaattggttttctacaagggttttaaaggttttaaagataggataggcatctaatttggttttcattgggtatatccaactatacttggtaaagtcatcaacaaataaaatgtagtatttgtatccttcatgagtgggataaggggagggaccccaaacatcggagtgaattatttgtagaggtgtgttggttttaatagtggaactactgaaatgcatgagatgatttttaccaaattgggaagcatcacaaaaggacaaatctttattagtaaatgttgtattgatagaatgtaaaagctttgcaagaattacagaggaggggtgtcctaatctattgtgctaaagattaggagtacaagaattattacacaaagccttattagcagaagaaagattacaaacagcagtgttagacacagtggcagtactagtttgtggtcttggctgatgtgcttgataatgtccttgacaatggggtggagtgtggtgtcttggcaagggatgagagattttgtagagtccttgactaagggttccctatagaaggacctgcttcattttcttgtcaatcacaaggcaggtgttagtgttaaaaacaatagagatattgttatcaatagaaagttgggatatgctaataagatttttgtgaataccagggacatataaaactagattaaaataaagagttttggaacatggaatggatatttggccagtagctattatagaaagagagtttccattacctacagtcaatttacccttgcctttgtagtcgattttgttggtgagggaggcaccattggatgtgacatgattggaagctccactgtccaaataccattgaggatcagcaactgtggtggctgtggcaagcatagcctgaggctcatcagaattgttatctgtagtgttcgaattttccttctccctggtagattaaatcgaacctatgatagcattttaatgttgtgtggccaaatctaccacaaacttggaaaataggtttattgcctcctctattattagagttttgtcctcctcttcctcggtttgtcccacggccacgattgttattgttgtaaccagtggaagggggtggtggagggcctttcttagcggcagctgcatagtttgctgtaggattatgcagatccagtgcagcaactgagttttgttgttctattctcttttcttgagtttggagcaagaattggacatcttgcatagagaatgattctttggaggttagagtaacgatcgcaggatcatactcacttccaagacctccaagaatgtagatgatgagttcatcatctatgatgttgttggcagctgccattaaagcatcaccaaggcatctcatcttgagtatgtactcatcaatcgaagtagagcctttctttgttgattgaagtatgccatgaagctgcagaacacgcgcacgagaggtgattgagaaaagttgcagcagaacactccataagtctgcagaagaaacacaacaagtaacatgtcctaacatgccttcagagattgaattgaacaaccagctgagtaagaactgatccaatcgtaaccaatcagcaaattctggattaggcagggttcttgattcatctgaggggtcaataatggtggtagggggtctgatgcgtgttccagtgaggaagccttcgagttgatgtgcacgaacagtggagaggacctgagatctccaataaaagaagttgttgcgatcaaggcgtagggtgagcgagacgatatgattggggattacttgaacggcctgtgttggaggagcatatgtggtggcagaggaagcaccttggggtctggaaccagcatttgaagaggacgccatgggagaaagcttcaaacagagacaacaaagaaaggaaaaaaaaaagataacctagaaactctgataccaacttgagaagaagaagagatgaaaagtgagcttgaatcaatgcagaggctcaaggatcttattcaatatatatagagaaagagtacaaggaaataacaaaaagctgtaacaaactacaactgtacaactaacatcccaaccgaattaagtaactgaaagtaacagtaattaactaactgaaactaactataactgtctggcctaataaaactaaagtaaatgataaacataaattttatagaaattcactccaatttggagctaatcctctgtatctccttttgagagattcgatctccattatttcaatgctatgttacaatatgaattggacttaaaacattgagtaaatactattttagactttgtgttttgcaaaagttattaattggtccctctgttttgttaaatgacaaaattaaccttgtattttctaaaattgtacaaataggaccctgaactaattttttgtctaaataaaacttaataataatctaatctagagatgttatgataaaattaattacattttctgtatctgtttgtattaaaaattgtgttatagttggttatattaaaaaataaaattgttgaaaaatgaactcagagtcctatttttactattttggaaaatataaggtccactttgtcatttaataaaacagagggttcaattagtaacttttgcaaannnnnnngtccaaaatggtatttactctaaaaattacatattacaaaaccctttccttgtagaaagtcttcaatgaattgatggagaaccctttggaaattcccttaagatcagcctgtcttctctttgatttctcactttttcctctcactgaattctctctcccttactctatattacaagtattttcttagatacaatatctattttccttcttttttctctctggtttttctctcagattttgagttgatgccatggcaaagacaagggctacagttcagagaaaaccaaaattgacagtaaagaaacacaaaaagagaggtttggattcaacatcggatgttcgaaagacgaaatcaatagcagagattattggcattgagccaatcggatttatagatgacgaagggggaaaggaagacgaggagaagatcgatgaggaaccagagcattttgctccttctctggagccattgtcacctcgaactaccttgagacatcttaacaacagaaggagatttgttttgaattctctttcttcatggaggctaatggagaatgtaacaaggaagtttctcaaggtaaacattcaatacccccaattctaagatttggtaaagttgttcaaagcctagataacaagttttctagttctggttcttgttcaaagaagcaaaataaaggggtcaaaattaccatggaagatattgaggaggaagtttccttttagaattcttctatcgtctgttatgttcttggctccaaccctccattatcggtcttagaaggattttcaaggcgtatctggaaggagaaggtagataagattggatctctgtcttatggaacttttataatcagattcgatactctcaaagacatagatgcaattctttagggggatttgtgttttttcaacaaacaaccaataatcacgaaagcttgggattctagtaccaattttttttttttaaaaaaaaaaagatatcaagatagtgcctacttggattcatttagatgatcttaagttgaaatactggggtgagaagtccttgcttaagatcacatatacgtaaattgggtactccattgatggtgggctcagtgacaagaggaaagggataagctaaattatcctagagttctagtagaggtttcactcaatcaagagtttccatacttcatttcatttaagaatgaactgaaccagaatgtaatagtggcagttacttatgaatgtaaacctttggtatgtggtcattgtaaagagatggtccatgccacaacaaaaattgggaagaaggaaggaaagaagcgagaatgggtgattaagaaagacaccaggaaaatagaatctgtggaagcagagaagaaggagattcttgatgcagagggatttcaacttgtttaaaaaagttagaaaactaaacgaaatgaggtacaggaacaaagtagtgttgagaattcattccatgctttaataggacaaatcaaagataataaagatgaacaggaagaattggggaaaacatgaaggagggtttcctcctcttcctaatggatagacttttatgctggaacgtccgagagatcaatagccaaactaaacaatcagaagttaagcaattaattgcaaatcaaagggttggtttggttggtctccttgagacaagagttaaggcccaaaaattggaagccttgtatgtgtatgtttacaagatggtgttttacatcaaatagtgcatgacacgatgaaggaagaataattgtaaattggaattccatgatgtttaatgttagtattttgaaatgctcgagcccattaatttatctttatgttaattctattgataaaaggaacaagttctttgtctcttttgtctaaggctttaatgatgaggatggaaggagaagtctttagaaggatcttcaaagtctagctatgagtgaacagtggatagttcttggggattttaatgatatcttggcccaagagaaggcgaacggagctagagttaaatacaagtcctctagagagtttattaactgtatctaaacttgccaactagaggatgtgaagtttagtagaaatttctttagttggagcaataagcaacaagaagatgaaagaatttactcaaaaatagacaggttttagctaatcagaggtgttgacgctaaaaagtggccaacatcagctcgctaaattggcaagaatgaataagttgtttaagtaattataataagagacacacacaaaatttataaaagttcaccccctattgtaccaagcatacagtatggactacccactcaaaccttgtaatacgccaacgagtttcaaacattttgtcgcgcctctctacaattacacgtggtggttgtctttctagcatccatgaacttaattcaaagcgaccatcatcgtcccctctctagaatgtcccgtattcccacaaagaaaagtaacccagtcttaactccatctcggtctactaatccactttaggatactaacttgctcaacgacatcttgatctagcattcagaccatcttgatccttccgcacacctataacccttctaggataggccaactaggttcaccttccattgagatgaacttggctctgataccaattgtcacggctcaccttttcaagcaacagaacacctgtccagacccttgatttctctaagccaagatcagcctaccaatcatccgagtaacaatgggctcattttttgcataactgtgtgcctcatgcacactttcgtctcttgaacaactcctgccgagtcatgctcgcaagcatccatgagtgcatccat

SEQ ID NO: 110489 - DNA, 8236 bp, Cannabis sativa
atccgttggttattagacggggatggggcagggatgggggtataaataggtagcggagatgggggcggggattgcattccccatacattaaccaatcaatttccatctctagacactacacgttcattttaatatagataagatatgtattagttgtattttattatattttggagcttagtagactttgggggagttcaaaacataagcctccaaccgtaccaataatacccataacaaatatgacaaaagatcctttcaaaatatccttcaaaacgatcctttagactttttttcttatgcaaattatttttcagaattataaaaattattgtaattatctctcttcagtcacattttacttactgttcaaaacaaacaatttgattatgtagtcgtaacatgtatatataattgtattaaaataatttagttaacaactttaaattatttaaaattcaatttattagcattatatttttaaagaaatttttataacaaaaatttttagaggaacaaaactctataatagttataatttgggggaacaaattctatttattcataaaaacatagagagaaaacaactccttccacacattacaaaaccataaaaaaattatgataaactttgcatccctcaataaaatgaaaaaggaaatttagttgtatgagagtacaattgatcagaacaccatataactatataatggttattcatataatttatttattaatatgatatgatatttaagtatatattattaatttttggtgacttggttttgaacagcaagagctatagcagcaagagggtcaagagtgactgcagggagattgtgaacagagtcatccttaaggtcatattcaatggtggacttgataatggagcaaccttcatctttctcaattatctcaaatctaactctgtaaagtgtgaaccccaactccaagtatcctccttcaataacctctacttccttcaccctcttctcattatctacctttgtgtacttttctttgtgactcttgaacttaaactcacctgcacctcaaatcaacatatataatacatcaatatataattaatcatattattcatattaacttaatgtagcctaattattctttaagtatatatataattacattaatgttacgtattaagccacttaaaatgttaaaatgttagttttatttaaagtttaattttttgttttattttagcaatataattatttgaacgatttgttttataaaaaaaagaaaaaaaaattgtgtgttatttgttaattaaatatttgagatattaggaattctgttttcggcattgtaaattatttgaaatttttcgaaaatttaaaggatactactgtaactataacgaagaccgttatgaaaaaaaaaaaaaatattccgacgtgtgatttcgcacgtgaaaattgattaagatattataatagaaagttgtaagtttatgatatatattattaattaattaccatccggggcaaaatggaactcgataagagtgccaacaccaccatcgccttcgacaacttcaatcttctggattgaacctttgaggttgttcacaacaagtttccccagctcttgggcatttccatagatctcccaaactttgtttgcagctgctttcacttccaactcatggaaaacttgcccactcaccattttgtttttctttggttttgattttgtaggttgatgtttttcttttgaagttggatatatggcttggtaggtattgttaatttgttaccattatatatagagatagaaattctgtatgtactcaattttgactggtgactggtaaggcttaattttgttagaatattgtgtgatggcggtcaagataatcaaactaaaataataaagaaaaaagtttgaataatcaaaggtggcgcgcggtggtactatataataatatattaataatcttacaacctagaagagtacataaatgccaaattaagggtagtatgctctggtagtctattgtataggtcacacttagaatatatttaaagaattattaaattaaaatgataattttaaaaaatacaaaaaaataataaaaaaattacaaaaatacggtttgtatagaatttttaatatatttttttttttacagtttttagattttatttacataaaatacagttttttagtgtatttttatattgtattcttgttatttattcttaattttttgttatttgtatattattttcttgtgttttttataaaataccataaaattgtaaaaaaaaaaaaaaattgaacgtaaaaatgtaaaaaattttacaaaaaatggtattttatgtaattatctctaaattaaattatatgggatctgatagttaattgtacccataataatataataccaagacggacccaatcatggggcccaaatgaacagaaatttttcaataaatatacacattttttagatgatttttaaaaatgtcatttattcttataaaaagaactcaaaaaaattatcgcctagcgactattcaaaatacagcctgctgtcccgaagatcgtatgtttcaggtctaattgccctgacatgtacaattttcatatgctcgcactcactgttgttcatccttagctttccttttacctacacatgtaaacagtaattatgagtcgacaaactcagtaaaaaatgcataatcatatcataaacataaaccgggttacaattaggcgcctatacacccaaatataatcccacgcgtactgagcctagaacgttcgtatgatagtactattgaccataatattagcatatactcggtactctagtcgtaccgatgtgatagagccaaacatacactcatcggtatccaatataattctatgtataatgataccgctatttcaatgtaatctaacaggcaatcataaacatgtatactaaatattttatcacatatgcatatcattatactaatcttacctcgattctaaaatcaggtgtgctggtcaacctaactgaaattgttgcacgacatttataagcccctaagtcacaacatacgcaaaactgatgagtgatacactaaatcacttttcagggacttaaaatcaaaactaaaagtttccctgtcgatagaaacatgacaataccctaaatattgcaaaaatataaaaatctagggtacctaaaactgccacaaccggtaaactgaatcccaactaaaaagccaattctaaaggttctatctggggggaactggttaactagttctacaatgcaaaactgaaccgattaaccagtttagtgcaggaaccccccaaatcaccacaaataactcaaatcaaccccaaatcgtttcaaaccttctaaagtacctagatagaccataacaaacttaattcatgcaataaaactaagtaataccctctgaaattgaaatctccatagaagagcaaagtttgagctctaaagctcaaattttgttcaaacacaaccacgaacatccaaccaggcttaaaccagcttaaaatatcctcaaattaacaccagaaaacaaaataaaactcaaccaacttctacaacaaccaaaaccaaaattttatatgaaaaaattaatctcaaaacttgaatttgaaagaggaaaagaaaaattagcttaccttgagcttaaatcttccaaattcaatgaaatccctagcctaaacccctctaaattgttgctaaaaaggtgggaaaaaatttggttctctttgttcttggatgtggccgagcaaggaaagagagagaaaagaaaatctaatttctaacttgataattctattgtctaagaataataaataatcaattaattcttatgatactcagcttattaactaaaagataagcttaatttaaataaattcccactcaaaattaataatactaaactagagtaaaatgacataactactccttacttaaacatgaagtaatcaacctacttaagggtaaagtggtcttaaaccataatttcaaaaattctcaacattctcaatgtctatctaaatcgctcttttatttctaaaataccatactacaataaagtgacgctatagggcatacattgcattttctactattactggcataaaatatgaaatacataaaatttcacatataacataattagcatacctagaattcaaatatatcatcataaatacgtaaataataattaaaagtataattctaaattaaactcttattatttgctaattcttattttaaagttaagcgatcatttgaagtttccaattttgaaacagttgttgtaatcaccatctcataagaataaaaactcaaagtagatgtagtgtcattagtattgcaacatagggggtggactactataaattgctatgtctctcattaattactttacaactttttatatttttgctaatctagtgagcggatgtggcttagaagtctagtccagatttctgagtcaacacatatatttagtaattataaaaagttaattttcatttacaaagcttcatttattgttaatgaaaatctaagttaaaaccttctaataattatatcttgattccttatgtacaattaattcaatgtaaacagattatctataatctaattatatatttggacctaactgttaccactcccagaattaacactataatggaactaatattcgatcatttgaaaatgcttggattctattattgtataacatgtttccagccactcatgttattaagctaccaaaacaaaaaaagttgtaaaaatcatcttctctaagaaattcttacgagtgaatcaaagaacgcaatgaacttaagtaggagttcatgtttactcaagattcatactaatctactaatgatcatcattgtgatatgaataactctttcatggtaaacgacatgttaatgaaagatgttattacatatcggtccagccatgtataaaattatacacaacacctttactacatctctatccacatatgttatctgaatcaaaatcacacacactagagtatagtgtatagtatactgtacttagtagttctattttaaaaatctcttactttaatatattacagacttgctttattcatattgtgtagtcttaattctcttgtacgaccttacaacattataccatctccatataaagaagaatttttttaaatatttattaattatacttctataattaatgtattcatttattttataattgtatttcatataatctataatatattatccattaaatacttatttttagagcataaatcctaacagttattcaatcttatcttagtaaaaagttacaagtgatggggggttaatgctcatgttttacatattaaatatttggagaagtataaataactatttatatttaaaatacaaagaagtggtatttgacttggtcataccatgttgtttatgagcagatgcatagacgagtgtataatatgaggaggtgcatagttgagcatgtattacaaggagatgcatagctgggcatgtattacgagaatatacattgttgaacatgtattacgaggagatacattactgactgtgtattacgaggtgatacattactgagcatgtattacaaggagacacaatgttgactgtgttttacgaggtgatacattattgagcatttattacgagatacattactgagcatgtattacaaggagatacattactgagtgtgtaatacaaggagatgcattgttgactgtgtaatatgaggagatgcaaaatccctgtgttatgaccaactgcaaggtccttagattatgaccagctacaaggtcctgtattcaaccaactacaaggtccttatactacgaccaactacaagatccttgtggcgagatgttacattatttactgaaataacatcccaacaatcctgaaataccccctcataaaccttgtgattcttatatagatgagatcgtctcacatgttgagtcttgagtttattcgagtggtcccacaatgtatttgttacaagatttatgtatgccatgtggcacacaattcgacttgtttattaaatagtccaaaaaatgggtataacacaaaggttgccattaaatgttgtttacaggatcgaggcttactaatgatgacattcgcctcagaattctcgctgacatgatcagccctcattttgcaatctgagatttctagtgcttccacaagtcacatgatgttcatggatctaatagattagcaacatgtgtactccactcacgaaaattgagaggttcagaagcatccatgacctagtgccttggaatttcaaaaggtatgaactatttatggtcccacgtaagaagacagatttggaggacaggtgcaagcctccgcgactcttaagcctcaaaggcttgagggtgaatattatctttgttttctgataggtgacatgtgtagttttaaggtcccaaaatcaacaaagacgggtacattcataggcccaattaagccaatgggtcagtccatggcgaagtccaaccacggctccgaatttaacttaatattgaacctttttggtcccggaagggcaactcgcccaaagagggcaagacttaacaaaacatatccggatgccctcatggggtaatcttcatcaggcagttaaagagttgtccatgtgttgtcctacgtggcaccgttttgacaccgaatcccaaaaaatcaggggttcgtcccctaagttagatttgggaaatctgcacaacaccaaaaggaacatacattttgtccgacactcactactctgataattactgtacaccttcgaaggtgtatgcttacctgtcaccatcaaaaggtactattccgtacggacgacagttatctcttaaattgagcctcacttgctcgacccaatatcaatttaataatatattttactctatcagtgggcttagtttactcatccaaaccctaatgggtccatgtttatccaataacctgattcaagcctataaataagacttcatctcttcatgcaaagtgttacgatttcaagctaggctaaggatcacaaatttgagcaagaacactcttgtgtaaaatactccatagccaaagagcttcaataatattgactttaaaaatatttttcaagctaggctaagtctcattaacaccctaagcacgtaaaaatatttttcttctttactttaaaattatcttttcttagcttaatattttattggtttaattttcaaaaagctcgttaaacacagggtaatagggttatgataaattaataattaacaataacaataacaataatatttactcgtggactaaggctcctatctgtttcaacatccagaagagttgttagtctatttttttttttcatgatcttgtatattgtagttatttacgattacttacaaatttttcaaaaaattcctatcctaggtcactagttggattctcattcaggcttatggtcatgcgggtgtaggagactcactctgggcctaaggtgctttgaggaggtaaacgaaatgaatggtggagcctcttgtcttgagaactcagaattatacttaagaaattctgaggtcaacactagtagtcttgggcgactccttgaggtctagggtgagccctaaaggccttaggtgagccttgggttgctaagggtgcgaccctgggatcttggctcattgagggtgcgaccttggggtcttggctcattggcgatgcaaccctaggtctctaggtctctaacagtgtgaatttgggttcttgggctgctaatggtgcgaccttagggtcgttggattcttcctttcgcatggtccatcatacttttaaccataaattgctcaattcaactcaaaataaaatgattcaagatgttttaacaacatgatctagatttttcatgttctaaatccgattctaactttaaagacgcctaaatctacaagaagttctacctcataagtcggcccatctaccctcgctcgtttcttccaatatgtattaaaagcactccaagattgcaattatgtgattaaccttccaaaattcttatctaggaatgacctcttactttgtcactactatgcccattgtcacgggctcaccttttcaggcagtggaacatgctgttgcgaaaattattaattactacgcaagtgca

SEQ ID NO: 110490 - DNA, 3327 bp, Cannabis sativa
  modified_base (3265)..(3285): a, c, t, g, unknown or other
ctattttgttggtagtttcctatttcctagtctcctagctttgtatataaatatgtactattctatgaaatatacagataattcgattcactattttctacactatgcaaatccaaaagcaaagggagcatttgtgctgcagggtcaatttactttgtgtacatttctagtttagattcacttgttcttttcttgccataattgttctggttaaatatacttgccagtatgatgagaaatgtattgcaagagttggctgattttgatgcttctttctcccaaaatttcattgcctagataccccaataacctcacatttgctatttgacaatttcataatgaccaacgtcttaatgccttctaactttcattgtttcagttgcctagatacccaaatagcatctcatccttatcgatcaacaataaaggacaacttttggctgttgcatctagctacacttaccaagaggctaaagaaaggttagtgttccttgtcggcttgtagtattgtttctctttttcccattacctattatgcatgacatagcattggttctctctttctaagctgaacttgtattgagactctctacaataaaaggtacaaataacaaagcataatactagtataactcccccgtgattttttttcccttcatgaaaacagagaagatattcctcaaatattcatacaacaaattgacgatgtcagtacgaattcattttattgtggaagttcaagtaggaagtgaccattcacaagatgactgcggaggtaatgactaacgaccacagtcacattacaagaatatatgtcttaaattaagtccttaaaggcggaatacaaattttttaattctgacttagaagtattcttactatgtttaaggattaatttgtttcacttgatctaatttcagatgacagaaataaaaatgggttggaagtagcttgaatagacctagttaggcttgctcccactttgtcattttctttatggtgatgtttgtaacattgctatctactatttaatgtgtttatataagatgtgaatctgtaatataactcgtacttacgaacatcattttcttttattctgtaacacacggatgactcttttcagtttctgatatcaattttgaaagtgtgaaatcaagactttagatcaaatgaagttgttgtttaaattgacactcaaaagtttattaattagcttttctaattagggaactatgtaacaaatttgttgctcatccactagactgaagaatcttttcaccctcgtactagtcaccgaagctataaactttgatcttgttttattcacttgattacgtttttttttttgactgattaggatatttgtatccgaactttgacaggtaacaattcatgttttctgaacttttcaaaacctgacatggatgaaagttcagggcatgatttagtatatggaaaatcgtcgcgttagtaaaattgaatggaatagggcagatgtttttgaatctaacaatttcaatagtttggaattttttttaattgcttgaaaagttcggtgacatgatttgggagcaaaaattctaattaactttgtcaatgataaacaactatagagctggccattttttttggaaaatatttaaaaaatgtgctttcattatatatttgagttcttgttaggaatctgttctaaatctagattttggttgtgaacacagtcaaatgcttctaagtaatttagaacctttgtgattttcaggtgagcgacatttgggcaaaatttttattttaaaaaataatgtcacgttagcacatttgggcaaaactttttattttatacttgccactgagctgaatcaacacatagttgttgtcttgttgattttatttatttatttatttatttttgataaaattgttagcacatttcattattcctatgataatagttctatctaaattaaaaaaaaaatagttctatctaaattagttgctcaagtacaataaattagttccaaatatacaagaaattgaccaaatcaaattttaaaatgaaaatattttcttttcaaaaaataatattaagacatttgaaattgaataatattttcttagaaagtgattttcccctactaattattctttggtaaaaggtgtttgtagtaaaagacgtaggtaggttgatgagaacaacactaaattactttttttttcccttttctgatgaaagacaacattatctaatctaaatacataatattaacatgtaatgatattgtgtgtacgtggaaaatgttggaccaagtgaccccaaactctttggaagagaagttacaagaaccaaccaactaaaccaaaccaaaatccaagtatgacaatggcaatggcactcacttctcactctccaccatctctccaaatcccaagctctataatttctctttcatcaatgtcctattccttatcaagaaaacatatacgattctgggaaaagtccccatttggtagtggcggtaatgaagatcatctcactctgctcaagttgtattgcccaaatactaccacgactcattctcataatttcaaatgcttctcccaagacccatctcagtccgaatcccaacaacttcaatttgagaggctcttttctaatctcaaccaagtcaccttcaaaagagaacctggttactctctttcccactcttattattactgttgctcttatttttggttcagttctaatgttactggttttctttttttgggcaggaagtttatcgagtgcaatatttcttgtagctggtactacggtaaacaattaatgtatatatatagatacgtatatatatataataggatgcgtcatttgaagcaaaaatttctgtaatgcttgtaagaaactttctttaaagtctgcagcatttccacattccattagagtcccacattaataatgtttagaaatttagtaccatatataagatgcatagtctattcctctcaatgataattgtttttcatttttggtttggttgatacaatgtagattttggagggtagttttggttaagtgctacactttttccccctgttttatatgtttttcttttaatggctattaaatcttatataggtaggtgctgggatccttgcacttcctgctgtgactcaagaatcagggtttctggcctctgccatgacatgcattttcagttgggtttatatggtaatgccaccaagaccaagtgcatgtttggcatcatannnnnnnnnnnnnnnnnnnnntttaaaaacagaaaattatttttaaaaacaatttggcttgtt

SEQ ID NO: 110491 - DNA, 1176 bp, Cannabis sativa
acggttttctaaaacaaatttacaattaattacaaaaataaagattaaagtttgtgacgattttgtaaacgtttgtgcgaaaggatatggctacactaatcaataaggttggatgaggtgtcatctgcctgaggatatctcattcaaagcaaaagcttcttagtcgaaaactctaggatagccccatctagacggagcccatccaacacattttagatcattcaaagaagtagagacgactttgaatttaagtttcaagtaattgaatcggttcacaagtaaaacctcggtaagtacatccgcaatttggttaatagaaggcacacataataaacatgaagtgagtttgctaggatgaacaaaatgcatatcgatttcgatatgcttgcaacaagcatgaaagatcggattagcagcttatgttgcttcccctgattgtctacccacaatattggaggtgcatgaagttggacataaagctcactgagcaacgagacaagtcatttgacttcaaacatagcattggctaaagtacgaaactcacttttgatattagagcgcgcaactacaggctgtttcttagtagaccaagagaccaaatttctccctaaaaacatgacataaccactacttgattttcaatctttagggttgttggcccaatctgcatcctaatagtcttgtcttgtctggtttgagtaagaggttttcaaaaattgtgcctttaaggtgctgaaacagcctcttggtggcttctcaatgtacactagtaggagtgtggatgaattggttcaaattgttaatgattaaagctacatcaagtctagtaatagtaaaatactggagaacccaaattatacttcgaaataagtgaatattttcaaaagaatcaccttcagtgaattgaagcttgtgagttaagcttgtaagattattatttggcttaacaccctctagatggaagaagctctgagacatatttcttttgtcatcggtacattccaattaaagttctcacaatctcaacctcaatgaagtagtggactgctttcaaatctttgagagcaaaattgaaattgagatcatcaatgtgtttttgaatcaattttttattaggatctgtgatgaaaaattcatcaacatagactaggtgtaagtgagtgtctaaagccaaaa

SEQ ID NO: 110492 - DNA, 7462 bp, Cannabis sativa
aaaatatttaaacttatttacttaataaaattagttaaatgtatttttttataaataaatttaaaagattaatttttatatattttaaaaataattaaatttaatacaatttaatcattattttatatacctagcaaaaaaacaaaaaactaacatatataaacatagagatccatgaagttgatcttttgaactacaaacaagcattaaataagaaaaaaaaaaaatcaaggtcttgctgttttttttttccttcatagcatacaaattcagttgattgacttatgaatctttataaaatgattcaacatagtatttttaaaattgattcacatgtgatcaacatgtagtccaaaaaaactggaaaatagttataagaatataataagatttatggtaaaatgaatatttataaaataaaattaataataattatgtttttctattttttttcttaaattaagtttttaacagtcaaattttgaaaattgatgcaagttgatatttatacaccgtagcacaggtgaatatattcgagtgccatattgatattgtttagcaatttacagaaattgtaatttttgtaacgggtctcgccgtttctctctcgatcaaacccaaactccaaaccccaaccccaacccaaatctctccatctcttcactcgcctcgtgattcgccttctgagatcttcgctttcgctctgtaacgaaagcccttttctttctctatttctagccctaactcactgagttcgcccccctcgaactcggaagctgcttcggactaatcacaggttcttttattgactttcttcaggtgaggatcgtttctttaaaacttctattctaaatgtgtgaatttcccaatttaatacatttacgttgcaacctagctctgcttgacttctattgttttctgctttgggcgctctcttagggcaaagagaataagccaataataataattataaaagccgaagctttggccttttacttttgggggatttgtttgtgaatagaacgttttttgttcgggatcatattgggtatcaagcgaattacgttaatagaggttttggttaggcgaactgtggcgttgtaaagcgatgttgaattttatagttgacgtttgcgtgattttgcttagttgttttactacgtcttgaaatttaatctcatcgtgccattaattctttcatgatgatctttagtttagcgaaaatcaattgggatcgtgtttgtgcgttctaggttgatgatgatctttagtttagcgcattcaattagcattagagcttttgacgataatgcaagtgacatccataaaactacaattcacgtgcactttagcagataatatggtctttcattattttttaaattatactgtgcatttagcttgattttcattcattttgtttggctaggttcattgggtctacaagaccttttgtgggtaaggttgggggctttgattagtgctataattttctcaaaatttcaacattattaaatatgattttccggatcaggacattactctaagatattttggcattggcatatgtttgaaatttttattgctattccaactttggtcaacactttttgtgttttcttaagtggttgaatgacgatatgcatcgcttagctagctagaggcattacattattgtttgacactttagaggcctttatgtaacattcaaggctagatgcttttcttcgagaaagttgagttcctgttatgtttagtttcacattcgcttattaccatcatctctaaacatggctttttaaacattaattattcatccaatgtatgttaatgcaatagagtggcttaaacagatgccaagttctttttcataggttaaagggttctgtgaaggatgaatatgcaaccggctgtccattccagatcatctgccaatggatttggccgtcgaagaggcgaaagagatgtggggaccaggccggagaacaggtcacagagtggaaaatcaaattccaataacagattaacatctactggtgaaattcacttacaatttctgttgtttcttattaggatttattttcctttattaagagtctaaactctatgacagggagcaaaactggtggccatgtgagtccttcacatgatcgcttagtatatataactacttgtttcattggtcagcatgtggacgtccatgtgaaaaatggatccatatattctggaatatttcatgcagcaaacgaaaaagactttggtaggttcacttgttctatttttgttgaagagtgtttctttatgttgttctaacttttttttatttgtgaaagatactatatttaatcacttattcttcattgagtattttgcaatttttctggcgtttaatattactttagtcagcttagctggcatctctaatcctgtattttagatgaacttttatcatgttcacctttttgttacattcaggaattatattgaaaatggcccgcttgacaaaagatggtagctctcgaggtcaaaagtctcctgcggagtcagttagcaagcctcctgcaaagacattgattataccttctaaagaacttgtgcaagttatagcgaaggttttgcgatatttatgttctactcttttttctgatatcaatttgttgcatatattttaagaagttctgccttttttctttctttgaagttatgttcttattttgttattactaaaactactgttacgatagttacattaaggccttgcttggtaacattttaagtatcaaagctcaataaagggtggagatcttttgaagatgttaatttggaaaatcttcacaattatttttaagtatataaataaaaatgtttaggggtaatagcttaataggcatctgcattagacattacataattgtatagggtatgctgatgcagtagtaactcaactttgacaggacgtgtctgttacaagtgacggattcttagatgaggctcagtgtgaaaaacagcaagaacttatgatagattccgtcatttcacaatctcgccaagttgagttggagagggaacttgagccatggatccctgatgaagatgatccgcaatgccctgaattggagaatatttttgatggccattggaataggttgttctaacatatattttttctcatatttattggtggtggtatatcaatgttgcaaatgatttttttctttcaagtagggtgccatttgcacaactttgtggttctttagtcttttattgtgcgtcctttgaattttttttgctttcccaagtaattactattgtgtttttcctttagggggtgggaccagtttacagcaaatgaagccttgtttggagttaaaagcacatttgatgaggaactttacaccacaaaacttgagagaggtcctaagacccgagagttggaaaaggaagctcaaagaatcgctagagaaattgagggtgaggacactcgtgatcttcatttagcagaggtgaggctttattgatggcattttgaacctataaatttttttatttaccttcgtagttttctaggttttgggtgttgattttcttaaacgcaacacaggaaagaggctttcaactcagtggaaatttggatattgatgaggagacaagattttcttctgtctttcggggtaagatagctgatgacagtggttacgatgaggacatattggtggattcccataataacgacacctttggagattcctgtacctctggaattagtagttcatcatctgattggaacaaaggaaagagtaatgatggggctcgagcttcatcaagttcttgtgctatggtagttccttctttacaaatctttctcttaatttttttcctccacatgctagttgttgaagtgccttgctgtttattagcaatttgactgtttaaacaattttgttgcactttggattattgtcaaagagttagttggttctgcagttttaagagttggtaaactgtgtgaatattttgaagtaaaatgaactgcaagacctaaaattttgttcttaattatctttcttttttggtcatggggtttattgaagcaactgcctataaatcttctattctatctccatccccaatccccttcctctctacccagaaaagggaatttaacaaataaaacaaaatttgagaataaaatagtttctgttcaaagtgttccatacatttctgcatcctcagctcttattttgaaatttctttctgatattgtgctgcttttcccctggacattgtttcgtatttgggagaatggtcttttaatctatatgtgtattatgtattttctcttccataccaaatgttatggattgctattcctctttgcaggagcaagcacagtcttcgaattcgagtgttggtgtggatttaagcaggtctggttcctatgatcatgctgggcagctggcatcagaaccactttttaaaagctcttctgctacagctagtgaaagcaggttcctaatagagttttctcataatattcatttctttaggattgttttttgatgtatgtgtgtgtgtgtggagggagtggaaaaaagaagtttcatttttttttgtactttagtttaagcagcacctgcctttttcataactagtttcttgtctgaaattttaggatcttggataatcaacttcgcgaacatggagggaatgtgaaagagtattcagaaaaacaagctgtgagtaaaacttccgctgctgccttctattgcttttcttattcttttattgcttttaatatcctcatttttcttttcttttctttttttttttaaatttgtattgacagtttatcgaggggattcaattgtcaaaacctgatggtgagtgttcaatcttttggagaattggatgacttctttcccttttttgtaatatgtatttatcatcctttgatacgaaaaggttttgtgcaactatgaaatttaaaactgaaagtcttattggcaagagttgtttatggtttttaaggaaaaacaaaatgtagatctgtaatagttgaaattttcttgatgaaacttttgtcttctatatcaacaattttgttttctgtcattttcagttcagatggtttttttttccttctttgtctaacttcctctatttctctctctcaacatgtaacttttgtttcttaatttctcatcgcagattcatcatcttcgctgaatgggaagaaagatggctctgataaaggaggattatcgcctaatgccacttcttatgctccgtctagtgttccactgaagggaaatgagaaaacatcttctctgagtgaatcagtggatactgttgttactggaaaagcacatgggcaggctcaagctgttaactctcatggtcggcctggtagttctgcatcttccagttcagaatgcgcagttactgctgctgctcctagcggccctggtttatcaccaagctcgtctatgggctcattgtcgtctgaaagatctacactcaatccccatgctaaggtgcaattagcttgtcatttatcttgatcacaaatatctctatcccactcacttttaataagaacacaagaattattatttgcccttcaagaaaaaaaaagttatttgatatagaagatatttgcaaaaatggctcaaatttgatagacattccatctgaagcctatgctattttcttttctgattctgctagttcacttagatatttcattcacaatcattgccttgtatcttgcaataatctaatatatacggttctcatttatttttttcgccttctgttaggaattcaaactcaatccaaatgcaaagatttttgtaccatcttcaccaataaggcctcaatcccctgtgtctgatggctccttctattatccacctactatgcctggtgtaccacaaatgcatggcatgcctgttagcattggagtaagtacagttacatgcaattatttctctggaatgtttatatgttttgtggagatgtgtgaattattttaaatttcgatagatgatagttttgtaatggcctctgttgggccactataaagtcaactgatgatttgagatgtcagagaaatttaggcaatggagttttgcaacacagtcattagcattgtaaataattcaatttctaatgatactaatgtttattcacttaaccacgctatcaattgaagtgtgcctctgaaattgttctgtaattgcacagcatgcttttatgtcttatgctttatcaaaagtcagctaatcattttattgtcttttataatgtgtaaaatgaaatgtattatctttataaatcaaaaataaaaatataagacaagtaggaaatgcttactgtaatttatcagaattcagtcaatcttttatttttgaaagtcttcttgttcggactatgttgagaagttacgagtataattgtttacctccattcaggtgaagtagattttgttaagacatggtgtgatagctatgagtagggtagggaatatgtttagcttcgaatcgtgtattattaccatatttaataatgttatagcaatatacatacttaagatttatttacttttcacacttaatgctaatttccaaatgtttgcagattgggccctcctttccccaccagcaagttatgtttaatccccaagctggacagccacaaacatattttcatccaaatgcgcctcaggtactaaaacttaattctgaacaaaacttttgggagctgtcacctcaccgctgtggattttatttttggtatgtgacttaactgacactataaattctcgatcttaatttgatatcttcacctgagtgcagtatgggcaacagatgcttcttggtcatcctaggcaagttttgtacatgcaaaactaccaacctgtaagcaatttcctaaaatctttcttcatttattttggtaaaatgattgttggatagtaaattgaatgctcgtttctggtttagcttctcgttgaaagatagttactggattatttcttgcagattttatctgtggttcctaatgtttatcatcttttgatatgagatcgatttcattagattcattcgtgtgaattttggatgtacaggaaatgccatataaaggacgagaatattgagttgtttgtggcgaatggattgttggttttgcgttggtcagtagcagaagaataacccacctgggagttggaggaacctatttaaggaaagtgcccgccccgccgtcccatgattatttaacatttgtgtgtgctagagcaagtttaccttttctccgagatataagggttgccgcctccattccatcctttaacccatgctctatgtattttggggattttcccaatttcatttagtgcccttcacattttctcaatgtctttttttttttaatttatggaacttcataattttgtttcttt

SEQ ID NO: 110493 - DNA, 15468 bp, Cannabis sativa
  modified_base (15424)..(15442): a, c, t, g, unknown or other
ctcactcatcaatggaggatttgtggaatttgaatttacataatttgataaaaaaaaattacaaataaattttatattaagaatatattgacttatattgagcctattgggaaagagggcaagcaaatttcccatgttgatgtagaggagattaagattcaagtaaataattagaattctactgtgatttgcttggtcttaagggatgagcccccttttactgtgtttgaggggtttcttaaatggaaatggggaaaattagggattgtgcaaattgttcgtatgaatggtgagtacacaattgtaaaatttaaagatgatgctaatcagaacttagttcttgaagagggagttctgcaatttgattaaaaaaaaacagtccttgttagaccttggtccactgatttaacagctttgcgtcttgtgaaataagttccgttgtggattcgtctaatatgatcttgggcttcaatattggggaagtaaatatcgcagtgttattgttagcaccattggtaagtcgatcatggcggataaggttactagagaccgtccaatggttaaatatgctcgcgttcttgtggagatggatataactgatgaaccacctcaaactatccattttttgaatgaacatggtcagctcattgaacaaggagttgattatgagtggctcccagttaaatgtaagttttacaatggatatgggcatatcatggcagattgtaggaagaataataatgttgttagtcgtaagcaaacaatggagaagaagcaatcaaacttgaaacctaatgacggtagaaaggcaaatggcagagggagcagtaaagctattgttactaaagaagaagttatagcaaggaaggaaggtcatagtgatgaggctcaactttatgaaatagaggagcgaggagatagctcaaatggagaattttatcatgagttagtttctaatactactaaaacagagctggttaaagaaactgatcccttgaaggggaagactatagtgactggaaaaggcttgttgagaggagaaggagatggagaatggtatattcctaagaagactatacagacaaggaggaagaaccagagtatgcctctggtagtagctgatggtaaatctctaaatttgattgagactttacaatggaaacaggggtgtgagaaaagtaacaattcatctaacattttggttaatggataattgtaatattcttagctagaatgttagaggtcttaatagtggtaaaaaaaataagaggcaatgatttatatttgtagaataaggaggattggtttagatgcttttcttgaaactaaatgagaaaaaataaagtgaatgagtttatggctaataatctaaggggttggaatttctattcgagctcatttatagagggtagaatgttgattgtgtggaggaaaacttttttttgggttactatgttagaagaacatgatcaatttgttcactgcttagtcaagatggcttgtcgtgctaatgagttttgtgctacttttgtgtatggctcgaatctggttcaggagagaaatagactctggtatggtttgtctagtcttcagtttccagttaaaccttggattatccttggggatttcaatgttattttccattttggtgacagagttgggggtaaccaaattacaagggttgagttgtaggatgcaaataactagtctgctcttcgtctggctgatgctttgcatagaatggggtccgattttacttggtctaatagccaaggagcttctactagaatttattctagaattgaccatgttctgaagaatgatgagtggttagacctttttcctaattcttcagctaatttgaccctggaaattgtgtcggatcattatttgtgtgttgttttctcgtttgttatgcttaagataggtgttaaaccgtttagattttttaattactaagcagatcatcaagacttgaaaagggtggttttagagaattgaaataaacttgttagagggactaggcttaaggctatctatttgaaaagtctgagattaaaacacctcttgagatagtgtaacaaaaaagctataggggatgtggagatgaattttcaagaggccaaggagtagtaccaattagctaagatttatgctcaagctagacctggtgatgagaccttgttggaagctaagaaggcaacagctctgagattttgtgcttgtgagaaaatgttacatagttttcgcttcaaaaaagtaaggctacttggatgaagaaaaaagatgataataatgccttttcttatgcctgtatcgagaagcaaagagaataatattgaataggaaactttgtggatactcaaggctagactgttgataattataattttgtggttagatattttgttgatcatttcaaaagctacatgggttgctcgaatcaagatattactccttttttatcgagaaatgttctttatttatatcaacaactttctttgattaaaccttttactaagaaggagattaaaaatgccttatttactatcccagtctcaagagcccaggaccagatggatttggttatgtgttctataaaataaagtggcctgacctcgtgaggatttcaacttagctattcaaagtttttgtcactagagaaattctaggagaattcaatgaaacttctatttctttggtgcctaaagttgatgtcaactagggtagttgattatcatcctatagtttattgtactaccatttataaatgtatttgtaagctcatttacaaaaggctagctgaagtgcttccctacattatagatcagaatcaaggggcatttatcaagcaaaggacaatagctcataatattctgatattctaggatcccatcaaaaattatggaaggaagaacacttcctctagatgtaccatcaagagagatctaagtaaagcttatgatacggtagattggatttttcttgaaacttggctcaagtatctttgtttttcgggcagatttgtgagctggattatgacttgtgttagagggacttcttacagtctaattatgaatggtagattggcagaaaaaaaaaaattggtcagaagggcctccgggaaggggacccaatgtctcctcttctgtttgatattgtgatgaaatttttaactagaagattaaagcaggaagcccttgaaagcactttcagatttcatcaattttgcaaaagcttaaatttgataagtttatgctttgcagatgacttgatctttttttgcaagggctctactcgtgatgttggccatctcaaaaaggctttaactgagtttagtaagaccagtggtctttcaattaatagtgttgtctcaaatcttttttggtggagtgaaccaaactttaaaagatgagatcttacagtctattgggcttaaagaagagcacttccctcttaaatacttgggagtgccatgaggccgaccaaatggagaatggaggactgcggtatcataattgataaaatcaagaaaaagcttcatactggatgaatatatttatccttccacaaagtgttattaaagagattgaaaaacattgcacaaattttttatggggccaaagtggaaatagaagtaaaattctcttagcttcttgggattttgtttatctccctaagaagtttggtgggttagattttaaagatggttctaattggaatcgagctattcttactaaatttgtttgggcaatcatggagaaacatgatgtgttatgggtgaagtgggtcaatacgatatacttaaaaggggtgaatttctaggagtaccaactcccgcaagatatcagctggtcttagaggaagatttgtcatcttagacaagtcttcagcaggcagtatgtgttggttgttggtatgagaggtaagtttaaggctgctttgttatataacagtcttcttcaacccgaacatgagagctactctcgagctgtttggaataggcttagcttgcctaaaaacatgtttattctttggcaaactgtgcatgttcatcttcttactagggatttcctctgtcgatttggcattgataatgttgagaatatctatcatgtttgtggtatgggtattgagcgtcattctcacttgttttatgagtgtcatttctcggttcaagtggtggcctttacacttcaatggttggttgagcactataactaatatggtagggaagatgaaagctaatataatttttggcggctacaatgtatagtactaataggaataagtgcatccatgaagggtactcacgtacagtcctacacttagttactaatattaaaaggtgtattaagtgtcgtttgtatagcttataaaaaaatgaatacttgtaattatagaatgattaataatattttggattaagatttttgttttcagctagtgtctgggtgttttggtgctgttgtttttgttggtggcgtttgcttttgtgattaatgaaatttcccttttcttcgataaatgtttaagtgtcaattttatgttttatcacaacatattgattgtatcgtgtcgtatttgtatcatatcgtatttgtatttttaatacgtttgataattatatgttcatggttttcttatcgtattatgtcgcatgatcgtattaacacgataagacaatacataacacgaatagccagcactacacaactcgtgatatatgttataaatatatatatatatatatatatatataaatatattgagacattttcatttttatttttgtaattgatttttatttatgtataaaaataaaaacaacataatcttaaaataaaaacagcataacatcaaaatagaaacaacttctaaataaaaatagtaaaactttaaaataaaaacaacttaacttcaaaataaaaacagcttttataaaaataaaaataaaaaacgtaaaagttaaaaaaataaaataaaaaatatcgtatacgtacatagtaattctcctttgtttttatgaaattcttaatatatattaatttctaaattggagaaaggatacagctagactgctagagtatcaaagataacaaacataaggaaaatacatgcacagatgtacacaaatcaactattaaatttggacattgaccatatatatacaaacaattttctttgtttttgttttcatttttttttcttttttttttcaattcttacaactaatgccccacaccagactctttaccgactaaatattctaaaattaaaacaaaagaaaggatttgtgactgacttgaatacaccaatccttccaataaactcatgtaaaatgagaagagaacattaaaagagcatttagctccagtacacattctcaggtagaggatccaatacaccaaaatgaatggttgttctaaggagacttcgtagatctcgttagcagatcctcagcagatacttggaagttgttttacaagttcgatcaaacattctttcagatactgaggattgctttaacgcatgggtcctcggctcaacctacccaatttgagaatgcaacacagaaatttccagcacacatggagctgtttccaataagcaaagagatcattaagcaacatcaagatgacacaattaattggtaatgcagtgttcgttgtctggaatcaaattagttgagaatgaaaccccttccgaacaaaaaaaaagattgggtcctgtattcgccggccaattactctaatcaagtggaacccattaaaattgatacatgtataggttttttaagtaaaaacacaaatgagaagaggatggcaataaacctatcggttggttactttctaagtggccatgttagaaaaccaagtaataaagctattgactcatgcagcaccgaaatgagagtgataagtaaatgaaaagttcgcatgcaggtgcaggtgtcctaagaagaaaaatagtttgtatttgcgtgactatcagttcttatttcatttataagagtaaagatgacgaaaattaaatctcaccttaaagtacaaatcacaactaatggagagaaaattatctcaagaccgcacaccaaaaatataaggtgatgctgatccagaagatgttggaaggggcttcttcacaaatggatgttctaagagctgagcagcagtgagacgagcatcaggatttacttgtaggcacttgaaaataaagtcgcgtgcctcttcagagagagaatcaggaacagtaggtggcacaccctttccaattttaaataaggcctgcatctgttgagacaaaaggccatgaagcaataaatcaataagaaagccgaagaaaatctctagttcgagaaatctttgatccttgacatccaccatagtcgtttaagtaaataatgaagaaagaagaaatcaaataaaaaatatacatacccattccaaatcagagtatggtatcttttgcgtcaacatctccaacacggtacacccaagactccatatatcagctggaagcccatacccttgattctttcggttaacaacctgcaaatgtagttcaatattgaggcttaatacaaaacatcaatcacaaaccacaaaagaaatctatatcaatatttaaagaaataaacattttcagatataacaaggattatgtctatctaatctaatagcacacaaatcaaattccttcttaataaagaaaactcaaatgtcactggtaaaagaattttattagtaggatactcaaaacacgaggtaaaaaaactaactaatcacagtgtaacatatagccactttgctcctacgctatggacatattcctaattgtaaaatatggtgaatgaattgtatatcttattcaataaattatatacaaaattagagagactaaaaaagaaactaaagagaaaataggaaactaactaattacaattatttttaaattctacaactaatatacagctaatatattcatactccccttcaagctggaacataaatgttaattatgcacaatttgttataaagataatcaactcgcatcctattaaaaatctttgtgaaaataacttctaattgttctccagtcttcacatgtcctgtggagattaggcctgaattttcttacgaacaaaatgacaatcaatttcaatgtgcttagctcactcgtggaacacaatatttgaggcaatatgaaaagcaacttgattatcacaccacaattttgctggaactgaagtcttaaatccgacttcagtcaaaagctgataaatccacactatcttagacacagactgtgtcatagctctatattttgattctgcactggatctagacacaacattttgcttcttactgagatcagatttcccacaacaaagacacaataacctgaagtagatcttctatctactttgaaacctgtccaatctgcatcaagaaacactcaatctaggtatgtccatgatccttgtaaacaacacctcgtcctggtgttcctttcaagtaacacaaaattagctctaatactttccaatgatgaattgttggtgatgagataaactgactaacaacaataactgagaatgcaatatttagacgagtcacaattaaatgattcaactttcccaccaatttgcaatctctcaagttcgtcaaatagtttcccatcacgtgtaagatgtacaactggattcattggagtactacaaggtttggctcccattttcttgtctcagttaataaattaagtacatactacctttgagatagaaaaataccttctttactcagaatgacttcaactcccaagaaatacttgagcaccccctaaattcttagtgtgaaacttggtatgaatgtaagatttaagggatgagatgcctatagtatcatttctagtaataacgatgtcattcacatacacaacaaaataatatcaacagttgatttttcattaaacaaagaatgaacgatcttacttttcaacaaactaaatttctcaacagcctgactaaatttaccaaatcaaacacaagaactttattttaaacaatatagatttgcgaagacgacaaactcgccctaactccccctgagcaacaaactcaagaggttgctccatatacacttcttcctcaagatctctatcaaaaaaatcattattaatatcaagctgatgtacaagccaaccatgagtagctgccatggtgcatgattattatgacccaaagcactattaacagaaacagatggagtagcttttgtgcaaagagcgcggctaaagacatcctgcaaagaggagacatcagacccagaaagaacttgtgactttgcagagtcaaattcacatgagagtcctactagaaagctcacgatagccatctactctcgctggcgctgctgaatcttcacatcaagactaaaaggcaacaacacattaagctctttgaatgtcctcttaaatgccataaagtagttcttaagagactgaggttttgcaaacatcgtaaacacgagatagattgtcttttccaagatacaaaaattccaagtaatctattatttttttaaccaattcacaatgattaatcaaactaattacctcattattaatagaattttgaacttgaataaacaagctagcatcctcacgtaaccacacttttcttgacttgtttttttctatgagaggatcatctttgtcaatactccttagacaaagtcgaatcatcttactccattccatataattcgaaccaattaatttatggtcaatgattttagacatcacagaaaccacatcaaaaacaactattgcttttggatttgattttgtctctaccataacctcaaacaaatatcggaagagacaagacagaaacgaacaacgaagaacaaataaagaacacccaaatacgaagaagggagaaataccaaactacaatttgagacaaatgcgagtaggcttaagaggagccaaaaacacgaactggagaagatttgtcgtcgaaatctccgtcgcacacgccttcacgcaggggtaggtggtagtaacaacaggcagagcgtgagccaagcgcacgaggaatccggtgaccggacttcgagttttggcagatcgacgactggggaaatcattctgagttggcgatgagaacaaacgattactctaatgagggtttccgaaaaagaaccctaaaaatgaaagaaaatcaaaccctaattgcaaaccccaatttatgatgaaccctaatttcgaatttcgaatccccaatcccaaaatcagctctaatatcatgtaaaatatggtgaatgaattgtatatcttattcaatagattagcatgtatttatatacaaaactagagagactaaaaaagaaactagagaaaaaataggaaacaaattacaattattcttaaattctacaattaatatataactaatatattccaacactaatcagttctcaatgtacatatggacgtattcctaaccagtttataatatatagccactttgctaccacactttatatacatatatacaatgtttaaaaaggcgtttttgaggcgtgcctcaagttgaggcgtttaaagattgcaccaaggcgtgcagcttgctgaggagaagacagacgtacgccttaatgggtgaggcgttgaactgaggcgtgaggcgttgaggtgtaagaggcgtgtgcctcaaattttgaaagtgaaatgggctatttgagcccctaaaaaagggcccaaattgttattttaaatttgtttttctgctgcccaacttaaaaaacttaaaagacctttaaaaagtccaataagcattaattaaaaagcccaatgaaatatttaagtaagcccaaataaaacttaaaaataaaaaccctaattccatcttttttcctatctccctctcttcttcacagcagctgtgcagctgcttatttcttcagccaatggagaaaacaaaaacttgctacttgcttccttcaaatgtgttctaagatagtagaatttaggattctaattctagaaatataattatctttattttagtttgagttttatgagacatattttttggtatgtttgaattttatgagacgttttatagttatcatttttatgacattttataatatgtttgaaatttatgtgacagtttattcattctaaggtgctctaaaagtattgattccattaattttttaggcttacgcctcgtacgcctcgaggcttacacctcgccttaccaaaaaaaaacgcctcaaggctcatttgcatttttttaaacattgcatatatataaattcatagttatacttataacaatttcattttaaattacacatgtactactgatgtaacaatgacacatcagtcatttcagcattccgttaaccacatgagataaaacttaaaaaagccatatatttctacactaaaaatagttcggagaaaaattttcaaaccaagaaaatgtgttctgctgctagccagattctgaattggccaggttaggcaatgaatttctacatatttgaaatagtaccatattggtgtatatgtgtttggtccattacaggaaagagaactaatacttagaatcctaataattatctccaccagtaactgagactgccattaatcaattgatccattttgatccataaaatggtaccattttttggttaatttaatataaaatggcaaggacaaacctcaggagccatccagcaagcagtccccttggtagatttgacgtcattaaatttggttgcctggaataatagtacatgcagcaaagtaagggacgaaacacattcaaactcatttcagaagtaaccagaaagaaaattagaaatcagaaataaaacctttgccaacccaaaatctgcaagcttcacagatccacttgcatctaccagtatatttgcacatttaatgtcccttgaataaattaaaaacagaaagagataagcatcaatgcgtcaccaagattcacgccttggttggctaggcactcaaaagccacttttccacttttgggcttttaaagcttaaaatcaaaagcaatttaagggtttggttgccctttggcatattaaaacgataaaaagctctttgagaagaagctaatctttatagcttcttcagaaagagcttcttgagaagccaaagccgaaagcacaaacctaaccaaacaagcccaaaatacctgagaacattagtgaacaaatgtttcgcacgaaacatagtagttacatttatatatacttctcttacctgtgaaccacatttcgatcatgaagatactttaaaccaagcaaaatttgtcttgtgtaggcagagacttgagaatctcgaagattatatctctgataaagtctttgcaaggatcccttggttactagctcaagaaaaatataaagctttgagtcatcctgcagtgatcattagaaaaaaattgatgatcagaaatgaaacaaattaggagagactacaagcaacatgatatattcaattcacatcattttcatactaggcacctatttactttagacttaccactgcaaaaacctaatttactaccttatctttacattcccgtaaaagggtggcaatataggtcatgatatgataaaatggttcgaagacggcatgaaattagcaggtttgggtttagcataaacacgcataggtcaaaataagttacacacgattagacacgattaaatttctagttgaacacaggttaacctactaaacctgaaattgacatgtttaacacgattcagtacatattaatatgacatgaaattagccaatgtattaatctattaatgaaaccataatagattatacatgttaaaatgacaaatttgaacctatttgtttattttctatttatgtgggaaaaataggtattaaacttatcaaaaatgttgatgtgtcatgtaagattaacatgacttgaatatggcatgtttaaatatcgtattaattttgtcgtgtcacgggtttacctatttatgactgtgacgtgttcctgtttacattttatgacacgttatttaatcgtgtcgtgtcgtgttcgtgttaagcataatcgtgtcttatcaaaatccagttgacccaaaacaagacacgaatacacaaattgccagccctaaccgccacctctaatagtaccaaaactccgagaaacctactgtacagtcttgtaggatgtgaaacctagtttcaaataacagattgcatacaaccttcgcaagtaacctccctgtgatttttttaataactaatcattttttaaactctataaccttttaaacatttatttttctactatcggagattcagaatacgcttcagtaccaaaggcattcatcctccctcacccggcttggtttgcaaaattactaacaagactaaaagttatgaaccatgtaagagtcatcaatcagtatttgcttagtacgcaataaagttgattttgactctaaaaatgaaaacttaattgttgtataagttaaaagtgacaagaatatgtacaaagagatctgcaattactataccttatccgtgccatgatattgaactatgttttcatgttcaaactgacttagaagagcaatctcctgaaaataataagcacgggattagaagaagcacgcattcaccaagatcaaatagtatagcatagacataaaatacacagaatgctacatgaagccagcaaacaagcaacccttaagtctaacctgctcaagctgataaatactttgttttccttgatctccttgatcaagcaaggaaacttccttcacggcaaaaaagaaaccatcactgggaaaaaaaatggaaaatcaatgaagatcagctaaggcatataaattgtcaacaatatgagacaaataaaaaaaggaaacagaaaaaacaaacttgaaatgaattgtatgacatttcaccaccaaacacacacacaccaaaagaaaaaaaacactatatcacaattgttaacctttacattctaaatatctgcgtttaaactaaattcttgacttgtcattataataataactacttattctacagaaccaaaaaaacctaccaaaattaactctctacctacttttgtcatactttctgtaaataagaattttcttttctttttatttcagttaatttttagagtttgatatttatctacaaagcacctcaacacattggcaccaggcagtaattagttctaattcttctggcagtctgcaaggagtgcagcattaattttaactaataatatttaccagtcaaagtcgagctagtgccaaaaaacaagtgttaaaattaagtgacaagacagacaacatggtactataattcctacatggatatacacgttgcttccatcaccgatatggaaagccacaaaattgctaatttttatctaataaaacaatgccatccctagaatctttaaccatcaattctgtaagagaatatatccctatttctatctaataaaactctaaaatcttcaatcttcaattatcaatttggttatctcaaaagaaaaattatcaatttggtaagattccaaagaaaaatgaaacttctggactaatgaatgaacggtaggtagggttaataaggggcgacaataaacaactgaaatgaaataaatgaagataatctcagaaaatatgacggaaaacaattgaacacaacattccaatacttactctgcaattccttcatatacagaaccgaatgacccgcgccccagaagctcaccctttagccaattggaaatattacgcttaaatctcccattcggagaaatgtttgagggctctgtggtgctgctagaagagtcgtcatcgttagacgttgtgaacgaacacgtttcagagggcggcacattctcagaaacgacggcgggcctccctgctgagatatctgtgtttcgatcctcaacgacttccgtctgcacttgttttactttgtcttcttgttcttcctcctcttctgtgcgttcttcgtccgaagaagcataatcttcaacgggcattcgtgaagaatcttggttgtcgtcgggcgcaaaatcccttaaaaggtcccaggtcgagctcgtgagatcaacctcgggaagcctcatcgaaggcggtggctttagcaacggtggtaggacacccttaattcctcctccaacggcaacaacggcagtaccgccaccagcacaaaaactgtcgtcagcagtacaacacccactagactcagctggatgagcccgagtcgactcagtaacatccctaattgcagcatccgtaaacctatcagacaatttggcaatcgctgctccactatcctcgtcttgctccctcttcgaatcactgaagctatccaaagggtaaagcttagacctgggcaaaagatcagaagacgatcggaccttccgagcctcccacgccgccagcgaaatagcaaagtcttcaggaccggaaagccccaaactccggcaaatccgatcaaactcgccgtcggtgccctcgactcgaaaactcatcttttccgacaaatcgagggagcgagtatgaagcgacggagacggcgaagattcaatcgacgaagacgacgaggtcgcgttgtagtcaatgtgctttgcagcattgcggcgctccaagcgcggcttcctcgagcccttcttcgaatccatgtctttgtttacctttctattggtgaaaaatcgaggtatatgctgcatagagaactaaatccatctaaatcctccaaacacagagcttcgaacggaaacccctaaaaataaaatccagtgaaaatatctttttacggactagttgttcatttttctgggctgatgattttctgaaacattcccgagaaaatggataggaaaattgggattctggggttttgttgttcaatagtagagaaagagagattaggaggaaacggtttgaaggggagaaaggagagtgagactttgagagactggtaaacgccgtcgaagatagtaggagagaaaaggaaaacgcggtgccacgtggcggctacggaagccctcactgtgaccgggactcgggtgggccctttttattctcatacgacaatattggtactctaaaacttaatataaaatatatctttctatttatttatttatctttaaaaattaaaatatctttttctttttataatttatataatattttttataatattctatatatataataaaacacatttaaattattttatttttttgaaaatgaaatatcaacttcattcagaatacaaatggcctgaagatgaaccaaaacattatcctcaagaatgctacgaccagaataaaatcgagagtaggggtgttcatccgatccannnnnnnnnnnnnnnnnnnaacaacatccaatccgcactaagtgc

SEQ ID NO: 110494 - DNA, 1632 bp, Cannabis sativa
aaaaaaaaaaaaaaaaaaggaagccacgatgtcagaatcaagatactgtgaattcaataaaatttatagaagttattgaatctgcaaaatcacaaggaacttgttcaaacaaaaaacatacaaggattctttttgtttttttttttttttttgagaaaaaacaactaacaacgatatgatagtttgctgaacctttgaaaagtttaatgaagaaatgtgaaagtacaataatgatccaaactcggatattctacaatgggaaggattgtggagaaagaaagtagaggcaaatagtataaaggagcagattaagttgcatgtgaagtatttaaaaaataaatccaaaaagcatgcacaaaagaaaaaatgagcagggagaacaacctaaaagtgcataatcagataaaatagaatacagtacaagatcatcatatgtaagaagttattacctggattttatgaaaaagaaacttattattctgatgaaaagagaacaaaaaagggctggtaaggagccattatcctcatctttcaatgtagcccagtatgatatatcatcaattgatttcaaatttgtcatggtaatgcttctctttgagggttttgagaaatcaaagtcagcctcacttgatagagatggtaaacaggaagacctgttctgcagaatcaaaggaagaaaatgggaacaatcaagctatgtaacaaagtaaatgatctataaggccgagtaggtatcaaaggtttactctttctagaagcaggataagattatctcgagcatcaggaaaaggttctttaactgctagacttcttatacaatgatacagagcaaggaattcatcaccaacatatgttgccaatacagctaactgcaaatgaacataactggttacaatgtgataaccaatttaaacaattttatatcacaaaataaaatttcaaatgagactagttataggaagaaagaaaaatttccactacctgattgtgagggttcccgctgtctggccaaatcattgttgcttccatgtaatgaatggctgccctcgaccaattatgtttttgaacgtcaggtttttcgtactgttctctgtatctaacaagatccccaagacaaaccaaaaagcggtgacataagaactggcatttctgcattttctttggttcagaaaacccagtttcccctccctttctacaagatgaagactcttgtggaagcctggaaacatttctggttttcacaatcaaattttgatagaactcaattgcttctgatagaaatattttgaatccttctatatgattggttttatatagttctacatttgaactcttctttatccttttacgaaactcatcaatatgcttgtagtgaagcttccacaaagaatactctacatcttgaagttctgcttgttcacaatcatttaagatgagtttctcatagctagatcggactttgcgatacagttcctgaacatcattatgcaatagatctttggtatggatcaacctccatagctgtttttctttgttggaaacctttaagaagggaacatttcaagagtcatgaaaaaaaaaatatataacggaagaaacataagaaaatgaaactccaagaccaaagaaaaa

SEQ ID NO: 110495 - DNA, 1574 bp, Cannabis sativa
ttgaaacgtgtgacaaactagaagggacgatgagtaaatatactggtagggttcgggttcctctcaaaggcatggggtaaattggtcgagctagaagaatttgtgttgccataaatatcatggggccttggttgttgtcatttaagggatttcaacctggccatgttaggaaagcaagcttagatgctagtcacaaatgaatcatctcttgttagtcgtgtttagaaagcccattactatcctcgtagtacgtttttgactatttctattggtgttaatcttaattttattttgaaaagtatttttgaaatgcaagatttgatcaagaaaggagctaggtgtttagttggtcctggtacgagcataaatgttcaaactaactcttggcttactgatgtttcttatccctggattactacaacttttattgggatggagaatcggcatgccaaatgatggagtgtaaggaatgagatttcgagattgttaatgacatttttaatgaaagggataaggagcctccacattcccattagtcaagagactaccatggataattgatattggtatttagatctacatgttgattatactattaaagatgcatataaaatacttctcgaagttgatgttatggttattaatgagtttgatatgaagatttggaaaatagtttggaagttacatgttcctccaaaagtccaacaacttgtgtggtgtgctttaagtggttgtttggctacgaaagttcagctcgctaccaagcatgtttcccttgatcaggtgtgtcctctgtgtcaccaagtgactgagactatattctatctttttgtcctctaccattttgcaaaatcttgctggcacagattaattttgaattttggtcaaattactggtgtggatttttaggattggtttagtcagtccttgctgtagcattttgcaatagctcaaattggtcatggttctttgggctatctggcattcccgtaatgagatggtttggcaggaaaaaactacctcgattgctgaggttatagtattggcaagagaggtccttaatcattggagaaatgctcaacaaaggagaatggggtctttgtttgtttctttggattataatggactggagcattgggtgaaaaagtttcaggaatgattaaggtaaaatgttgatggagcaatttttgctagtgaagagaagtttggggtggttggtgtggctcgtgatcactacgacctgttcatagaaggttttactgtctcacttgttggtcgagtagatccgactatggctgaggtggtggggattaaggtggctttgagttggatcaaacagaatcaatggaatcgagtacaagttgaaactgactatttggttgtcgttcaagcagtccaaggctcttttgatatcccttctccttttggtcacaatgtgattgcttgtcgatcaatgttggcctctttacccttagtaaagttatgttttattaaacattctataaataaaactgggcattgtcttacttgtagctcttgtttgtatccagatcgtattttcagtgagagtactg

SEQ ID NO: 110496 - DNA, 2609 bp, Cannabis sativa
ttattattgctttcttatatatattctcattacgacatatcgtttatcgcttattaaaaagactcattgtcgttggctaaaagggaagtcaacaatcaccatgtgggctgttgtatggtagtgatggtaatggtgatgaattcagtggggacctctccaagcagctatgggggaggcctccccaagtaccctatttatcattcggatgtagggtactgacttcttggacttttttcttgcccttttttagtgtccggtgaaggtagcgatttccatttagccttgctgaaccttggagaggtccttgaggcatcatccatcgaggtatctcctcccgaggagaaccctagaattcccattccaaacgaagggccttccgaactagtcccacctaagcaacactgtaagagcgagagcaaaggtaaagcttatgtaacttctctagctctcagagttctcgatgactctatctaggaaatagaccaaagattgaatttactgaggaattatggtcttttggaagtgtactctaaagatggaggagtacaaaatgttccaggactcatgtggcatcgcatgtccatccttggggaattagtctctcaaagtgtgtacggctttagagcgtggagttggtctcgcatttcttgtggagcctatcttcaacttagaacatacttcgcagaattttgcgttaaagctagaatagctcccttccagctccttccagtagcctacaaactactcgcatgatggtttatattctgcaaatctcagggaaagccagctcctacaaactttgtatttaaacattaaacttttatagttatatacatatacatacaaaaattcgagatccagttttaaaatttatattcatgttctgaatacattttataatcatgtcgcacagtgactacaaaataaagcccaagtcgtcctaagatcaaactctccatgtcgaaccatcttgacatgtacaatcatccctgagctctggactcactgctgctcaaccttaccctttcccttacctacacatgtaaataatatctgtgagtcaacaaacttagtaagaaaagtatgtataatataatatatattatcgacttgcatttaggcatccatacacctatccacaaggcttaacaaatgatcaaaaacgttcttaacagaggtatgacctctgtaccatatgcactgagtacaactattgtactagtattggtagggttgaatcgtacccgcgtactcttgagtgttgtacaccctttgaacagtatatattgtaccaatgcactcagtaacactaccgtactagtgttggtagatatgaatcacatgaactgcatgcatataatacacatacacatatacatatacatgttctatactaatcttacctcgtttccaaactcaagtgtgacagtcgacctgaatagaaaatcacgcgctgagcgaaggccctatgccacaatcacataaattggtaaataacttgctaaaaccttcttgggatctaaactcaaaactaaaaattttcctatcgataaaaagcatggcaataccctaaatatctaaaaaacacaaaacctaaggctctagagactgcccaaactggtaaaccaaatttccaaacggcaaactgctttctagggtcctgtttggaaaacggttaaccggttctctacaaaaaagcctaaaaaccttaaaacacattaaatttttccccaagctcaaccacactttccaaaatacttgtaacatcatccaagaacagtttctacgcaaaagcagcaacaaaaatacacaaaaactcaaaaaaccattattgagccaagtttgaatttttcaactcaaacttactcaacactcaataacccactaaaaaccactcaaactagctccaactaatgtagaattaactgagaaaactaaaataatgctcaattaactcatacaaaaactaattctcattttgcgtacttaaacttagcaaaacctcaaaaattcaaaggataagggttttctagggtttacctttgcttgaaccacctcaattccttgttgaaatctctataaattgatgagattggctggtcctcctctggttctagtgtgccgaaagggagagaaagaaagcaaaaaataattttgctttcaatttaggttttttttattaacttaatttagataactaaggataaacttaagtttatctattcacaaaatagtggccagctgccatttagtggaataatccacttatcctcaaggaaaaataccgaatttacccttacttcaaagcttaaataataaaatggccgaacaccataattttgcctaatcctaatatccaaaaattaagcatatgattttccccctaaataaaaagttctaagttcacccatgtgactctaatggtcatccatcacattttccatccttaccgagctaaaatcataaaaattgtaaatttctcattgaacataaataacacacttagagtttaataaaatcttcaaaattgagaacttaaaaatctaatgcccattttctaaaaataggacccacaacatatgttggaatttattttgccaggatcttag

SEQ ID NO: 110497 - DNA, 2021 bp, Cannabis sativa
tttgagttgttctgctttgtgttttactggtgttttataaaaacacaatatttttgaaaatatttacgtgtgacaatatctttgtaatagttagcttaaatttcagtatttttgtaaattttctataagttttaataaataaagtttttttttttaaaaaaaaagttgttagatcttgagtatttaatggttaataagagtaacccttgaataaataagcaagctatagagaaaagccacttaaactataaagccaacaacacgcaaaagtagtgtgtgaacttattataaaaaccttcgaatcgggctagctaggtaaccttgagaattaaaatctagaatttttaaattaccaattaattttcatatagtttacttcttactcaagtttctacctcatataatcaaattaattataatcctttttatattctcaaaaaaaaaaaaaaaaaaatctttttagaagaaaaatatagaaatcagtcatgttaagaattaatgtagagtccaaagttgtggcccctaaatgaatatgaaatatcaataagccatatatatatatatttatatgtaaaagcttggacaaaaatcctcaattatattaattgaaaagtgggatatgattatccaaactgtataatgacaaagggcacctaattaatgatgattattatatatataagtggaaggtgctttaggataagtgttgttagttttatggttagggatggttttttatgtgggttcaaatgttcattattacttgctgaccaaggaattattattattatttaaacaaaacaaaaaaaattagtattaattaatatggagatatctatggaccctaattaatttgtaaatatcactttatgtgaaatgataaggttttgtctccactacatggatatgaattagcaatgaaaatcatatgaaaagaaaaggggttaataacattatcatatcacatggttttggatttggtcattttccaaaggtaagactatgaatggtatatatagacctataaatatatatatattttaaagagaaaatgaaaaaaaggtgaatagaaattatatttaatgataataaagatatagtttattacaagcatagacataaataaaataataaaagcctactaagaaagaaatacaatatctcctagcccaaagttaaaacctattgatgttcaaataagacttgatgtggatgcatttttgcttatgttttcattcatatgggagttttgactgattacatatactaattaaattataacaaataaaaatcccataaaaaagattaaaggtcaataaacatgattaatgttgatactaagataaaacttagaagaaaggacaagataattaaaagtttacaatatgatatgcttgtaattttcaacttaactagtcctcatattgatagtggatactgatactgtgtactttatatatataaattagtgtgtatgattttttttctttgttaaatgttaatttcataatattatatagtatgctcttgccttaaattgaatatgcaggaaaaaaattaatttgaaaataatacatttaaaataggtattatttcataaatacacaataacagtaaaaaaattacaaaaattaagttttacgaaattttaaatatatttacagaaaatatgattttttaatgtattcttatttttattaatttgttgttaattttttattaatcgtatgttattttttactgttgttttgatgttattttcctattatttttatgtactttgcttattattttggtgttatatttataaaaaaccataaaaatataaaaaaaaatttaaaaaaatgtattatgcaattatctctttcaaataattgttaatagagagaataggtagaaaataataaaagatttgtttttaattgtattacaaataatttcgtatacaactattatatatataaataaatttgttaaacaaaaaatatattattgttataaatattaataattatgtggat

SEQ ID NO: 110498 - DNA, 11379 bp, Cannabis sativa
  modified_base (42)..(46): a, c, t, g, unknown or other
  modified_base (1100)..(1100): a, c, t, g, unknown or other
  modified_base (2320)..(2329): a, c, t, g, unknown or other
  modified_base (11331)..(11331): a, c, t, g, unknown or other
tatattaataagtaaatctaattatattgaaataagttttannnnnggcataaaacccaacaagtacgacctctataccacatgcactaagtactcctcccatgctagtgttggtaggctgaactgtactctcaggtaccactgggtattgtaccacatacgctgagtactcacctcgtgctagtgttggtaataccgtgacatacccttaaccattatacactgtaccaataaactttgtatcacaactatactaatgttggtagtgtataacaatataaccagcatgcactcacatacatacacacatacatatacatactttatgctaatcttatctcattttaagattcaagtgtgccggttgacttgaatggaaaatctcgtgttgaacagaggccctatgtcatattcacataaatgggtaaacaacttggataaaccttctcagaaacctaaagttaaaaataaaggtaaccctatcgataaataacatggttatgctctaaattttgagaaaaatacaaaaattagggttctggtcctgcccaaaccaacaaaccagattccccaaccggtgaaccggttccttaggccctacctaggaaaatggttaactggttatacagaaacggttaactgattctcttgtagaaaatacaaaaatccctaaaactcaaccaactctacctcaaattcagccaaaccttccaaaacacctgtaatatcatcccagtgtaatttccaagcaaaagtaacaagaaaaacacagtatgccattgttgagtcaagattgagttctaataactcaaacttgctcaacctcaaaatcatccaacaacaacagtctaatcaagcataaaacatcaattataacctgtagaaaataaccctaatcgaaaccttaacagtacaaaccctaaatcccaaattataaccctaaacctatcaaaactttaacaacatcaagaatagggtttctaggatttacctttactcaaactacttcaagacctagctgaatctttaaagaaatcactgaaattgatatctctacctctgattttccttgaagccgaaaatagagagagagagagagngagagagagagagagagagaccaagattgggttttctctttagttttcttgaattttctatttgaaaagactatgcaataatgtattattttattattcttttctttaattgaaaagccagctgccaataaaaggacacctatttttcaaactttaaattccaatactaccctttccttaatgcataattcaatgaatgacttaaggttaaaatagtccaatactataatctctcttaaactcaatactcaaacttaacatatactataactctaatggccatccgtagcattttctatcgccgccgagttaaaatcataaaaattacatatttcatatttaacacaaacaatcctcttagaatttagtaaaatttccagaattgaaaaattttaactctaatacccatttttctaaaatgggactcagattaaagtatatatattcacatatagtaattaattaataataattagtgtctattaccccactaatccatatctaaatcatgcatttattacacaataagcgttagattatgcaatctccaaagcccaaactacccttttcttttggcttccacatataagactactttcaccgatttattttgctttgttccgttgagcccactaaaaccttgcaaacattggctattagttgataattgtactcttttcccttaatttatgtgggctcctttatttctttttttattataaaatttagtaaataaataaacagttaattctattctcttgaatttaactattttacatattttttagcttaatgaatagtagctaaatgtacaaataactattcattgaactaaacatattttaatactatttttttttaacttttctatatgtgtaatattatataaattattaatataaaataaataaaatatagtaaaaatataatatttaaatcatatagagaaaaaaatacaaaagctgatgtattataaaatgtaaaagtttgagataaaataaatgaagtggaggttttagtaatgtattttaaagaatagagtgaaaaaaactcttgggattgctctaaacaaatcaatcaaatcatatatatacaacaaatgtcacttttatcagcacagttcgccactgcgctggtaaaagtaacttttaccagcgtattttgcaaactgcgctgacaaaaaggtttataaagttttaccagcgtacatttgcagtggnnnnnnnnnnacttttaccagcgcatttacgcgctggaaaaagtcatttttgccagcacttttcatttgatgctagcaaaagttctaataccaacgttgatttggcaatccccttttgccagtaaattttattttaccagcgtaataccaacttttgccagcacaaaaatgtgctggcaaaagtgacatttattgtagtatggtacatatatttgtaataatttaaacaaataaaaagaattgtcacttaagaaattggagaaaattatatatcatgcaaaccataacattaatgtatatagctattagccttgaagaataaccaaaacattaatttatatatatcgagattaatttattatgaataatgttgtgagaaatttctttggactactagtgggtgagcttagagccaaagcttaataaatactcgtacgtatgtatgagtactatataaatatatatatatatattatttatataatttgtaacaaaattacaaagcatgccgactgaaccatgtcatcttgtgtctttagttctgtccactccatacaacagcattgcaaatttgcaatgaggcaccctatcttattataatttagttaactattttttattagtgagagacccaatattaaattatagctatattatacctcacagtcacaaggtgctatagcaaccataaatgcccctctaatatttctcatttccataataatatattcttaatgtatgcttaaattaattaaactatatatagcgaaagaacaaatattattccccttgcattatatgtataaaacgacagaacctgccctattctttaaggagttacataatagtattttatctgatcctttttcattttttatataacaacttgataatatatataattaacttactctaatattttttacgtgtcttttttattgacagaaaaacctaatatcctttctccaattctattatacttttgcattagttagaagaagccaaacccattaattaataagattatttcattttttttgtacgttttaatttgtctcagaatatcccttgacgataaaaatggagctaagctgagaagtggagcagaacaccttttcagtgtattttctcagaagtggtatatattgccaaacaatcgtatttgtgtaatattgaattttattttaccatataaatgaataaataaaaaaaaaaacatgttttcgaactttcataatagatatgggagctcatccttttgttcagtataatacatctatctacttttaaattatttaattaatttccatttaagagccttttatatcagaattccaatctaccaatcctttccaaatcctcttggtacttatatttccaataattttatatcatcttatttgtactcatcaagattattctaacattttatcatgaaattatgatcatcattttattcttctgattgcctttaattttttttttctttttgaaatattataggagatagccttggattgagaaatggaagatgatgatcgttacataacagctcctaccagccctggacttcatccttcctctcatttactcaacaaaggtaagtaaatattacacatcatacaaaaaggcaaaaaccctatatattagattatagttaattatattaattacatgaacaaaagcttgatatatataatctctatatattactacaatatataagcatatatatgctatttagttaattctcttgttaaatttatacctgtttgaatcttgttaatttttgtttttctttgataagagtcaacaccttctttataaggttcctttttcaatatatttacatatagggagaaaaataagaaattggaaaaaagtgttaatttagacagctatgagaagtaaaaataagagatagaatataattttgtgagagaatagaatgtttctacacaacatatattgcatattggtaggttaattttcttccaaaataattttaatgggctcgtgtttaattaagatcctagggtttgaagatatttcaatgattaattttaaggttgttttattatgttctagctagcaggtcaattaatgggagattcccttgggaaatatactttaaattttttaatatattatatatataatatagttatttggtaaaagggaaccgtggaaaaaaataattgcaacggtactctttgaaaaaaaaaaaagacaaaagtagttgttgctactgtaaaaaaatattgttaagtgtattggtaaattataaattttaaggtgttttataagtacaagcttgagcttaaaattcatttaatgcattcacatgtatgttttttaatttaatttcgatattgacgcatattttggaaaaaaaaaacagaaaactggtcaatctgtaatggccttcatcatgctgcactgagtggagatttgaaaatgggtcaaaagattttagacaaagaagttgatcgaatttctcgtacaaaaacagtgaacgcagcaattacgagtgctacattggagacccctcttcatgttgccgcaggtgtaaaacaatccctttaaagctacatttttaaataaaaattcaaaatttggtaaacaaactttagtatttgtcaaattcgatacatattttacaagagattacaagaaatgtcacttttgccagcacaaattgtgttggcaaaaaaagttagcaaatcaatgttggtattacaacttttggcagcacaaaatgaaaaacgttggcaaaaataatttttcccagtgcgcaaatgcactggtaaagttagattttaaccactacaaatatgcgctggtaaaattttgatctttttgccagcgctgtttgtgaaatacactgataaaagtgacatttcttgtataagacactatagtagcaagtgacagccgatactactttagttatcatatagctattaattggtatttttatgtttgaaaagatgataagtgctataatatatagtgatcttcatgtgttggttgcaggtgcaaaacaatctaagtttgtggaaatgttattgaaagaagatggtattgatccaaccttaagagacaaaaaaggtaacacagccttttgttcagctgttgtagctggagctatgaacatcgttcaaatatttcttcatcctaaaattatgagacgtagtgagttcttgatccatggaggccaagatatgacaccattgttcatagctacgagctttggacatggtgacattgcatccacattgtataattgctatcaacaacaaaatatttacatggaccaaaatgagagatttggtatatttttcaattgtgtcaacaatgatatatacggtacataaatctaaacccaatttattacctgatttttaaattatatatatgatacaaattaatcaaaaagtcttgtaactttttatttctatgttatttttttgtaacatgactgttgttttgcttctaatattaagctatatgaaaaaaaaaacaaaaagaaaataatcaagacaaacaaacaaaaacagtatttaatttttttagtacttaattaattaaatatgatcacttaattattatagctgatgtcagttgattaatgaagtttttctagttctgagatcccatcacaattgtgatttgcatggattagtagttttatgaggctagccattttcctaaaaaaaaatgttaaaggtcacttaacttgttgccaaacactttattcttttaatttgaaatgtacgtactaattattaacattttcaatgtagatttagcaaatattctgcttgaaagtgaaagagaagattcaactattgcatggatgtccgacgactttgaagttacatgtacagctttgcattacttatcacaaaaggatccttccatttttgcaaatgatcaaaatccaggaataataagtaattctctctttccttatacaatttaaattacatatatttcataatgagtcaaactaaatataacttaatctgaatgttctcatacagtcttcccaggaagttgttgtattgtctcaaaacacctttacaacctaaacatcgcttcttgtttgaaaaacaagcctaaatctatttactaatttttcgcccacctaattctgttcctaacatcatattttacaattgtatcaattgtaaaacatttagaatttgacaaaatttcatttcgatttaaccacaatctgtacactagctagcgctgcacatgcagcaaccaccaccatgtgcttgctcttcattgctttcccttgggcaagccatcttatcacagcatgaatatatgttgcatttgatctccattccaaccaacctagctttaagttcaatcaaacatctcatatagtaaattgacaagtaaaaaatacatactcaatggtttcatcctcattagcacaaaccataaatcttagatcaactactatattgaaccagcatgaccttatctttgtgtgcagcctttgtaatactgccatgagaagttggtgtggcgacaattttaatttgatcttttatagctacaatgcatttctaataccaactctctaagggtgggattttgtaatccctccattggagatgctctaataaaattcacctttaattaaaaatacatggtgttgccccctcgcctatatttagttccatgcataattggagtattattacaatagaataacctttttcactattagtggaatatttatttcattttaaaataaaaagaaataacattccaataaaatttttattattattattttatttatttatttatttaagaagaaaactccaaactccgccctaaaaagcaaaagctcttaaaaaagagaaagagggggacatcattaaagatttatggcatcagccactagataatgatgaatacaatttgggtgacctggctaccaaactttgttagtaaccatattatggaagagagccaaattacaatgaatgtctctaaaaattaagcctagtgatgagtccaaaagaacaatattgttgatcttgttaaccacattaagatagtcaattttaaattgaacattatccaaaccaagaagatgaaattggatacatgcatgatgaagagcaagagcttttgcagttttaacttgaaaaaagccaaccaagtgctagatagtcgaggcaaagacaaccccatgagcatcatggataaccatacccatgccacaaaaaccacctttcaagtctagagctgcatcaatattgaccttaaaacaactcccaagagaaggttcccaacaaggcataataagaaaagatgaattcgatatgtgatgcccaagaaaactccaatgattagtctctttggaacccaaagaggcttctgataatcacttaaaaaagcacgagcccaattgaccaccaactcagtggatatcaaacaattttatttctcccataccaaactctccacatgataacaaggattaactccaattgagaattaggcagtggatccaaaataagatagataaaagaaataaaattagtagaagtgaccaaaggatctccaaggctaaactcacaaagttttcgacattgagaaagagaagagcatccccacaaagcatgatgagtagtctcctcctgggtgtcgcacaaagggcaaaggtcatcagtaagcataccatacgtattcaaattaaacatggatggaatccaattgtgtgaaatttaccaagcaaacatttcaacttttgggggaagatgaagactttatagtttcttccacaatctcgaagacccttgagaagtagaaggtctattgtgctccaacaatctagtagcaagccaggaaccactcttaacagaatagaagttagttgaattatcaccccaaatcaatttatcacaagatgggattgtcgaccaaggggttgaaagaatagttgtagcatcatcaagcaaaaaaatcccatgaatcatataaatatccaaacacccagattagattgcaagcaatccaccattctaccaaccccgagaaaatttggagacaatgcacagaagccattagtcaaaggtaaccagtgttcttcataaatatcaatctctttaccatctccaactctccaaatagccccaacgcatcatataattcctttctccataaaatattttatgatacaaacacttcaaaacccgagccgccaaggaagaagggttctaatacaacctcaaagcttgtttagccaaaaggattttgttgaaaagtcttaaatcctaaaacctcatttcaccttcatccttatgccaacacaatttcttccatttgcaccagtgcattttcatcttcacatcatcacccccaccaatatcttgcacacatgcaatgaatatttttcacaaaacctctcgaaagcttgaaaagggaaataatataagttgggatggattgaatgataactttaatgaggatctctctaccaaccattagaaaaatattagccttcttttagatacgatccaggatataattaattaaatatcgctgacttagttgccccaacaaaataaaggggcccaaatatacttttcgtggcactcaacccccaccaccccaagagccatggtcatcacaatcttattcgcctcataaatattgggacgaaagcagatagctaacttctcaaagttcacactctaaccagaggccacaccatacgaagacataagaagtttgaatctttcacatgccaaaataatagctttttttaaaaaaaaaaaaaaaatgatactatcatcagcgaagagtagaagagaaataatcaacctagacctatcacaagggattcccccaacaaattattatcagattccctgtttaccaaatccctgaagccttcagcacataatcaaaacaaggcgacatgggatcaccctgaaaaaggccccttccaggaagaatagtaccataaatgtcaccattaaaagaatagagtattccacaaagaaaatgcactctatcaccttaccaattcaactctcatgaaagtctaacttctgcataatgtgagccaaaaaagaccattccacctgatcataaattttagacatatcaagtttaatagcactcatgtcatcgtgtttttttttttttttaagtgtattaatacacttaaaaccaataaagacattgtcaatgatcaatctacaaggtaagaaagtactttgctcaaaggataacgcctgagagaacttttctcattctattagtcttttttttttatttaagcgtttatatattacaatcatatttacttggaactcgaacacaggacctccaagatacacacacccacctatggccacttgagctagcctcaagtggtttattagtcattatcttagtaataattttataaattgccttagtaataatttttatattattatttttataatatcaaattttcttacttcattctcattctcatttatattatttatatttttatatttttattcattctaactaaacttaaccttggtactttagaataaaacagtctttagatgataaaaatagtagtatttggctaaaaaaagccttctttacagatttgaaaaatagaaaacataaacttaattaattaatggggagcaacctatataagctttaattcttaaaattaatatttcctaaccctagagaatatattttttttcctaactaaatcctaccataattgctaaacctaaaattttgttaaaaaaaaccacccatttgcatggctctgcatgcctagcctagccttcaatctctaaggcgataccttctgagccctaacttggctcctacagctgtaaaatcaagacaactataacatcatcaacattatatttacataattaattactttcccctttttgatctaattaatactatatgcacttattctaataaatatatatacacttttttgtctatatttcttgtttctaatttagtgaataattataaatcaattaatataaaatctcttctttttatagatttcatttcctcaagattgttagggagaccatcaaaggagataccagctcttaagttggtcaaaacactttggaagcgatttctaatacatcataattacgattatgatagagtttcaggatttataaattacagtgtctttaattttttgactgaagcagcttaccaaggaaattttgaattcttagtaggaattttaagtttatacccagaagcaatttgggccaaagattatgaaactaaatatacaattattcaccatgcaattgtagaacgccatgtgagaatatttaaattgatacatgagattggaatagcaagaagtgtgataaattcttttgaagatgatgaagatggaaacaatttattgcatcttgctgccaaattaccctctcaatcaagacttaatgccgtctcgggagcagctctacaaatgcgacaagaaatcttgtggtttaaggtacaaaatatgcttaacttttatataaatatatatatgtatatatattaatatatatgagagaattttatgagtttaacttttattatatatatatgagagaattttatagtatgagttttaacttttatataaattgactacaaaatatattaccattttataaaatatcacttttagttaaaaaaaaaatatttatatataagttatcaaaaaaaaattagccacatcaagtattaatgtagttaaaaaatatatttagtacaacaaattataatttttgtgactaaaaaatttagttatagattttttaatgataacataagaatgatataatttaggctaattaggattgcctcttgaacttttacatgtacccaatcatgccccctgaatttgtaaagtcgttaaaaatgctcctgaactattgaaattattagatttaaggacttttttccaattttagtaanaaagtctaacatggataaaagttaagaggtcataatttagtacatgtc

SEQ ID NO: 110499 - DNA, 1006 bp, Cannabis sativa
  modified_base (956)..(979): a, c, t, g, unknown or other
caaagctttgccggcgcagttagggtacttttgctggcgcaacaatgcgccgacaaaagctggttttcttgtagtgttatgtcgtgttaagtctaaaactcatatttttttataatgtgccatgctcgtaccaccctaactcatgctaaattcgtgttgcattgaatagctcaaccccaaggtaaagctttatctagctaagaatattgtctaggttaggggccttgtggtgtggatgtcaacaacttaacatgcacacccatcgtacttccatgtaatattgacaaaaagaaaaagaatatatttatactagaataataattataattaataattggaaaatggttttggagacccaaaacaagagtattttttttttttttgagaagtgaaaaatatcatttttattatttctttttttgctggaagaagtgaaagtattattgcttttcaacaagtagatataggccaccaaattaacattttttccctttaaaaaaaattgaaaaaatcactcttcccaacaaggagtacaaagctctttgccttttggaatttatttattatttattattattattatgttgttgttgttgtatgattcacttgatccaaggcaaggcattaaaaatctaatgatacttgccttattaaagaataactattgtttttttctttgttgtttgtgaaacttaattattaaaaaggggtttagtggtatatgattgtcttcctcccaacaaatatattttccgcatgagattctatgcaccatgattggctttgactgctttttcttctatggaaatggaagatcttatttttgactctgatcatatatagtcccatctctttctttctctgcaccttatgaaatttcaatgctactagtatagtctttcacaatcacaattgtaaaagtcatacattaaggactcgtttggaacgccgtattnnnnnnnnnnnnnnnnnnnnnnnntatattgaattggattatatatcatat

SEQ ID NO: 110500 - DNA, 1904 bp, Cannabis sativa
  modified_base (1812)..(1812): a, c, t, g, unknown or other
tttttgggtttaattattgagtttatttgttaacgggagatcaaacctaatacaagtttttttttaatagttcaaatattgatgattatttatatttttattctattctattttattatcccaaccaaataggaaaaaaataattatttaagtgtttgtttagttttatgataaattcaaccaactgtgtaatgttggatactattttgtaatgaattatcgaaattgaattacaaatcacttgattagctattttgaacgaactaaaaaattcaatatacgcaataattaatacataggtgtttaaaaacaaaagttttaaatattttttttttttttttaattagaagaaaagggatggtggtgtcctcaaatcactcccattagtttttatattctataaaatatttcactaaaatttaatttcaatattttatctctcacatttatattacactataaattaacttctttatatcttctttatattacttaaataatctatttttctaatataaatacatatagtaatatcactcacacatattaaagtaaatatttaaaaattaatatacttaaaaacactatttataagccaatttcttttaagggtgattagcagtaaaactatctaaattttaagatttggtatgtcaaaccccctttattaaatttttaagggttaaaccctctaaagtttacatgtgttttggtttttaaaattttgttagtgagctacactgttaattggcagcatagatgtttatgtgtatatttagtgtacacatgatatattataattgctccccatatttaaattaattaaaatattataaaaaattattataaaatttaaaaagtatattaaaaattctaaaaaataatttttttttttatttttcttcttcgtttcccctcagatgcacgagacctccctctttttttatgagctctagccaagcccaggtctaccaccttcggctaccatttgcccaggtggatatcgccatgaattttgcaacctctaaaaccttactcatgtttgtccttgtcccgttcatctcagtcgtagaagaaatggagcctctcgctggctttaattgtgagtctatgaccccgcctgctggccgaagaaacttaagaactctggtcgccaaaaccccatggttcttcctttctacccctcgatctactttctccatgtgacaagggagttgatcttctctctctgtgcgataaaggactcgtcccaccttcttcgagatggcgacaaaccaccaccatcggcaacaacctataacggaaccccaaccattaaatctagaactccaaaatgctaacgtctccttttcatttctctctgtctctttctctcttcccctctctcccctccctctctgtctctgtaacgccctactagtttaggcgcgctataatgcttttcttaattactgtgctgacatttgctaatcaaaggatttaatataaatttatgtataattaaaactttataataataatatagtttcataaataaacatcataaatgtaaactgtatacaaaacaagggattccaaaatctattttcaaaaaatgaacataataaaagtgttgcccacgactaacaaatttgagcctatattatcttgaagattcaaacaatccaggtctaatcatccagatatgtacaatctttactgagctctaatactcacatctttacctacacatgaaacatatatttatgagtcgaaagactctgtaagaaaagcataaaatataattatataactgttgggattttatgcccnaaataaaactcatttcaatctaatctgatttgttatcaatataagattagaaatcgtttatgtttacatgtagtttcatgtttatggtttaa

SEQ ID NO: 110501 - DNA, 14198 bp, Cannabis sativa
gagagagagagagagagagaccatggattgatagggagaaaaaaaaataggggtcgatgtactggttttggggttcaggagaaagaagaagaagaaggagagaacaaggaggaagaagaaggagaggagaaagaattatggttctggttttggtattggtattggggtcgaatcccagcctaggtgatcggccgtgcgcttggccatccccgggccttccgcctgcactgagagagaggaacaaagagagaggggaggcacttgggatggatgaagagcgaaggttttattttttcaattcaaaagaagaagaagaaaagaaaaaggaaaattttaatttattttttaaatattttttatttttatatttttaaattattttttttaattattaatattatgtggcctaataaaatttcgccacgtgtatctttgtgtacacactgataagtttatttggcacttaataactaaaaattaatagaagaaatgctaactaaaataattgtaaaaattaagaactttaactataatttttcgaacatgaaagttatatcgtaccaaacttaaaaatgtaaggaatttagtcacaaaataccctacatacattatcactctataattaagtttaagatcaaatgtatctaaacttttttagccatatatttatttgtcaataaataaaataaagtgaatgaccaacataataattggtagatcaaagaaaatagaagagctcactcgagttttagttagaaaatgttcaaatgcatgtgggtacagcaaagatgactttaactcaaaataattaacaccacactttctcttcttacaactttgtagtttgtatcataaataaatgaataaataaggaaatgaaaaataaataaataaataataattcctctcattctatcagcaaaaaaatcaaatcttaatctatcaactttgcaaaagttgagctcttttttccccttttaatgatcgaacccacgggccacgaatgaatgtaaaaaaaatatatgtttctcagaaaaaacagtaataatattccatactattgggttttggggtatgctgctcatttcaataaaattgtaattttttataattaattttttttaaaaaataaacaatttaattaaagaattttttatttttatactttaaaatattttttgttttatttttacaaaattctacacaaatttttttatagtaattaacgaaacaatttaaatcgcaattaaaattcttataacaatttcataaaaaatatcggagaaactactgaaacaactaaaattgtaaatttaaaaaaaaaattaaaaaataattatcgtttaattaactaaaattgagaagaaatttcgtagcatctaaaattgaaaaaatagtagcaaagaaaattggattaaaaaaaataattaaaaaagtgtgagaaatgagtcaacgacactttggacttatatagccatccttctgtatctccttgggttctctttgttctcacccaacccaccacaccccaaaacagtttttttttttcaatttcatttctttcttcttcttcgtccttcccagatgagccaattgtaccacttgaaattccctttctaccctttccttctccaccaccgctttccccacgcgccgtcgctcctgccgtcgaatctatgtatagcaagattccgattatagggtttctttgctctggattgatcctcggagctggataaatgctgctgttcccgggaattctagggttccatgccctcctcttcttctctgtcttgctcgccttttctttaattcggcgcaagtggaggaatgccgccgctaaggaggaggaggtgttgcgccttctcgctatggcgtcggaggagtccgccatggctgaggtcgaagctagagctttctgcgatccagttgttgtttctatgcctcatcaatgcgttgtctgttattgtcctaccaccatgcgatgctctcagtgcaagtctgtcagatactggttagttcttcttctatttctaaattctcttcaatttaaggatcaatctttggaaccaactgtatatttatgtgtatacgcatatatgtttatattaattccatgatagaaaatttatggctgaggaatttgaacggagaaacaactttcacctttatcattatgttttcttttaattgattttcaagctagtgaaaaaaaatgcaattgaaatattgggaggaaaggacattcgtatctcaattatagattcatgtgatattgaagggtttactgatgatgtgataaaaaagatagctttctgtctttgtaatgattacaattgtggggttcagaaaatagagggctttgtaagagttcaggagtgaacttttttggccgtttatttcaaaagtgctgagctgtttcttttcctacttatataatataaagtttttattcaaaacactgacatctcatgattcagtatgttagtatgtgacaattatgtcaaatggattcaacttacatgtatttccgattcaaagttttgatttttgtgatgatgattggataaattcttctgtgaaagaaaatgcagttttcgattcaatttgataaatactgtttatttggttacatagtttgggagtccccttttattctatttgggtacatgtttattaggagaagaaattgttatgttttgatgctgagactcaactatgttgtcacggacatgtgatctgatccagaagttgtttgatgattacttttgtgctctttcataaatttttcattctcacttttcctaccctgtgtttgttattatttatttatttattttagtttttcacttctatatcttgtttttagttctggtaagtgtcaaatcattcattggagacaaggtcacaaggatgagtgtcgtcccccaatttctgtaatgcatttcgaagataagagtgacctttgtggggaacttgactcttttcatggtaatgatatttgagagaataataatctgtactattttcttaaaagcaatatgatggttatactaaatgtaagtttttatgcaggaactgaaactggccacgctgcttgtgctgatggtgaacccttaattaatatttctgattctgtaacttatgacagagtggagaaacctctttttaatagtaatagctctgatctccttggcactaatgccaaagttaaagatatggatgttacaaattcatctcgctcaagttctgttagctcggcaacttctgctgattccatatcatgcacaaacaaagtaagtaagatggattctagtcgtggtgatgggaagatgaagtcttctttgcaactaaacaaagataagacagctaaacatgaaaatgttcagcctgcaattaatttaagcagtaagaagctgacagagggaaccccttcagtagaaaagttaactaaagatactgctaagtctaggagatcagtatctaaagatactgaccattctttgtcatcagttgcttctgctggtcatccatcttcaagcactggtgagcattttgcttccaattctatatccacaaagggtgacggttttcatgctctgccagttaaaagtaccagtttcccaactttaccacaaaatgctcgtactggtttgaaaagttccatgctgaaagttgtacagcagtttagagcatctaaacagacgaaatgcaatacatctacccctgggactgagattgctggaaagcataaggttatttatcattttattgttttaagatgtgatttttttttttatctttgcaaattcctgcttgtaagattttggcattaatttagttgctgttgttgtttactcagctaatctttccatatgatttgttcgtgaaactatacactgatgacatgatgattcttcgtccatttggtcttacaaattgtggaaacaggtaatgtagagatttcgacttcaaaattaacttatagcctttttttttattattattttcaatgtgtaggatatacatttaatgtaatacatcttcaatgcttagtaattacaactcttcaagtagcttttgttatctgtattcatatgacttattacctttcatcttctattttttgtttttgacattgatttaagttcggttaagttgcaatctgtcaatatttaaaaaatttggtgtccaaggtttttgattgtcgcatattgaactactagtacacttcaaatttacacatacgacagttacatctaaagaggatgtcttttttctggtgccacacttgctttcagctgcaaatatttctagttaatgattaataagtaatcataattgctggccattttcctctgtcaatacactcgttttagctaataatatgacaatctctacatttatacagctgctatgccaatgccgtgctccagtgcttggcatatactcggccacttacttcatattttcttcaaggactccactccaaaacctgtaagttccctttcttggcttctacttggcttgcatttccttttattttaaaacgaataaaggatcacacacttgacagatactgtagttatttcttttattttacatgttcttctgttgtgtacaggtggaaagaaggactggtgttttatttgtgaatttcagcatcttatttataaggcaagggaagggaattccccactgtctccaattgggatattatccaaaataaataaaattggaagtcatcttggtcatggtagggaagaagatgcccatgaatttttaaggtgagccagataaaactcaaaagaccaaatgtattcagttacatagttatttctgcccctcaaatgcgtatcaagtaataagttactaagattgcaggtatgctgttgatacaatgcaatctgttttcctcaacaatgctgatgccacaggttctttggctgaagaaacgacactagtaggaatgacctttggtggttatcttcgatctaaggttgtttctgactctgatagttcaggaagttctgaatttttgaagtatcatttcacttgttgccctctaaatttgatatatgtgtgtatatatatattggaatcttatcattttaatttgcagatcaagtgtatgaggtgcctaggaaaatcagaactttgtgagcggatgatggacctcacagtagaaatagatggcgaaattggaaatcttgaagaggctctttctcaatttacagccacagaaacattggatcgagataataagtatttttgcagcaggttggttaatgtgattgttatcattctgcatctaattttgttatcatgatgtgagcataacgaatgaaagttttacttgtaatttgacctttaggcaaaaaattccaactcaatgtagagtttaagttgctttcctttatttcttattttaagtttattgatattttcttttttgtttttataaagatgtaaatcttatgagaaagccagaaagaagttgacagttctggaggcaccaaatattcttacaatcgtgctgaaacgatttaaggtattttaataatgacatggcccttctttgaccttatgacattcacatatttttggatgcttagtttatttaattgtggtgaattgcagtctggtaactttgagaaattgagcaagtccgttcagtttcctgaggagcttgacatgaccccatatatgagcagatcaagcgttgtatctcctctgtacagtctttatgctgtggtcgttcacttggataccatgaatgctgctttttcgggtcactatgtgtgttatgtaaagaatactcggggagagtggttcaggattgatgacagcacagtatgttccttatttcatgctctttcctttgtttacacgtcttttttccctttaccgagcttctatctgcatgagatactatttcgaaatttaattggtaatacgaaatgatattttaggtagtacccgtggagctggagagggtcttatcagaaggggcttacatgcttctttatgaaaggtaatacctttctacacttgctctttgagcttctaagttttcatgccatcacggacaccttaatattttgatgttcaggcactctccgcgccccccagccctactgggaagcaatatggtcaatggtggtaagtttaagagaaggaacttggaagcagttccttccagcactggcaaattgaagtcaagatccaatcccatagtgatggatgctgctgccacacaaactaagttcagtaaaattgctaatccagatagctcagatccatatgattggagagcaaacctaacccccagatttcgaagagtggattcatcaagtgaaaattcatctattttaagttgctcagatgcaagttcttccagcactgtcagcaccaaggactctggcagtacagatgacttctccgtatacatatttggaaaagaaggaagtggcttttacagaccatatgaacagtcaccgggtggcgtggcatcatcatcatcttcttattcagactttgagacagactcaaattgcggaaatggtgtatggaggaggttgcctacccaagggagcagttgggacagcgaaagggaagggaactccacaattttgcatactgacactaataaacaccgaagaaaatcaaccagccaatttgatagtaggagtagcagtagggaaaccgagttcgaacatgtttcatgggcaaaccctttcgatgttagagccggtgtatcattacgaagagtaaatggagaaagatcagctcaaacattttatgaggtttgagctgaaatgtaactagtctttaagattattattattcttgatttatgttgtcttggtatatatattagcagcctatagcgcccactactccattgtgcggcctgcattctttattttcaacaaacaaatcaaatcactaaaatctaccccgttgccactccttagtgcatagaatcaacgagagggaaacgcttttaatgtaaataagatattatgggaaaataaatgttattttttattttgaaatatttttgtttaaaagtgtgtttagaaagtaattaacgtaacaatttgaaagaggaaattgagttctgttgttttctcaaagattttggttatgacactaataaatgcaacaatccgaaggaggaattgagttcctcatatgaagaaataacccatatctaaatcggtatgtgaaggtcgatcaaaatcaaatggttccccatcaaaacaacgatgagatttatctaattccacccctagtggaaggacatttggaagtcattattggaggacttcacatagctggagataagggaaaagcctgagaaaggtacgcttgtacgctctagtatgagaaaaaagaagactggccatggaggagagaactcccaaacattcgtgcgaggatgatacacttgtatcgttcagtgaagtagatgccactcatgttcattatctgcacaaccctctggttgttgaagtgcaaatagcgaacttcaccgttgcacggagcatgatagacaatggtgccttatcgaacatcctgttcaagtcaaactataaaaagatgggcctccaactcaagaatctagttccgtgcgtgcaattgatttatggcttctctgaccatatcatcgcacccctgggagtcgtttgtctcccccttaatatggggaaggcacctactaacaccacaattatagcacagttcttaattatagatgtgccaacaacctttaacgtcatgattggctaaccagcactgtatgacccaaaagcagtaacatctatataccacctctgtgtgaagtttcctaccaggaatggggtagggtgcatatagggggatcaacagataacccgctaatgttacaacattacactaacaaaggcgaaaaaagaagatcagttcagccaaagctccaaggtcgaataaactgagaataaataagaatatgccaaaggcagggacaacgagatggatccttgctttggggaccctaacacatgaattaggctagtggaaacattagaagaagtacagatcgacccaactatgccgactcgaattatcaagataggacgaggttgttgtaagaaataaaatctgctttaattaaaattctgagagcaaacctcgatgtattttcatggtcacgtgatgacatggttggaatcagtccatccgtaatttttcacacactaaatataaacactcaaaacttccgtccagtacaaaaaaagaggagattgttagacaaggaaggagcacgagcactcaaagaagaggaagaaaagctccaagacaacaagttcattattgaggcattctatcccgtttggatttcaaagctccttctacttctaacaaccacactaaactcactggcatagggtttttatggttctatgatttttctacttctcttcttctgttactcgaaaatagggttagagtcctaagtatttttcttattttcctttcctgttctaacccgaaaaacacccaaaaaaagcttactcctttctcagttcgaaaccaagaaaagcttttagcctaaagcactcgaacttgaaaaaaccaactcaaaaaactcactgctcaaactcactaaaatcgtaactgaaatcaaacaacatacacaaatacaatattagaaataaaagagataagagaatacaaacaatgataatataagacaaagaacacaacggatattgtgtctatgcaattgtgtttatctaaggatatcgtgctgatgatttgtattgttatacattctaattacactaattaaatttattttttatttaccatgtagcaatttatgatgtttgctcatgatcagatataaaatagagatataaagatgcaatgccaatggttatatatattttggagaagatgcaaattttgattacttaacaacactgttaaaattaaaattttatttgaataaattctattaaaaaaaacacaacattctgttaaaaaacacagctaaaactgttaaaatacaacaaaatccattacatataattactcattttatcgtttcactcactccacgtcgttaactaaaaataatgaggtcaacaaccaaaaaaaaattataaaattaatatcttaacaaacaatttagttaaaaacgacacgtcgtttgaatgagaattcagttgtaatagtagcgacatgaggtccacccaccacggcatcatcgaagaagaagaggcagttgtgttggagaaccatgccagtagtaaccataccaatacccagttgtcgttctcattaccactgccgtaagctatttctgttaactcaaactcacacctcttctcctcttcctcccactcccactacacctctcttcgcttccgccgtagccaagagaaccatgctcaccgccagcagcagtggcggtggtgcttttaccacaatcaaagagagagtttcattcgaaaaggagatcaaaaagagtaaattcatcgccattgctggtcccatctccgacgaacaatccgccttttccttcctttcccaggttttgttattgttttctctgtttcttttaactttttttttctttttttaaatgaaaaagcttttaaatgaaattaggtccgagatccgcgtgctactcacaattgttgggcttacaaggtaaagagagtttgatatttgggtttcgccctcaatttttctacatttaggacaatatactgattattttgttgaaaaactataggttggagatcagtatagatcaaatgatgatggtgaaccatctggtacagctggaaagccaatacactctgccattgcttcttctggtattgacagagttatggttgttgtcatcaggtaaggcattgatgataagactacccacattagttgagtacacaatgtttatcatgttacgtgaacgaatttgaagtgagtaataatattttcttggtacaattttgtatattttaaggtattttggaggtatcaaattaggcacagggggactagtcagagcttatggaggagttacctcagaatgcttgagaaatgccccaacttgtttagtaaaatctaaggtattgggttttgattggctttttgtgcatttggatattcatttcaattgttgtttcatgggctagtttcatattgttgttttatttaagggtttcttattataacaaaactaaaagctgcattttttagttattcgaagcctctgtgaaaagtgattggatttcgttaatgactagtttgcttccaaattgtttttaggcatttaatgatatatatgtataaaagcaggtttacaacttactcaaatttttataaccataattaggagctgagaagattggttcaattttctttactctatttttcatttaaataaatttatgaatctggtcactctacagtaaggtagtatgttggtgctcgttttccatccaatagacagaacctttcatttgcatagtcaattgttcttgtctggaatctctggtctaatcttatgcattgtaggtccctatgggggttgaggtcccatttgatcttataggccttctgtatcatcaggtaatcttttatgtatgcattaaagggaactctcctttttttttttgtttgggtgggggtggtgagggttgtgttcgggtttggattaagatttctaaagaatccatattatgcaaaatgtttcctttcagctgcaatcttttcaagttgaagatatcaagcaagattatgaaacagggaaagaaggtattaccatggttacttttaaagctgattttgaccgtgttgagaaattggaggatgccatcaaggctaactgtagtagagaattagttttttacaaacattgaaacagagttagctgtatcttagcatgtgctgtcaaacaatgagaatcgtgctctcatagaatccacaatcttcatactaaaactgtagtgttaaattagtcagattgcaccacttctttttattatacttgtatgttttgtgcataaaacacagatttgtttataaacacatcatatattcaatgaccttttgacaagtttgatttgttagttttgtgagaatgatttgacaagaaaatgcatgcactaaacattgaaataaatttcacacaatatagaccacagttcataaacatgaatcaaaccgatagaatattgccgtacatactacataaaatataaaaacaaactgattgaacatgaagcacaggtatttgatgatttgatctaagtgaggcctactgttttctaaacttaagccacggccttggaagaagaaagaggtaatcaatcccatcccatcttatgaggatagcatagctgtagcagcagccttagaaggttgtagtcttttcggttctaagtggtgttggatttggctatagggttgctgacagttggggttttcagcagtgatgcctatggttaggttgccattggaagcagctatggtgatggaagtgtggccttcctagagatgggaatgaagacaatgctaataatggttgataatatgccttgtcagtttatccgttggtggatacaaactactaatgcttgtatgttagcttaaaagtaagtaaagtaatggttattgcacaccaaatggtaagaagatggagtttttttgttagtaatagtaacaagaactagaactccacataagaaatgttatgtgcaagcttggaacgtactttcgatagttatatcttttgtcttttcttttcttctccaatttttttggcattgactggataataaagtatatgtgcatattttctttgcagtttagtatgaatcctatgataattaaccaatccataatttttattcatagtacaataacaaaaatacaacaactaatctgtaaatggtatacatatccaagccccaaaccaaaaactagatgaaaatgacatcctcaaactgaggcaaaaataaataatacaaacagaacaaaatccaaaaacataatttaaatcactcaactacatgcaagatcatagatagaacatagaagtggcaaatgaaacccaaatccatccatagtatctagtcaactcttcaatttgatggtggaggagagaggaatggaagatttggaatggtgggaattgaaggcattgtcgttggaatagtgggaagaggaggaagtgttaccttaggaattgagggaacattattggctgggtttgtgggaagtgtaggcaaaggattagatggcagtggagctacattgggttttggcaaagttggaagagctggcaaaggatttgagggcaatggagcaatgttgggctttggcaatgttggaagagtaggcaaagggttagaaggcatgggtggcatatttggtttaggtagtggtggggctgagggcaatggaggcaatatggggttgggaagagcaggaattttgggcaatgccgggggtggtgcggccggcggtgtgtctaaaaggtggcgagttgccaaaattggattggttgagagtgataaggctatgattattgatagaatagagaaaatcttgaggaaacccatgttttgatgacaaaaaagacaagtacttgtgttggatatgtcaataatgtatttagtggggagtcttttttcgttgtggagttatatgatgaatgtagtgggttatttatagagaggaataagtacactggctcaaaggtttgggtgggcatgaaaatgagtttgatgggttttggttgcataaattatgagatataacgattggttagttgagcttccttgactaatttgaagttccaaaattttaacaagctagctcaaaagaaattttcatgacttgaactcttatgtgatagaatagaaatagttaaaatatgtgtttgtgtgttataggttattgaactaatcaagaccaaggaaatatatggttggacctaattattggtttgtcaaatactagtgttttgactttgtgttctattttgccataaaaattaatgtttgtgccttaagttgcctggcctcaagagtgtcttcggtaaacaataaagaaacatatgtttatccctagaaaaaaaaaacattgtttatgaaaagcaataataaaccactacgattaaaaaataaataaataaaaaattatgattgctcaaataaagataacgagataattgtagtaagatttgatcttcacatgtgaattgctaattttttatagtgtgtttggtaacactttttctaatcagttttaatcagttttttttttttttttattttaaaatttaaaaaataaaaaatactatccaaaatcatgttctataaaattaaatatgtttttactttttaattgaaaatgaaaattttaaacattttgaaaacaaaaaaaagtcacttttaaaatattttaaaattatttttttatcaatattttagatatagactcccacccctaacctagatcttggaatccagacctgcaccccatcccagaccctaacctagacccaccagaccccgactccagctctggtcctggactcgacttaaataaaatcaacaaataaaaataaaattaaaatttacagaatatacttttattttttgcttttaaaattaaaaaacaaaaatagttacagaagactttttgtttttcaaaagcaaaattttaaaaacaaaaattttacttttattttcgtgattaaaaaatttaaaaacaaaagtattaccaaatgctatcttaatttttaagaaaatcatattttaaaagaataaataaaataataaatttcaaataaataacattatataaaagattcaattatagtaaccttggcatttatttcttgtttctattcattaatcaattccaaatagtaaattagaggagaaggtatacagactactatataaagattttcctctaagagtggtgaacatatgcaagcttaaaagtctacctatagattaaaataaatatctcacaaatagtatttttattatgacatcttttcttttaggtttcaaaagagcatcatagaattaattatataataaaaggtcagtgggagtaatatttattttagggtaaataccattttggaccctgtattttgcaaaagttacagattggaccct

SEQ ID NO: 110502 - DNA, 6591 bp, Cannabis sativa
tactatgataatatgataatgtgaagagacatattatgattgctttttcttcttcttttatcttttaattaattagtatactcatacataaatgttgttaattaaatagaaagtgtggatgaagaaatgaaaagttttatgaaataaaaaaaataattaaaaatcaaataaaatttaaaaatttgagaaaacaaataacaatgaataaaacttgtagaagatagataaatacataaattttaaattttaaattttttggttaaaaaaaaaaacgtccactaacttatttttacttttattacttacagaacactgaaaaaaaaatgttttaagacaaataatttcactaaattttatacccaacccactattttatagttgataaaatagcatgtttacacagtgatgcagtactgtgattaaagtgcccaattaattaaacatctcaataaaactcatttgcacactataaaatgatatcacacctcggaagacataagtagatacaaatcattttacctccacactgagaataatatctatcataaagagaaaaggactacttaagttatgagtaatgttaaactgtaactcttctttgaaaacgaaaggtgtaaaagagaatccttgcctactccattaaatataatattaagagaatcaaaagactagccaatacatgatacaaaacttggagaagacatcttcaaaattttcttctctcaaaaatcgaattacaaaacgctgtatgactcttccataaacattctgtaattgttttttcattttaatttagttctcttagactttttgctggggaaacgttgctgtacttctaaattaacctcaaaaagcatttgcgaccatagcccttcaaatttgtcactattcttacgataactgacttgaaaccagtccaagacttctgaatataattctctgggattctcagtccatacatttcctaacttggcacagctatctatgaacctcttctttaacttggcaagtaaattatccactcttctctgtcctgatgcctcaactctcaaaatgctattaggaggagctgccatgaaatttttgacattttttaagcatggcaacacctgcccatcaagcaaggcataagcaaaggctacaagtctttggttactatcagtaataggtgagctaaatggtgaaagcacccataaatgagggccaaaacttggtatgagataatgcaatacttggtcagttctaggatcgtaataaggtttggtatcttctgagggtgtagagaaagtgcattgagaacgagcatactcgacaagccattcagattttaccctagtcactccgtgcatgtatggtcgtttcgtttgtagtagttcgctgtaaactacaaattcaggggctgagtttgctacagtcgaccaacgatgaaggaacacagattctttaaccatgcaagactggtaccgatttgcacgaattcgttcttcgccttctaatgactttgaatttaatcttaagcgtttagcaactctatctgcccaaccagcacatatagcttgacccaagagctcttcctcatacagtgaaagagggtgtttattgtaggactggccccatgattgttctacgtcttctaaagttccatacgtccatgagaaatcttgctcaagatcactatcactgctatgactaaatacaagccgaagcaactgttttctcaacttggacatttcctccatagttttgagatgtaagcaatagtcatcgcagaattcggttggactttcagcaagctcaaaacactgcagtgcataggctacagacattgcatcactactaggattagagaatttttcccgagacaacttacaagcttctttgagtttcttcttccttaatttttcttgcttattatctgtaattttgttgttctctgaagcatcgaaacttggttcctgctctaagtcatttttattagtacgactctcctcaaactgtaggacaaaaggatttgacaagctcaaagctgcagctgctgcaactgcatatgctagaacaagatttggacgagaatcgcttttcttcttctttattatctgaatgacagtaaggagcatcctagagtgacgaggactcatggggtaacgagccatggcctttcctaaagctgtcagtttaccatcactatcaagtgcctcaagaaccttcaaacaacgctctgcttcaaccagggcagacttctcaggaggagttgggaatggaaaattggcaacctacgaggatacacaatcagatcaccatgaacaaaaagtagaagtggtatagctggtaaaacaaaattttatttgcaccttgtacatatctcattaaaattcatttgcataaacaataagtaacagcttgaatattagaagtatggtgtagaacactaacacaccttatcaatacgcatggatttcatgagaagaacgacaccatcaacaggtacttttaatatttcggccagcgaaaactcatgaaatatattgttgaacactgcagaagaatatagacgataacaatgacctggagcagttcttccggctcttcctgcacgttgagcagctgatgccttacttatccactgaatttcatatgattccatgccgctggaagagttgtaatttttcactttctctcttcctgtatcaacaacatactttattccaggaatagttaaagaggtttcagccacatttgttgccacaacaacaagcctctcgccttctttgacatcttcaaatacacgtaactgtgctgctgcaggcaacatggcatacaggggaagaacacacagaccaccaacacaaaaaccatttctggctccatttgtgctcaccttgttaggattggattgctctaagcaagattcctgattagcaaattcaggtttttgcccattagatttagcctttgatgcagtctgtcctgataaagcatcaaaagcagctttcaatgaatcaaggttcccattatctcccaacacaagtgtggagtcaatttctgatgatttctctcccagtgaattttcattttcaccatcaaattccaagtcactatctgtttctgattcatatgaaaaatccaactcatcctcatccatattgcattgatcaccatcatttaagctaaacacgtcggtttgctcctgtgttgaatttccacgagtatcaaaagcatcattaatctcttccatgcttattccaccaacagatttaatatcagtgtctgttggatcagcctcaacactttctttggatgctttcataatcagttcttttgaagctctacgtagcttttggcacaaatactctacttctctctgcccagtgacaaacaccaatatacctccttgtggaagattcttgtgaatagctaagacttttttgtatgcttggccaatataatccacaatctctgttctttttgagaagtgtgtagtgactggaaactgtctcgtaggaacatcaagcacaggtggaggaacacaaaataacctattaccagaaatgaagtcctccactcgcaaagtagcactcatcagcacaacttttaaaggaaaaacctgattttcaggacttatagtttgccccgacagcattaatttttgttgttgtgcatatattttctgtttgatgatataggtaacacaaataagaaaaaacaaaggcacaaacttaactaaacacaagtaacaacataaacataacaccatacctcacggccttgaatgacacgtgatagcattccaatcagaatgtctgtattcaagcttctctcgtgagcctcatccagaactatgactgagtaatgccttaacaaaaaatcattctgcaaaataaaggatttttttaaaaaaaaaatgcagaatacaatgcttatggtcatattttcacatgtattttactgaaccaaaaaattgcatgcatttctcttctaaaccaatcaccacacgtgtaagctaaaatgacataagtgcaaatgaaaaaagaacagtataaaaaaaataaggtaataaaagaacctgtagttctcgcagtaaaatcccatcggtcatgaacttgattgagcaattttggccaatcttcttgtcatacctcacttgaaacccaacttgtttacccaaagatagaccaagttcatatgccactctcttagcagtggcaagaacagcaacacggcgtggttgtgttacaccaatagcaccaccacgagcaacatattgttttgaaccaaaaccagcttcataaagaaactgaaaagtgcgaaagaaaaaacaattagatgcttggaattttcaagtggaaattcaggtcttgcataaaaatccattcctcacctgaggaacttgtgttgttttaccacacccagtctctccacatataataacagttagatgatcattgatagcttccattatttcctgctccatcatgacaattggtagatccttcctctttttctcaacctcatctggcctggatacatgcactacagttggttttgtattactgagactgacttttgtgctctccattgacctggctggcactaagtcaacctgccaagattcaattaaagtgaaatcatcataaaataaaaagcaaaaaaaaaaaaaaaactagcactattagagttctactgcctcggacaaagcgtataaagcttcacatgaaaagtagcattatttaatccaagtcaatgtttacaatattaatcaagattaacttgtgcttgcagatgctctgttatttcccaagtaaagtgtatctacttgaactgggtgagattttgaaataaaaataatttacaaaatcattaattgtgagtcagcaaattgaaccaaatatatattcagcttgctataaatttatggttacataccattaagcttgcgcttttgccgctatctgcagctgcaggttgattgctcaaaataggctcatcatcgtcaactggatgttgaggggaactcaaagaaacatttgtattattttggaatcctttttctactactgttggctgcatctcattccagttatattgttgatttgaatgtctttcatccatctcagattcacactcactagaaacattgtcatcgtcccttctcgaaactggttgcacactacacggaacttcgaagccagctttggaaacttcaactatcattctacgttttttcttgaaagtttcaacctacaaatgataaactggataagataattgttccatcatgattttgttacattgttaaacatatgcaacaaagacaaacctgaccaatgtttctagatgactttagaagagtatatgcaccatcgggaattgtgtatttcctacaaaattcatcatcaacaagccattcacaagggatgtaaaaaagagagtgtaattataaattctatgagtaaaaaggataatccttactgtaaagtctccaaactttttgttagcaaaagtgctttttccttctcttcctacacaaaccacaagcaaatcattacacataattacaacaacaatccaagtgaacccacatgtgcaaaatgatggaaaatcacacctccaactttttcatcttctttttttgagatttgctcaatttaggagctgggtttgccttgatttcttcacacccctaaaaaacattcctcataagattagaaaaagaaagaaaacactttttggtaataagatcaaggtgttacaagggatataccatgcccttccttttgttctttttcttactttgcaagatcaaagcattgctgtcattatctccaaaactaccaaaagcaagaaaaagtaataagaataacatattgaataatggaaactctagcctcactttggtatgctaaggttctctaattattaataagcagaaataagttacctcaacgtatcttgttcacatgacaagttccgagactgtcttctactttccatatccaaattgcttatttaaatttttaacttattcaacagcgcttgcaccaaataacaggcgacaatcttatgctaaatgcatagacaaatttagcttgatctgacaagactggatatcaactgaaaacacaagtagagaactttagatatacttgtcagttgctgtaagacaaatcaatcttacctatctaacgttatttgctgcgttttgatagaatttttccaaaaaaaagaaaaactttagcagagttgtgaattacttaaaaacaatacatagtgaacagttgcatcctgacacagaaagattcaaccattcgcttactaaaagagaacaatgcatactgaaaaattgcatccacacagaaacttttgccaattgttagaatctgaaattaatttcagcaaaacaataggtatgaaatcacccctacatagttagtttatatattcaaaatatgattacagcacaaaagaaccaaatcagtatattagtttcaaaaccattaactaatgctcttcttctgaactatttttcacaggggtactgataatctcatatctcaattcgtttaaaaaataaaacagagattgatttaattt

SEQ ID NO: 110503 - DNA, 6183 bp, Cannabis sativa
aatgacaccgccaatgacaccgccaatgtgttttggaggagcataagtgccggtgattggattgtagttcttgtaagaggggtgtccgataccatggccgtgaggtggtggcagcattacacgtccaaagccaggaaccagaacagtgccgtcgtgatcaaccagatactcgggttgtttcttgtcaactactgtcttgggattgtttggtacactacgtgctgctgcaactccgttagctaaggctagtaagagaagagaagccaagagaaagagggagcattgggttttgtatgccattttcttaattttcaaccttaagtattggatggatgaagaaagatgaggagaatgatttggtggcagaatgggagagtgtgaactcttcttatagctgagtatttgagaaagttgggtgaagtttggcggtgatttaagaaagagtttctcaaaagtgaggcgattgataatattaaaatgaataataggatacaaagctgaaaaagacagagatatatgaaaagtttttcactcactaattttggagcaacaaaaagagggttgattctttgctaaaaacatgtttgatttgtgatgtggcttggtttggttcatgtcacctaccaagcatactatatttttcttttatctttttgaacatcagctgctcttacggctattaatgaatcaactctacttagcttattctatgtgcgattgctttgcccttttagcaactttggttttgatagagttgggctctcttctccaacatttgactagtatggtgtaagtttaaaataattacaataatttatattaaacaataaatatataataagaaatgttttacaatcagataaactagtaaataaatgtccttttgttttataatttagtttaacttttatagcttttccaagagtaaatttctctatatattatcgaataaaattagtacctaatatttatttagtacactgtaatttaaaatgacacatctttagtgttatcaacgcaattttttaaggaaaatattattttaaattctgtgttttgtaaagtttattcattggacattttgttgtattaaatgactatttaaatcctgtgttttttaaaatggtacaaataaattcgagcttaatttttatctaattaaaacttaataataatatgacatgaaggtgttattaccagattagttacatttttttgcatctgttcatgttaaatattggcttcaggttggttatattgaaaaaataaattgtcaaaaattgaattgacgatctattttgtacaattttaaaaaatacaagtttaaattatcatttaacgaaacagaaggtcaaatcgataatttacaaaatacgagatctaaaatagtgtttactcatttatcaatataattaaattgtcttctattataataattttaagttttaatttaattatttaattatatatatttgagagcatatttataaaatttggacttatataggatactaaagtatgtaaaatgtcaaactaaatatgaatattataataaatatagagtactaaatttgtattcaaataaaggaatgaacactaaatagatatttaatattttttttttaaaatcagaacatcatagataaaacaatgactctaaaatctcatgttgttgaagccttagttgtgaaatagaataacaaatgatacttctctattattttgaaataagattttcttagagtgtataatgccatcaaccataatattcatgaaaaatctacttttgggggtaatccttcaagacattggggtccttggaagaattttgtccacatttcatttgagcactgtcattgtttggttaattctttaacgcattctcttgctaaatttgcactctttcttgatagtgttaaattttggtggcctgatcttgtttatagtcttaatttgatgtaatttttgtgtaaaatgaagaaggagcgaaagatatttaatatttttttaatttaagaaaatagtaataataaaaaaaacaaatttatgagtaacacattttaattcttggacaaatttttgtaaaaatattattataagatatcttaaagcacagtacgagataagaccatatattttaattttaacgagatattattttattagttgtttaatataattattttatatataactacacaaaatatttgtaatgaatatctccttcaaggttataattatgcaaaatatagaccattaatacttgtgaataatttaactcctcagcgtttcaggagtatgtatatctaatggataaaggcataaattttttttttcaacaatgaacaaacatttcattaaaaaaattaaaaaagagtagtacatcatgaaaaaaagatgaaaaaactatccaaactagttcattatctaccatgagtgcatgcaatgttaattcatgaaaacgaacataaattagggacatctcaaaaaaaattggtaagtaactagtaaaaaagaaaacacacaattgttttaatttgaaaggggcccaatttaaaattttggctcaaacctcccaaatgtttcggctagcatgtacttattatttgggaaagtcaatgattgtaatgtgttgagactaactatgaaagattgttatctgttttggcgattggttggcactactaaaatggagaatgtgactggatataggatcaaaatttgatcagaaccagtgtgaatagcgtgactttcttttagttttacattttactggtttttagtttttttatttctgctgtgctgtttgtggtgtccttttgtttgaaaatttcaacacttacaacaacttggaatagcaatcaggatcagcctatcaccagtaaaacaaaataaataaataaaggattatcactattataatttttcttctcatttgagtgctaattaataattataactcgcacgaaaattggaggtgtacgtacccaaatgaagatatggctagaatttcaaccaaatactatagtacaatttgcaaatatatgaacataaatatgtagtgagtcacttcccctagcatgaactgttcccactaaattttgtgcaagttcaacaaacaaattgattttgttgatggagctaaacaaagagtttgtgactttttggtcaatcattcagagaatgatttccagcctttttgggttgaatattgcggctgaaaatggaaacgcatatcaccaaaaaaaacccatttcatttgtacacatcaagtaacaaaattttttaagttggcctttcctcagaaaatcttggtagctgaacaagagagttgactctcgttacaccttccaagcctaaccagttttgatcttcagttacagcagcttcactattcccttcaagctcagttgggagtcttccataattgtcactttcttctgatgatcttactgtgaagttcctttgcagcgatggctctgacttttggccatcgtctgattcaaccgcattacccgaatggttactttgaagggttgctgaagaataacactgatcttcatagtctgattcagagtccattttcccatctagaaatacacatactactgcacagtcatccatcttcgaagttggatatttgagtttccattcacgagcagctgagttaaccaaaattcttgcagctgaagaccgagttggagctgtggagactatctcaaccacctcctcgttgctcaagacatcccagacctgtaaaaaagactaaaaacttttagaaactactgactatattacaagctttcaaatgtctgattttaagggagatgatagtatgcatgcatctattgatcttgcacatgcaaacatcctacatgttctactcatgtgtacatttcattctaatttccaaatcaacaatatgatggaatctaaaatcacatgcaacgagagtgagatggccttattaaataaacactgtgcttggccccaccaaaatcagattatcagaacaacaattatgtggtgttctgtgtaagcatgttaggaatggcctacatacaactatgttgggtcattaaaagttagtactgcaatatagtttataaactcgatttgattaacagtaaacaaaaatgtgtgaggggacaaaatgagcagtattagttgttttagatgcaagtttaccccatcagaagcaataactatgaactgatctttctctgtaagagttcgatgcgagaattcaggaatcgaaattactccatactctttcaaacagaaatcgccaaaggctcgagccattgctaggccaggtgcatcatcaaatggcaaccatactctgggaacttcaggttcatcttgcaaagcaaagacccttcctttgcatcgtttaatcctttcggcttcccctataaaattttaacaccaaatcaacaacactgtacataaatgagctgaaattcaaaacactaatgaaatcctattcttgtcttatcttactcggcagatcaggctttaaatcaacagtcaactggactgcaaccatggaatcactgctgtccttggatcccataattgcccgagagtcccctatataccccatgaaaagatttgacccctggaaagggacaagaattaaaaacaacgtttagttaacaaaaaagtaaacaaatatcttccctactgctatacctgtttgacaatagtgacagaagtactgccactgcagaagcaatccaaatttggatgagatctcagctccttgtccatggccttatatgacttcaggaaggcttctttccacaatgaatttagtttatcctctgctgagccaactttctccaactcttcatccaacttgtttgtattccctttgaagcaggtcttgcctgtcccattttcctttgactgcagagaatgcaagaatgatagaagctttaatggcagggcatccctaactttgcgagcaactaggtggccgtgtggaccatggccgtcgaatacaccacaaaagattgcctcttccgacatgaaatcctacccgaacaaaggcagggaaaacataaagtagcaaatcaaataatgactaattaatcacctaaccagcatgaatgaataatataacatagtgaacaaaacttctataagcgacttacttcccaaacaatcatggcatcctggtttatccctttccgaccttgctgggtgaatatgcaggaagtttgactctttccattcatgaaaatcctgttgggaatagagggcaaatgctggagaccgataacatgatcagaaaatgttcttttccttctcttttgcccgaggaatccgacttcacagcatgatggagaaaacttatctccattgcttttgttactacaagtactcttactactagtggaaacacaacctcccattgctcagctccacaatgaagacatccggtgtaaataaaaggtcaagattctttctttggttaatggatctcacgtgaaactttggagttgctagaatggtcaaccgagcaggaaattatatatataaaaaattgaagaaaatgaataagaaaagctttctaaacatcaaagattcccacagattaacaccaaccagaagccactttacaattcaataatatacaaaactggggtcgttttagtattagtcaaataaaaaactgtcatgggaagatacgtgatttaataaacaaatcgggtaaaacgaagcaagaagataagaagcatatttaataaactgtgtattgaattgtttcaatggtcttcacggaacaaaaaaacggatacatcaatagaaattcaaccaattaaacaaaaaacatatttaacaatgtttgcatgtgaaacaacgaatagaatatgcttaaaaaggctgtcttgattttcatcagagaataagtaaataaaataaaaatctgtcttgaccattagtacttggtgaggactcacatatgataaaaatcaagtgggaagattttgcttagtttaatggtaaataacaatggaataaatattgaaactaatgaagacataaaaccccaaaagttctaaagtgtgatggtgtgtacagaccataaagggactaaggcgtttggttgggatgaatgaaaatataggaatagaaatgggaatgggaatgagaataggaatggaatggaataaa

SEQ ID NO: 110504 - DNA, 16350 bp, Cannabis sativa
catagaaaacaagcgtaattctatcccaacacagcgaaaaacgcgcataaaatagatccagaatataggctaaaaatagcctaacaaagcccttctcctaatttcttcataccaaagtaacactatgtttggcattgagaaatttaacaccttttctttctcttctctccatggttatgtttggtagccatccatcttcaacactcctcatcctttattcaattcttcattttctttttcatttctcatttctatttttcttcctaccaaacataacattagcaaactataattagttaatattttttataataattattaaattaaaatatttaggttaaattatactaatgacaacataatatcaataattgaattttaagacatttgagagagagagagagagagccaactctctttctatcctcttcattcatccattttaagacatgtgtctccgcttattcatggacattttccttggtttgcagtatttagcttctatggaacatggcctacacctccaagagacctcatggtatgtaaattggccatgatgagaactattcaaacaatattaaatgagaggcattgcactttgcacatcagcttggtcttgacacttggctagacattatgggtgtttttcaaattacctacattgtataaatataaatagttgctttgcactacattacactaaaaaaaatatgttattggagtttaaatttaaaagggaattactattttattctaatatttagatgattatccattttagtgaactactacttaatttaatatcaacacaatttttatcaaaacaaaaaattaatattaacacaattgaattgaattagattttaattgtacatgttggagtgaaagtaaaatttgaaatcagcacttaataaaatgtactatgaccaaaatagtacatatgtatcaatatccctaaactcaaaattttgccagagctagtttgatagtagtttttcctttattaactaacagataaatttagttttaattaaaaatatcccacaattgaataatggtattatttttaattttaagttatacaaactctttctatgtacctagaaacatgtacgcacaaatatattttcacatagcctgggcaatacaatttgttattgttgcacaaacttaaacaactccaatacttcaaattaaattaatcaaataagtacatattaatagccaactgcgcccaacaaaactcaaaactattaacattaatcagaatggttaatttgaatccatctattggttaaacaatacaaccaataaaaagaacataaatggacaaaaatcataacggcattttctttgggagatgtacaaaaaataacagtgccatttttatattaaaaaagtagggagggaagctaaactgtagacttgggtatcttatactgcttcttgaggaactgagaagcctcagaatcagacctgtggcataaaattcgcaatagagtcttggtatcggctcccaatttgcttcggctaccctgcgtttccaggcctccagaagatcttaaatcctcaatcagttccctagtctgcatgttcaaaaccaacttaaactcctctcctttgtttaaatctctacatcttctaatctaatttaatcaatatgaagataatcgacttaaaagagatgctaacctcaaagccgagcaacttgacaacatttcgagcacgagccacctgattttcaacaactcctcggggaagtccatctcctccagaaataaagaactcctacaaccaagcaagcccaagaaatgtttatagtttatatatagaattaagcaatctacatttgctttcaaaagtgcacttcttttagttttcaaagattgctgcaaatacctttaagatctctaaatcttcttctattagttttgcatcacttgttgaaaaaactcgtgacggtccaccatctaatagaacgcggagtaaaccatcctggaaaaatacattttatataaatttaagacacatatatgtcgttagattcgaaatacgaagctaaggcacataccagagtcgcttgaagaaggctcgtcactatatggtccctaagtggctctacaatgacgttacatagttgactaagttcctgcacaacaataatttttgcagctgaagactttatagtaataagtaatctttaatctccatacaatcaataatcttgtcatcttgaaatgtaaacataacacatgcacaaggacacacaacttcactaattaaggttgaaatagaatatacaggttgtccttttttccatgcctatgatttatcccacactatttcgaatattttttcagtagcagatgagtaatgactagcaaaatttatactatatggccatgttgttgaatcacattgtgaaaacaaattacacagcgaagtgacctttctatatacattgtgaaactttttaatctaattgaaagctgaagcatatcccaagatgagatgaatatgaaatgtgctaccgttacgtgcattgaacaaaatcagccacggtacttgtgccactttacttgcccatgtctaagagaagtcaaagatatagcagtagcagccacaccacactcaatagtgacggggtgatataaccataaagtactatgcatccatttcagcagttttaacaacaccacaacataatttatgtttagcttataggtcaaggaaaagaaaaactgactatatcaagtggttcaataactgcgtcaaaccgagattgagaacaatttggtttatacaaattgttgatgagcggttcccttaaatcccagaagacaattttagttcctgaaacatgcagatggtagcaaatcaacaactgaaacttttcttctctcaaagtagacgctacaattgcacaaattgttaccggtgaactcgcaaatgcggtcaatagcagcattaatgtcttttctacttccatcaaatgtatccttttgcacgaaacttttagatctctcatccaaggatttctctataaccaagaaaaaggacagtgtactaagcattaaagaattgatcagtcattcaatgtatagtaatgaaagcattataaagattaacagctaaacatctcccatggaagaataacagtcaaaataacaatataatctgtcatagacccaaggatgaaaaaaaaatcaataatattggcctacaaaccagcaatgcatctaagaaaaaaaatggtgctacaaatattaatttatttattttttgagttaaaaaactatgtctgtccaaatttctttgatgtattaggcaatgaaaatattgatatttgtgaaatttcatttatgtgcagttggaaatttcttacattttacccaaaataaattgaaaaagagacatttgaactatcttagactgatcttccaaatttattaggaagtcttacttgtgacggaggaacaccgtgatagaaaaaagacaagaatttaaagaaaagaccataattataagacttccaatacatgccacaatacatttagaactatatctttaaccccaaagatgaagtttagtgcagaataagtccccattctctttggaaagttactcacacaaaaattatcaatgtcaataacacagcggtcaacagagatgtgataaatatttctgcagaaagatggaaacatttctcttttccatctcactagtaactttagcttttttatattaaaaattgttgatttacttcatatattaaatatatatcatcatatatgaagattttataatacataactaatctttcatttactatgattaaattactataaagttattgtatatattcatgtaattattgaatacttttgtatgcttacaagtattatgatttaagtaattgctctttgcatataatttggaaggctatgtattcccaaattcatggaggtaattaatatttctatataaaaaaaaaaggaaaggtgtatgcattctcaaattaatgaaactggtcttcatcacaacgaagttaattgaattaaaagaaaaaagtaactgaaaaagatgttaggtaggcagtgaaagaaaacaaaaaccgagatacgtacttaaaggcttctcattgggctttttcgttgtccacctttgccaaatgctatcttcaagcttattcagctgactaattgcatactgtgggttgtcacaaatatatatatatatgtgtgtgtagcaatatatataaacattagttatatgacccaaaaaaacaattagatgtatattataagaaaaaaaaaattctaatgtaaataaaattcagaattacaaaacaatgcggatatgatatcttgtaagataataaaacataataaacaaaacaaaacatagaaggttatagtttggttctggggaatctatctcttactttatccattctagtttcttttttattctctcttctttcttctttctccctctccccttttcctctctcacctgtctttcgagggaggggaagaaaatacctactttatcaaatctctctttctctctctctcactctttcccacagtctattaagagatggaaagaaatgggtactttatcaaatctgtctaacaagcattattctgattgttctttttatacaaaagtatcttagaaagaggggaaattacaaaagaccataagttgtcatcttcaaatatagaagatgatatgggatcatctaaaagaaattacaaccaacacattctaatctataagaagattgtaaaaagaaaaagcttttattcaagcctactcctactatcgtgttaaaaatccaaaccttattttgattgttgagagagtctactatagtaatcaaatgcatttgatgatgatacttatgtttagttagatgtaaatgtgagagaggatacttaaaaagaatcattatagctaaattcctttgcccaccaaaaaataaatgaaggaaaatgattctagataaggactggattggactcacatatagtgtgtttaactgaatgcatagtgtgggagttgttcggacactgatttcagtggaccttctctcatcaggaagcctagggtcaaagagttccttctttacaaaagcctttattccagcctccttcctgtatcgtgtgagaattggtacgggaggaattaaatcgtctttgctacctgcatcaacaattaattattcaaggtatatgcagacaaaaaattggtagattataatagatagaaaaaattgattaaacacattgtttgggaagacaatagatgaataatagaaataagaactgttaagaaagtagttcctattttcaaaggcgtagaagtagcagcgtttatattttgctaagaaaaccagtgaaaaaaaaaacatacaactctaacatgaatgaaaatcaaaactgcttcacaatgaaaaaaaaaatgaatggattaattaagcgtatgtgctcacctaacttgtcaacaacatgatttgcatatacttgaaatgcattatcaatgccacgaaataaactgctcaattcggaagatctcattggaactttcaaagcgaaaaattgatcaacagtctgcctcagagaaaagaaattgaattttaacaatatttatataaacaatagcaacagtgaattttgaacagatacaaatactataacattagctacaattatgagatactgaaagctccaaaaatgctagttctaaaattaaaaaccatttgtttgagcaacaaccatttttttttattagataaagaagaaatcataagttatttccttataaaataaacatcctcatttaaaacaactcttagtacctacgttgcagacattaacttcataccaattatcagtttcaatgttcagtacctgaattgttgaagctttggtttcaagcagtctttatattttaagagcaatcaaataccattgttttttcactgaatatatatttaagggacttaaatcccatcccactcacatgtaacccccaacccaagcagaggaaagaagaagactaggtaaaaattgattatgtttactattaaagatcttaacaataatcaaaataactaagggtagtttaagaaacacacacaatttacaataaaaaggcttgtacctcctcaacgattctatatacttcaacgattgagctcccatgcctctgctgaggtgatattgggtcccaccgctgttaaaaaacatatattagtatggcatgaccttacatttcaatctttttcttagtaataagaaagcattacattaattgagaactcgataacaaaaggaaaagtcattctaatgaaaaaaagaaggtaaaagtcaaaagaattattcaaaacaagtttaagtttccatgaattttcaacagaggcccttcttacatacttaaccaatccttttaacagcattccaaattttcacagcctgcccctcaatacaactaagcttagaacaaatatcccaagctaccaaagcacccttcaccataaatcattcctttcaaaaagaaaatctcattagtttttgaaaacatcacagaataaacaaagctatgccagctttcacaaccacaatcgaagagtcgtggaatatccctaaagcagaatagctgccctggcattaattgttaagaaaaaggatttccatatccattgacataaatatcccatcaagtgctctttgcagttatttagtaccaaataacttaaccaacatagaagtaagctgctagaaattaatctcaaagaaacttaatttaattattgacttcaagttatgtttcaaaaaaacacatatgagcgaagagattgagttgaatagcacaaaagtgccaaaattaaaaccacaaacaaacaaaacagcaaaattgtttttcctttacctcctgtgtaattgcacgctccacccaacctaagattcttccaagttgcgcattgacccaacgcagtaccaatgttccagatatggattcaatctgaaaagtttgttcaaaaattaaattgtgaagtatggactatagatgataacaagaatgaaattacaaaacgcaactaacatgtttggctacaatttatccatccctaagtatagaactaatagtttcacacgatttaggctcagtgatcatagaagtaaaccataactggcaaaactttgtgcatgccccagtcaggcatacatatgatttctgaatataaaaaacaatgtagtgaaaattcagatgattatcgagcacatgtaatatcaaagcatataacaactctctacgtgataattctttattcatcaaatgtggattgacaaattaacaattgtgccaattgtgattatcaaagatgagggagggttggggtaactggttgagatctcagatttgcacctgggacctccctgttatttactttatagaagcaccaagtctgctaataatatcttaataatataaaagtacaaaaacaaaaaagactaatgagccattaacttttcaaactataagaactgtatgaaaaacatgatgaagtacagcatttttagaagtattttgtatagcataaaaagatatctcctcctatgacctgtagattctgtcagatgacataatatcttttattagcatatgcatccaagtatatctgagccattcataagatgaggaaccattatatccctgtctggttacaacagttgtcaagcctataaccatttccaagcttttcctacaccaagaagtttggtcctagactcctagttgccacatttcattaggatctacaggtccgataaccaactaatggcatagagatgaagatgttagagtatgcaacatgtggcttttatggaatgggagtgcgaaggaaacaaatatatcaggagtccggagaatttacaatatctcaaatgaaacaatttctagggcagcaggaaaccgttcttttgataaatatcaagtgctgaaccaaatcttttacctttctttttagctagctaactaaaacatctaactttgttatttcctcacggagaagagtaaaaaaattctaagttgtgaggagtaatggagattttaactaggctgacaacaaataaaagatccaagggtaatacctgatatagagataatcttttgcacaaagcatctccaatttcctcttcacaagaagacttaatgagtgcaatagtaaactgctcaaagctatcagctgctggaaatacagatactatatcctcagtcagatgttcagcaccatcaagaaaaggtttctgaaataagtgtttcaatcaagatgctagtctcatagtaaagtgaagaaaccaagggaaatggcatctgatcttaaattgagatacactaaccaacttgtttccataaagcctgtggacaagtgaagcagagacaacaagtgcttgtgggtgcctctgagataatattggcaagaacatggttgaatcttttttcataagtttcttgctttcttctgcaagcaatgccaaaggatgctcatgctttgtttccaatttatcaacaatctgcaatacctgttatgaagagttaaatgacaaattgattttctaccaatcctagcatgagactaactacgttatggctatgacaagtatcacttgatttcttgagtgtgttctacctttgccaaattatgaataaaatgaaacatatttgctctcaattactaggcaggcaagtcatcacccctttattttaaccactctcccttcccttgcaaattatacaaaatcccctgtagggaaagtagaaacaaaaattttaaagaaacgttttgttccatccatcctgtaatgaaactaacaaagcctgaaaataacaacccaatattctttgtacttttttagtcaacccacaaggaactctcaacctcaagacaaacccactggcaataagtgtaaaaatatggtctttccctcaactgtcaagaccaaactaacattaacatctcactaagttaaaaaaattgcctaagcgagaaaatattatgatttcataataagttagagacctacccttgcaaatgcattcttaattgatgatgatatatacaattctatctgatctctatctgtcgtggatgtgaactgtttcattgcctgttcaaaacaaaaattacaaatgttgctaagaataagaatttacatagcttttaagaaaaattctgagagcaagtataatttgacgagcatagtgtttcatgaagaaacttcaaaattttgagttgccatgttcgaaaattgtgctggcttttttgaaaagtttcaagacgatgcttcataattttgagctggttttgtgagattactttcacaaaataatcatttgagaaagctacaaaggctacaaatacaataaagcaacaaatttgttaataaatcattatgcatacttcaggatcttccaaaagtagcctccgagaaatcattgcaactgctaccatattctccatcatggccgagtcctacagggttttggagtacaaaaatgagctgcagaactataaagaattacccagaagcaaaaagaaaacagtgatcaatgttaaacatgtgaagcctaattgtacttgacaacaataaccctaggcggagccttcccagtacataaagaacatacatagcaactgctgtagtgtcataggctgctcaaatttcaaactttggctttttaagtgagtttggggggaatttctaggtgacaacataaaacttaaaaaaagaaaacttttaaaaatatacctcagcataatgaagatggtaatctcctaggtgcttatcagcccatttctggatgggtgataagaaggactgtaagaaagaaacatctcgagaaccatgttcaccttcaatcttagcatacaaacttttcaggtgtgacctctcttgtgcaccccgttgttccttcagtggtattttcttcaactgctcaattgcttgctttaggatcccttggtcatttgtaataacatactgttgacataaataaccaaaattcatgaacaaagggaaaataaagataatagtaaaatatgaatagcaaatatcattttagacaataacatcaagcattttactgacaaaaaaacacctaaagaatatcggctataaggtagatagaggccacaagtgttaagttctacaaagcacaatgtcagttccagcagttgttgtgggggttattgattatgacatcaataatttagcatgatagtttgtattcagcctcaaatcaagagtctcaccattaagttcacgtatacgatatggaaagatatcacacataaggagctattagtacaaaagaaaagccaactccaactgaatcttacctgacgaaataatacccaagcatagcaggtgtgatgaatggtctctgtgatgcctaaaacacgccaggttgacttcaaaagttcaagaatctcttctacttcctggaaacaataagacagggtcttagaaggtatcaagctaatttaaacttttcacttctcagagaattttttaaagcatgatagaaaaaactacacgtaaaaaataaacataaaataaaaattgaattatagaggatcccttgcttcaagaaaacgtttagcgccttataataatttgcaaaaatcaagaaaattcaagaatctaataaacatagttttcaactggatctttctctgtccgatggtgatttaacgtcataaaaaagtgttcaacttgatatgatgttatcatgccaagagcaagagtactcacctctgtcagttttccctcatctagtacatcaaagacactgagaagtagtttttcatacagcctgacatttaggtgataaccatctgcccaatgacatacttctccagttaaatcacccctagcaggtctctcagctagaggaattgctatctctctgagagatcttaaacaatctgttcgctggagttctccggtagaagagggattaaactgaaatcaaagaaacagagattaaaaaaaggctaattcaacaaaaaaaatttaaaaaaaaaacagagacttaaaaaaatccactaaaacacacctcagattcttcaatcttcgccaaaaggatcctcatctcacttgccttgcgtccagattccccaaaaccaacaacagggaaattaataagcccctcctccagcatgtttagctgcatcaaaataaaaatactaaagttgagtatatgtttacatccccaattccacggaaacttcaaggccactacttggcaaggccaaataaaggggaaacaacgaaaataacacacctgccttttttgccaccttatatatgccttcttgtcagaaaattctgtcctagaaatacaacataaaagctccagaggtactagtagggcatccattctctttcccacttttcctgaaagagcgttaagcagcccttgtcttgtcctgatgtccattgcctcagatatctgcagtcaaacaaaaaaccccatgaaatcccaaatatatacatgtgtgaacacacatcaatactagaataagaaagcaccccaaactccatataaaagatatatatttgtataaatactaaatgcttttcttgtacctccatctggacacgcattgtctctaataaaccaaccaatccaggtgcttgtagagattgactcgaaatgctttcagttctactacgccctagcttcctcattagcttggacctcttgtctttctttttttcttttgatggtacaatgagacccctgtttgcaagtttaactgaggataaaaaattcaagaatatagaagaaaaaactagaccaaagctacgcatacagaagaattcaatggcattctaagtgacagtgacaaaaatgctgtttagatgatttataaaaacttttgattttgaatggttttaaaagttttgcattaatttaaaattacacttgtctttctgttctattattgctcatgaaaaatacacaagataaaatctactccagaaacattatcttgtatttgaaaacaactctataatgaaaaaaataatactgaaccccattttcttcaaacattacaaatcaacaagaagtggcataaaaagtttatttttttgcatcatctaaaaacattgaatgtactgtctttgtttctaatatataaatatatattgaaatgtaataaagtgaaggaagaaccgaagaagtatgacctcacaaaacaaagcaagaacttttatgcaaaatagttaaataaaatagataaaagggaaattattttaaaaacaaaaattataacatactcatccctcaaagttcagtttctggtgcctgtaaatgtgctgcctatatatacagttgtaaaataaaatatatatataaatatatatatatatatatctaacaagataatgagcataccctgatgctccagcacatgccaacaggatttcgtaagcagtttctctgaggtcatcatctgtgatacctaaatgcataataaccatcccgcacaggtttaggtgtcacaattcagtcccaacattgatgctgaaatacttccaaaattgtagttttgaatctcaataataaattaacgttatgccatgtggcatagatacttcaacaggaatacaattttcatataaatttcttttaaaagagatgtcaataggtattaggtaggccattatcatagaaaggttttccaacttagcatactacctgaatagccaaaaaaattaaagtcttaatccctttatatatagtattgcaattatggttcacaaataattgcaatacttctcttttttcttaaaattagaatcaaatataggttagagcctcagcagcaccagctttggtaactaagtagactataaacatgcatagatgaattcacatggctccactgtacaaattagggatataaggcaaaagtgcaactatttcttaatcttattcaaaacaaacaaaataaagttgggttctttcaactgttgtttatattctctacaacttctcacaattatccataaaaagcattttttgttgaaaaaaaaaatgtaccaattaggtcacattagtccattttcttaagttttgtgcaagagtcacattttttacgcatatcaagattatttcagctttaaaaaatttggagtgaagttactaaataactacaagtctcccccttgtcttaattcaatttgctctaataaatgactgtaaagtttctttatgactgcttagcacttgaacatagaaaaggaaaatgagagttgaatttgagaaaacgagtctatttgacagttccaaatttttgaggacctaaataatcctgatcacttgtgaaaatgagacttttgaaggaaaaacactgtcccaaagggctttcgagcactttcgtaatacataattaaaaccttaagatctaaacactaaaaaatatttttggtgagctaagttcttacacttcttcaggcaagattaggtgcatagttctcatgaaaatttcaaattaatctttaaaaggtaacttgtatcatgtttactgatagtttaagctacacatacaagacatttaccacaatatctaaattgatcagtacacctacaacatacctgtaacaaaagaaggcaatcccactccaacatcagtagcatcattccgatttcttcgtgaagtcctgatatcactaacttcttcaatatcatcatcatcaaaatcatcaatgtcatccacagttagttcatgaacttgtgtggagttaaaagattgtgattttgacacactcgacataacaggtgatgaagcttcatcttcaatgggtgaaccaagaccaggtggtggcacaagaacagacggggcagtataagcagggggcggtatgaattctggtaccgagggtggtgccctcctaggaggagaacccgaaaactcaggatccgtaaccaaaaaaaattcaccagcagaacttgtattattctggtcaagttttaaggaagttaaatgataaaactataaggcaatcacatttaaaaaagaaaaaagtttatgtaattaatttaacaggaatcatttagccataaaagtgaaactaccaactaaattggcaaggatttgataacaacttaccatttggggtaaaccaatatgatcataataatctctaatagcttctgagaggtcaagcattccacctacattgacaaagaacattatgcttaataattaaaaagataaaataaaggcatttgcaatgaattaaggttgtattctaccttttctagcacaagtgaggacataatcaacactaacttgatcaagatcgacatcatcaagtgtaacagcaccaggaggcattacaactttcttgattaagctaccagagagtaaaaaatcaagaagtactcgcctatctcggcgatatctttgtaaaagctctaaagtattttccctgagaaaatttgtaccaaaaaatcttaattttcttcatcgcatatttataataattaattaaaagtgaaaagcgatacatactcttccatctcgaacagatacaacgcaacttgatcactcgagcctaagttcagaagaaccacattgctttccaattagtatacaaagctttgtttggttggcgtgaaacaggaggatagcaggaaaagaaaactgatgagatctgcggaaatttgagaacaagaaatgaaaatggtgattgtgattgtgttttagctgagaatcccgggaaccaaacagaaaaaagaaaaagaattgggagtcaaatgtgaagccacaagagtcaaaagacagataaggaattgaaatgaagattgagattggatccaatccaaaccaaatactcttctttctttcttttagttatttatgaatttttacaccacttaatcaaatttctaatttttttaggtggggaatttatgttttttttttcaaaactactatattttttttaagttttatactgtactgtgttaaatttttacagttgttccatagttattttttagttgtttctttaattgtttaattttgttgttttacagttgtgacagtaaaattgtaaacttttatttaaaataatttttttataagggatattaacgtcaaaactacctaaactctaggcttagtgacacttaaccacataatcgatttttttgtggtaaaatctttcaaacttcacttctgttagctatttacccttgtccttcaaaagaatttattaggtgtcatagtagacatgtcacagtgtacacaagtgtacacgtagcaaatttttagtggggatattaattgcaaaactacttgaactctatgattagtatcacttaaccacataagctgcgtttttggtactagaaccctccaaacttcaattatgttagctatttacacattccgttcaaaaaaaatctgttaagtgctctaggactggaaccatcagatttcttcttctcatgttcattcttcttcttttgcaatgaatccaccaggccatgacaaacctagggacgaatcagcaaacccctccagttgtggtaatatccgcaaagatttgtgggagagggagaattagatccggtgaggtcgaggcgagaaagagaaactccaaagaagggttgggtctcgaggcttaaagagggttgggtttgtgaggtcatgacgtcagttttgtggttcgtttatgttgaaggtggtcgaagatgacttgtcagagctgtgcgagaaggtgaacgagaaagatcgagggagtgcgagtggaaattaggattacagggagaaaaatgtaaaagaaagagaaaaataggaaaagagaagtttttttttaaaaattatttttatagtttttaaatcattttttaaaatatttaatcaattaaaattatgtggactactaaaaatttaccatgtgtacacttgtgtacgctgtgacatgtccatcattgcacttaatagagttttttagacagaagagataaataactaacagaagtgaggtttggagagttttaccaccaaaaaaatcgatttatgtgattaagtgccactaatcatagagttcaggtaattttttctccaatatcctttactaaattttttccacgtggcatgtctaccgtagcacttaacaaaaccttttgaacgaaatggataaataactaacagaagtgaacttaatttatgtagttaagtgtcactaatcataaatctatatatatatataatcctgttgttaagtaggatgatgtggcgctctaacatttctt

SEQ ID NO: 110505 - DNA, 4517 bp, Cannabis sativa
  modified_base (4487)..(4490): a, c, t, g, unknown or other
aatttttaaaatgacaaaaaattgttttctattctcattttaaaaatacaattttaaaaactgaaaactgaaaacacagccaaataagctctaagtatcaccatttatttaaatttaacactccataaagatatcaaacttacaagtttaaatgcaactaaaagtgtaaaaataacactatcaaagtaattaaatataacaaaataacataaaaataaatacgcaaaataactaagtgttacaaatttaacacacaaaaaaacatatacatactaaatatataatttttgtaatatttttattatatatataaatataaataatttttttaaaatatataaatataattagattggtcatttgggggcacaagaccgcactaaagttttgaaaaattacatttttatataaaaaaaaaatttaaatagttttaattttttccccataaatttaattttagtagttttatcctttaaaatttatattctgtttaccctatgatgattccgtcactgcttattataacatcatctacagcttttttttagttttaaaaggacattatttgtttcgtaaatgctttgatgatttaaatgattggttatagcattaaaactacttactactatacatgcaatattaaatattaattagaattaattgtcagagttgttgaactgcattattgacattattgtattttccaaatattattaacctattaatgttagccttctattgaattataaataaagaataagtatggccggccactaaattatgaactaaaatatcaatatgatatattaaaaaatttgttatttcctttttaaaaaaattgttttttgtgtaaatattgtttgtttgtatttttgcttataattgctctatacggacaaatctgactgacttattagctagagtagaatataccacattagattaccttgaatatcttgatattatgtagctctaccaactttttgtccatatggttttacgttttgaatttattatagtgacactcccacccacgtaaatagaataaaatgtgttacaattaatagtagaaaagacaaaaagatataactattgtcaatttttctgtggtatacatatatctttatttaaatgctagaagctacataaattgacatctcaaaactcaatcatgggttagacaactatatatacaaatatttctacactttatctttttactatttaatttctatatcaaacaataaaagtatgttactcacataatatttgacattaacaaaaataattttaatacagatgagagttacttgacaaatgggtatttagacacaacattagactggattccaggaatgaacaacattcgactaaaggatcttccttctctcatgcgcatcatggatcgaaatgacataatgtttaactatataatgagacaaattgaggcatcttatattaaagttccttctctattcaacactttccacccattagagtacaaagtcttggaagctctcttccccatgatcccaaatcaaatttacactgtaggccccatccacctacttctcaaaaagactcaacccaaaagtttgtcatccattggatctaatctatggaaagaagagcttgaatgcttgcaatggttgaattctagggaggccaattcggtgatttatgttaatttcggcagcatcacggctatgacacctgacgaacttgttgagttcgcttggggtttggctaacagtgggaaaccctttgtttggattataagacccgacatcatcgatggaaactcgggaattattccaactgagtttgtggaagagacaagagaaagatgtgtgatttgtagttggtgtccacaagaagaggttttgaaccaccctgcaataggagggtttttatcgcattgtggttggaactcgacactggagagtttgagcgctggagtgccaattattggttggcctttcttcgctgatcaacaaactaattgttggtttttgtgttctgatttgggtgttggaatagaaattgatacaaatgtgaagagaaatgaagtggaaaagcttgtgagagagttgatgggtggcgaaaaaggtaaggaaatgagagaaaaggctatggagtggaagagaatggctgaggaagtggtgaaaccttgtggttcttctatggtgaattttgataaattgattgaagaggttttgcaaggaccactttcaaaaccctaaattaatttttattgctataagatacattaatgtactatcaatgcgggagatattatactgtatgcctgttttctcctacattgttcttgtgtgagtaatttgtgagattatcaaactttaatcaagtaatatggttttgataatttaataaatgtttgcttagtatgattaaatttattaaaataaaaacaatcttagaacatatcatatattaatattattattatttggtcataaataattttatttaaataaaatatgtaagaactaatgttaatttattttcacccgtaatagtatgtgtttgtattaatataaagtatgaggctactgtgtttgattggtacatgatcaatcaataaattgagctaccaactaaatattaaaacattcacaaaacaaattcaatattaaaaacattatgtctgacaaatatttatatacaaatatagtaaagatcttgccttatttgtgaaaacgattttgtcatgtgatccaataaacttataaataaatcatgattatgatcatatagagctgtcctccattatttatgcttgggaatctacaccacatcaggaacaaaaatcacttgtccccattactgtctcatttcgataccaactaattacgttttgctacctaatttgatatgacaagtgtacatttagctgagcatattttataaaccctatttatatttttttaatgttcggatttatcgaatggtttctcgttacaccgtcactgtcgctgtcacattgtatggattccactcttggggcagagagtttaatgagctgaatacagatattattgttgtattcgtaattcgatcttaaagttagagtagtttccaaaaggggtggtttccctttgtcttgtgatttcaacttttactttcattgtaaagtcgatgatgtaggtattaggtgaagcattttccaagttgatttttagttagttacatgactttgaagcttaatatgaacaaagcttatgatcgagtagagtggatatttcttaatgctatgatgcgacatttggattttcatcagagatggattaatttggtgatgtcttgtgtctcatcagttaattaccaaattagtcatcaaggtcatgtcatgggtccaattgtgccaataaggggtataagacgagacatccttttgtccccttatttgtttttactgtgtgctgaaagtttctcattattgattcactcttatgaaaggaataacttcttcatggctgtaaagtagctcggggcgccaattattttacatatgttatttgcggaagacaaatatgtattgcaaagtaactggaaattctgcaagaagggtgcttactttgctctacagttatgaaaaggcttctggataacatataaatttggcaaagttgtcttctgtcttctttagcttgaatactaattctcaagtaaaacaatagatttgtgcgctactgaatgttacgaaagcagatgataatagctttatttggcgttgtcaaatattttgggaagaaataagaatgttgtgttggattttttgaaagaagagatgcaaaaaaaggataagtagctgggatgggaggttgctctctcgggcaaggagggaagttttgtttagaaatgttgttcaatctattcctaattatgctatgaatatttttctaatacctgggggtgtgtttaaggagatagaaggaatgatgactaagttttggtggaagtcatcatctagtaaggaaaaaggtattagttggatgagttggaaaaacatgactaaatgtaaaaatagggtgggatgggttataaaagtatgtgggattttaatgtagtcatgttgggaaaacaagcgtggagatttctgatgatacctgactcaattgttacaaaagtctttaaagctaaatactttccaaacaatgagtttcttgatactgagttggggaaaaatcgaagctatatttggagaagtattctagaggcaatatttgtgattataaagggcttgagaaagcgagtgggttcaggagacaatgtaaggatttgtgtggatccttggctgcctgtaaatagaaatccttatattacctctaagttggttgggctacatgataaatatgtaaacagtttatttgtagtcaatcaatgagtttgggatgaagaagtactctcagatttttttaatgaacgtgatagagatgttattctttgtaacaccctaactaacnnnngcgtattacgtgatttttaaacagact

SEQ ID NO: 110506 - DNA, 2982 bp, Cannabis sativa
ttaggatacagagatgccattagtactttaagttttcttattccagacttggatctcacattgaatgctgatttgtcactattggcagactgctgggaccagatgctgtagaagtgctggttaatccaagagcagtaatgtgttgcaaaattggagcagcaggggactgaactggtggaacatttgtagcctgtggttctggtggttaaacagaagcaacaagtgtttctgtttgaggaaaaggttcaacagttggtggtatagatgtagtaagggtattggtggtaggaggtggaatgacagtagaggtagatggagtatgtgagtgagtcatgacatgttaggtagggccatgaacaattgttgtttgagtaggatgagtgatatgtggagagttgtactgaagtaaaggcagaacaccagttgaggattgagtgggagatgattattgagaagaaaaggatgcttgagcaaaagggaatatattttcatcaaacaataaatctcttgagatatatagtctaccatctttggataaatacttgtaccctttgtgggacaaactgtatcctaagaaaacacatggagtaaatctataattgagtttaatcctataataaggcctaagattggaataacacaaacatccaaaaactcttagcatagtgtaatcgagtttgacattgaaaagtaattccaatggagtactaagatttaatttggatataggcactctattaattaaaaagacagcaatacgataggcatcatcccaatatttgagtggttaggatgcttgagctaaaagggttaaaccattctctactatatgtctatgtttacgttcagctactccattttgttcatgtgtgtgaggacatggcagcttgtgaataaccccatgttcacttaaaagtttggtaaaagctttgtactccccacttcaatcagattgtagctttttgattttgcaaccaagctgcaattctactcgtgccttaaagctgataaaggttggtaatgcctcacattttgttcgtaacatataaattcaggtgtatttagaataggcatcaataaaattggtgtaatatagccacttgatgaaataataggggtagggcctcataaatctgagtgcaataattgtaagggttcagtgtactcagtggtggagattagaaaatgaaaattatgatgtttgcctaaacaacatgagtcatataataagagagagtctagttatgtctaagtcaattactttatatttttgagacctatctcatgaatcttctctatgagtggccctatggactataacaatctgtaagggttattgacaccacgtataaaaaccttgtgtgttttatttttttacacttctattttttgttagtttttctatttcgcagttacagtcaaattctatagctataaataactgtttcaataccatacttattattccacatttaattaattaattaattaattaaaaaacaaattagtaatattaaaatacagaatttcattttgtatcaaagagggtcactaaactcttagtggaatcttgttttttctattttgttattattatttaatcttgcgtgatgtttccttatgtaaaagaaagatttgcagttggtctaccattgccaaatgattctaactacccttactagaaggttaggatgaagaccctcatcaaatctcaaaatgaaaaagtctgaaaatctattttaacttgttggtcaccaccggctaaagaagacgatgtaggtaatattaaggtaaaactttaattagaatggtcaaatgaggaagataaattttcttaattataaaactttgcatgctatttttaatggtattggtgaaagttttattaaattaatctccccatgtgaatcgtcgcgaggtctctatctcattgtctctctaatcttgcaggtagttcgactacggtggtccgagaatgacaatatttgtggtttatagtgtaatatatatttgtacatatatatgtattgtgttttaatatttatgtggtatcttaggtctgtattatattgtgtaatattgagatttgtggtatttattataatttttattgtggctaagatctgggtttgtaaaggcttagatctagatttgttttttggtgtaacagtttaaaaccgtcgacaatattaggttactatagccgatgttttaaaattgttggatatgcctattcccgactgtttaaaactgtccgctataatgccatttattgctgacaattttaaacaattaagaatagacatactcgattattttttactgacgcctattccacttaattttacaataatcaaatagacgtcggttatagagaaagtaataccatgcctgacttttttaattgtctaaaaatctatttgttttttagtagtgatgatgtagatgttagttaagaatgactaactatttattttttatattatttatcatcaaagtaaaatatattaaattacataaataaaaaataaagtataagagccgtttttataagtgatacctcatgattggttaatggtattttctaaaagttatttttcaaaattatatggaacttgatacttaattacaccaataatagtatgacatcgagaaaagtactaaactctagttatactttttaacatttctcataaaatatataattacttacgtgaaatttttttttatatcagtaaaatattgataccttaattaatgttggcaaatttcttacatgcagtattgaatcccaaagtgtaaagacgatttaagaatttgtgttatagccatttgagattttttgtggaagttcattagaatattatattagtactataacatcctgattcaagctttcattgggcccttacacccacaaaatgatggctcttatacacgagtatgtcactctgactacttcttggaatgacgactgaccct

SEQ ID NO: 110507 - DNA, 13621 bp, Cannabis sativa
cttataaaaaaatacagtaaaaaggtaaaaaataccgcatgacagtatttttgtaagaaaatggcaaaagttagtataccatgtaaatttcccatattttattatctctaaccagactttatctatattttattttatgtcgactaaagtgttgatgtaactaataataatacgtcattgttgcataagagcatctttaataggtatttattgtagtggtcttgtcacatacatatataatatggtctaatttttttgaccaattttatgtgaagtgttgtagacaatgatcatatgatatttttttttattagatttttttttacctaaaaaatcattaatttaacacatggtggacaacttttagagttatcaaccattagagtgtttttgtaagaaaaatgtgacaaattttatgtgattgagaaagaaaataaaaaatatatttttttaaataatgtatgtattttaacacctataaaggttgcccccattagaaatgctattagtatataatattttagtatacataatattatataaaaatataacatataataatataatttaagatttttttatttttatactttaaagtaatttttttacattattacagaaatttacatagcatttagcaactaacaaagcaacctaaatcacaactaaaatctatatagtaacacacataaaacttactagaccaacgaaccaccgaaacaacccaaaccataaattaaaacaaaaaaaaaaattaaaaataacattacagagctattagatagtgggccttaattaccgtccacaaaagcccaagcccagtataaaacaggcccaagcccatattaattctaacgccacctgtctgtcattcagttaactacagtttatatcaccgcaaacggttccagattctctcttgtctctcacttttttcggctgttccagaaaaccctagctctctcgagttctgcagctacttctcatcctgactgtgctctcacttgagaaaaggctcgccaattcttcaatcggttccaggaatctccgattcggtgcggcggtgtttctcaattctcgctcatttatgtatgtcttggctagggttttggttacgagtttgaattgcagtttcttgttatatttgctagttaattaagctgggatttcgagttcttgattcatcgaaaagatttatttatttattttattgttaaatcttatggaattaaatatgagcgtttgaacgtgtgagaaattcttgaaggcagtggttaatagtgaatgaaaatagttatagcaaattattttttgttggcgtgatcttcatctttttcttttacaccattagtaaaagaaattgaattttgtaatgatctgttgacatttgccattttatattgttaatgagtagacaagaacttggcaagaagaaaacattggccacttttcatggccaaaatgttccaaattttttcacttgtaggaattactcttacatagcaccctttattaatttgaattagggaaacaataggtaccaagcaaggagtgtttagcataagaaaaagtctcaattaacttaggcaacttttgattagaggtaataaaatgggatggaatggaaacaattttcattccatttctttgtttagttgcattttaaagtattgtagtgacacaatgtcattcattccaatggaatgatttgccatcatttttctagtatgtctattccattttgaaatggaaggaaataccatttcatcgcaagattgagtaaaaactaaaaaaaaaattgttgtgcattttttttttttcattcttgttcctgtattttcattcttaccaaccaaatataccttttattaactacattcatgtgtaagtttttaagaccaatgctgcttgcctggtcttgtaaatgcttgaatggttatgcaaaattggaaatgaactactagtttcagtattttctttgttgattttcactcatattgtaaatgtatttgctgagagattaaaaacgtgataattccagtcctgatccttgacataacttcattctagagatcctacgggatttttaaacagtttttccagttccagtgttgtttttcaatgctgataaagagggttgagtaaggtaggcacatgcatgaaatatatgtccaatattgcctgatctcatgacacggatgtttctttatgatagatgacaagcgcttggacaaatatgagcattgcaatcatacataggggtatagagagggatggggagattcaatgtggagttatgggtgttagtttttataattggagattcttgctcttgctcactctcagaagatctatacatacatctgctaatattctggagaggatgaggagatcaaattttatttcaatatatttattgctttggagcatcttggagcaaatgagcaatggagcttgtggagcacggctcacctcgaggattgctctcttggtttgcttcattgttttgtttttgctttacttttggtagcatcaacaaaagagtacatgtgatgataaccggatagaatagtggatgttgctgcaatgtattttaaatttttagaatattcatttatgagatttctttctgtttgcagtgagaaacttgcataatcaatcttcttgtttcaaatatgagtggccgcttttctcgcactatttatgtcggcaacctgccctcagatataagagagtgggaaattgaagatctgttctataaggtttgttttaaacttatttactgcaaagtgcaaacttttggtgttgctgagttagatcaaaaatttattaattcattagcaaaagttatgaagggtctaatgatttcacgaagtgattcaattatccacaagctaacaaactttactgctgtctttgcagtatggtcgtatagtggatgttgaactgaagataccacctcgtcctccatgctattgttttgttgaggtatgcttctagtcatagtttggatgcatttagagttaaagctgatttattttccatgtggcttatcttgtttgtgttttggttttagtttgagagttctcgagatgcagaagatgcaatcaggggccgagatgggtataactttgatggttgccgcttaagggtaagatagtattcttgctttggctattctgatttttttttggtagttatttcttaatttatttctccataatgcaggttgagcttgcccatggtggcagtggtagagggccatcttctagtgatcgtcgaggtggctttggtggcggtggtggtagtagtggcggtggcggtgggactgggcgctttggtgtctctcggcattctgagtttcgaggtacttatctcatcaaatctcatcaatgacaaaatactatttcatgtaataggaaagtatgtttgatcctgagctgacaattgattctagtcttgcttggttgttattcattgtttgattcatgtgtattttgctgcagttattgtgcggggacttccttcttctgcgtcatggcaagatttgaaggtatggtattaatacttcaactctacagaaaacttggtattgatattttatatatttgttgccgtgggttatatttctggtgtattggtttcaggatcatatgcgcaaagctggtgatgtatgttttgccgaggtttctcgtgatggtgatggtataactcttatttggtttctcttgcagtttaaacattttaatttgtctgcttcagcagtttattttatttgtgaaatgtaacgttcgtgttcctgtttaattgagcttttaatggcatgttcaaatatactcaacttgctttctaataattgaatttttttctgccagacatgttaatatgatcatatgaaatgaaatgaatactcacctcttggaattgctgtatattttcagggactttcggtctagtggattatactaattatgatgacatgaaatatgctgtaagtatgtgggagatagtagttcatatgcattttggcagcctttttataaattttaacattcattttcttttccagattcggaaacttgatgataccgaatttagaaatccatgggcaagagcttatatcagggtatgtattttccttacaaaatgattcaacctttctatcagctttagacaatttcttcatctgatatttgacattgactttgctccttttgaaggcatcctcaccttctttcatccattttttattgttcaaaacttcaaattagaaactgttagatcgagcaaaaaaaagtacaaactgttagcttagcattaattcacttcagcagaaaccaaacagaaagaaaagaagcttagctttaagtcttttgtgatgcttcaaattgatttgccaattatagcaatggttcattggtatatcttatattcatgtaaagcttgtgttgtctgcttccaggtcaggaaatttgaagccagtccttccaggagcgtaagtagaagccgcagcaggagcagaagtccaaaaaggaaccgcaggtactaacctttctcatttcgcatcccttgtttctcttcgtcaattgttgtgtataatataatggggaagtcatgcctccttttctttgctggcagtaaatctgtggaccggtcatcagtatcaaggtctagatcgaggtcaaggtcaaggtcaaggtcgatgtctaggtctagatctagatcgccttctcccgtcaaatcttcgaggtgggtatttttggtcgctcaagagacatttaagattatgtataattctgcatcgtatatcattctgctatcctaattgtgacttgaataaacactcgttttttattctaggccaagatcaagaacaaaatcaagatcgagatcaatgtcaaggtcaagatcaagatcgaggtcaggatctcctcgtccggtaagtgatgattttacctttagaacaaactttacttgaaaagaatgtcagaattcataaatgcaaccattttgctttacaaatgagattgtttaattcttctattgttgcttaatctcgattccattttcaggcgcggtctggcagcgcttgatcctttatcgagcaagaatatgcagtggagttggcgctagtagagaaagaattattaaaaatatatatgagtgtggtctcttttgttataaatttctttaggagaacccttattattgagtatgagtttgtatgatttacaactacacacagggctttgcttggctgttggttgatattggatttgactatcttattttagtgtattttatagtaactgattatattagctgtgactatgagtttgatggaaatttgtgaaactttgtatcctagatttttttttaaaggatttcaaaccttttttttttaaccttttattggattattgaaatgtttaagccttacaaaatgctatttagccttatgctacaaaattacaacttagaattcaatcattttacctaatttaatcagtcattgatcatttttacccaatacttttgaggaaaaaatgtttatgatatctcatgataaattgattagagtagcgatgcaagggattatttgttgatgggagaaaattttctaattctttagtagagatcatgggtctgttgatatcttatagcttgttctattttgattaataaaattatcttttgattaaaaaataattcttattaattttttaaattgataaaataaaatggtatttaatacaaaaaaaaaaatcctaaattatatttattgttaaaaataattaagtatcatagatctattatgtataaaataaatgacttaaatattatttattataatataatttaggctaatttagatttttagttccttaatttgacacatactaaattatgttctttaaactttttaaattgttaaaaaaatttctcaaactattgagattgtttgatttaaggactcatatctaattatactatagaaagtttgacatgaatgaaaattttaagagcatgatttggtactgttaaagttcaaaaagtgatttggtaaataacaaaatttaggggtacaatttagtatatgaataatcatgactgttgagtgagatttttgacaactttgattagagatgttttaatgattagaagaaatttaatacgaaggatttttacgtggttgagacattaatgagttttactctacgagtcactattcttaatgtagtaattctttacagaaggtttacactctatttttttcgactcatttctcaaaatgtagttaagatatttatccaaaatgagttggtcttaggtgcgagcctaacccgcttatgcttatgcttagaaccggcctttgaagtagttaccgataacttaattaaaacatactaaggtatgaaacttttataactgatacatgatttctaacattatcaaagtaatcaaagaggttcagaaaagatctattgtgatttcctttttaattttatatataaaaaataaaataagttaaaaaaatggttgtacttgtccaataaaaaaaaagaaacaaagatagtgatgatgtgggtactcgaactagggttcggttcttcttcttcttcttaatcaaatcttaaaacaaaatccgcagtctcctcgagtcgatcccttcaacttcaactcatcaaatttccctccaaattcaattctcaacggccaccaaccaaccatggcctcgcgctttcaggccgccgccttatctgcctcgcctttctaccccaacgccctcgcttggtccgacgataacctcatcgccgtcgcctctgctcatctcgtcaccatactcgtactactactactactactctctctctctcactatatatatatgcatgaatgtatgtatggatatgcttacattttgtgttctttcattgtcagagtcctgcaatgccttctaaacctcgaggtcttatcacgatcgaaactggcgagccttatccaatcggtgttgttggtcgtactggtaaattttttttcggcgtttgattatcaatcttatctcactttttttttttcagttttcaaactttgctctgttttttttagatttgttatcagatactttgcttccgactagtatatctcgtgacattcggccttgtgttcgatcaatttcatggtcgccgcttggattatctccaaattcagggtaagagactgattctctcattctctgaccttttactgtgatcgaattggatttgtgtatactgatttggtgcttacaatgtagatgcttgcttgctgtgtgcaccattgaaggacgtgttaagctatatcgtcaacctttttgtgatttctgtgctgaatggattgaggtatgatgtgattaaggtcaaagattttagatgaacaaattagtgaaattagtgaaatttgataaattttgttttttttcttcttcaggttatggatatatcagctaagctttatgattatctggaaagtactagctatggcgagttaaaagcatctattccaaatgaatctgatgtaagtttgatcttatcttgggaggcaatgatttctggatggttttatgttttgataaatttgattgagtaactttttttatttattttattttaccagaaattagatacagaggtagattctgatgaagactgcttaaatgtcattttgagaaagcaacgtaagcgacggagatcgattaagaatgtatccgacattagataatagttatattgtttcaataatatggttctgttttagtgttttctttcaaagctgttgttctacttgttttacttaactaatttcaggcgctggagactgatactggccaattaaaagaaagcaattgtatgcagattgtttctgtatcaaaatctaaggccaattctcttaagaagatacccgaaaagtccacactgcctctcataactgctgataaatatgccacccggagtgcaatactatcatctcttgtggttgcttggtccccagtgttgcaggtttcacccaaaatttgtgctattcctcaaaatggttcatccatgtctttacttgcagttggtgggaaatctggtaaagtttcaatttggggagtttctgtacccaaatgctactcgattgatctcagtagggtcccaacaactgcaactgttgtggggctcttgcaggcacatggttcatgggttacagcaattagttgggcactgcttgattctgaatcttcaaatcctctatttttattggttactggaagttctgatgggaggtgagttggtagcactttaaatctttttgtggcttttcttatgtgcaaattttgtgtggtcaagaattcatctacgtattatatgtgtaatttctcttttatcttttttattcggaaagtaatatttaatgtataattgttatgatttgttccattaacctagcattatttgtaacacaatgtttcatctttccctgagtagccttgtttatgtattcagcaactcaatcgatttcacaggcatgtctgattccttgattcactttgtgtctgaagtctgaaagattgtcttactagatgaaaataaaattacttattctcatcagctggttgtagttatcaattatcattcatattttattttattttgttttccagtgtcaagatatggatgatttataatgagcaattgttgaagtcaagcgaagctaatcatgcttccctttccctgttgaaagaggtaatgtagctcttgaattttttcatatttagaagtctacttctgtcttattaattgttagcattttgtgataaatggtctttttaataggttataaatgatgatgtcccagtttcagtaatttcacttactgtacctgctcagtcctcaaacaaaattttcttggcagttggaaaaggatctggaatttttgaagtatggatttgtgacatatcgaatagtaaatatgataaagttggctcgtatgattcacatgacaatattgtaagttcctttttgaacgttttttattttaattctagtcaaagctgtgtattaagtttttacgtattactaggttacaggtttagcttgggcttttgaaggacgttgtctgtacagctgcagtcaggtagtttgagtttagaagttttgtgttatgttttttccaattataatcaccctttctgtttcttttgtttttaacatgtaaatcattaccacaacctagttcgaatcattctttgacttcgaaatattttctgcagtaaaaatagaagtatctctggcaagaataaattaaaatttgtaaagttttttcttttgctaaattaaaatttgtatagttgatcactcaatttgtcctggtttagttatatgcttgagagcaagattgaaaagattttataaaagctagtaaaaaaaatattacaaagaatggattttttggggctggatgggtcaaaaaaatgttacttttgctagctacatatcatttaagattgtaactcctacgagaagctttgtagtgcatgactgattggtcaaataattatgtagatgtggaattcattctgataatataagtgtcgttgatactaaatgaacaagtatactgatgatgtattctttctttaaccactttacacaaactgatatgaaatatatgttatacacataaatgttgatgtcataatcataaataagtgaaatgtatcttaatgtttggctaacaaattcaagtgctattaggataattatgttcggtgttggatttggagcaatgatgttctatctgaagtaccacttccttccaacactcctcgcttgagaagcccatcagaagtatgctaccatccttacgttcccctttttccttcttttctgtgaaactctttatttggtttacaagtgtgaaaatgcagttgcagctttcacatacatatgcgtcatgctttggtgttgcagtctctccctcaaatctagtgattgctatggtatgacataaaccttgtgccctttacttgtgttataactaagtaggatggtaatgctgttatgtttcacttttttttttttttgagtaatgctgttatgtttcagttaattattggaatggagtataatgacatctacagtgccactacttattataataatttccagcagttacattttttttttctcaaatgttaagttgtagacagaaaagaacactaaaatgtttattcttaaaccttgtagattcgcaatttcgatgaagatttattggatccaatgtaccagaaaaggtaaaaaaaaaacactttgaaggcataataatgctatctatatctgtaaattttgttggtgtagaaatataggaacttaaacttaagaatcagcttgagaaataatggaaatcatttaattcagtaaaaactgaaacaaagatataaagggtcaagctttctggtttgtttcggaaattaagtgtcaaggaagatagggaatgttgattagctaatatttacctaagtaaaaaatgaaataataaattgcagggagtgagagaatgcaatttcgacttaaagctgctattcagcaaaagccttgatcatgactgcaagaggacaaagagtcagcttgctatggaaatgatcaggaaagataacaaactaaaactaaaataacaacattcatactggaaaataaagctgcaggtttccttttatctgccttagctaatttcttgaaaaaacatgccaggactcaaaaggctgctgttgagttcttctggattggtgcacaagaagtatctgttttgtcaaataactcctcaaccttcgctcttcctggtattcccgtaaaggaattgagttcttgggaggtcaatattctgtggtctttgaaacagtatgaatgtccaagcaaacctatcattgtttgggatatagtagcagggttactggcttttaagcgctttgcagcaaagtatgtagaacatatactgatcaagtggctctcaatttcttatatcggatctaataagtaccattctactgaaaagattttgttgcatatcccgaggatcttttcaaagctttcttctcgccagctacacctgctgaatattatttgtagaagggttatgctatcagagctgaaagctgaccaaattaatagcaaattagagaaccttaaagaactagattgctcagatgagaaactgattatttggattaagctgcttttgagcagcgaaagagaactccgtgagagacttataggtttgaacttttctacttgtgttagtctgctctctaatccatcaacctcactttcatctcctggaaatcggtttcctgttgggttagcacaaatgcagcaatgggttgcgcttaatcgcgattatgtacatgatccgttaatagtcctagcatcagaggttcaaaagcatgaaaagaggtacttattattttctttaaactgcttgattttactatgtctaaatttctcactgccttaaaaatgtgtgatacatttataggcttcaatcaagcaaaattgcaacgggggagcagtgttgctattgttcagctccagttccatttaaatctccagaattcgcacattgcgaaagtatcggtcagggacacaaactagctcgttgttctgtttctatggaggtttgtcttacaatcccaacatggttttgcatatgttgtcacagaagaacttccacactaccacccgaaactcttttcacattgcccggatacccttcattcgatttaaagtcttcaacggcctcaaacaatgcatctccaaagccattgtgtccattttgtggaatactactacaaagacaactgccagattttctgctatctgcatctcctgtgtaagttatcatgttccctaactttgtttcaagtgggctccaacccatgctttgggttagaaaagaaataatatatagtaataccaaattaattccctttatgcaagaaaagataaaataataaaatagggtgaaaaaatgagagaacaacaaataatgattaatgagttcacaaatcagcaccaaaaaaaaaggatatgacttgtggacaattgtagtaggtaagatctatatgatctatctgtctttattatattttatttatttattaaattaattatttaaggtcctaattatgtcacgtgttgtatatgcttaataaccaggctgtgtaacatatgccctttcattattgtaatctctgtattaattacaaaaataataaacaattgatcatattttaattgatgacaaagatatataatatagataatatcaaacaactcttaataattgtgaaaacctatattagaaaacatttgttttttcataaagtctcctattaataatactctatagatttaaatataaatgctttctttaatactatagctactaatactgaaaatgctccatgatttggttttagatttagatttagatttgttttagtttactcttcttcttcttctttgtttgtttattaagtcattgcttcaaactttgacttaaaattgtattaaaaaaaattaacattgaagatattctatttctatatttctatttcgattgtttttcattttctttcgtttaagtcgttgaaaatgatggaagctctcactcttggaattttggttattatgagctaagaatttccgttgtgatttgtgatatttttagctttatataggaagtaacttgcttgccgtgagggttgggcagttttgaccacgcttttatatctttatttttctctttctttttcacttatttacattgatatgtacattgatatgaattcaattgtacaaatgatttcaaaagaaaaataaaaatcaattggaatttggacacatatttaggggtggcaatcggtgggttcgatacgaacacgagttgatattttatgagttcaggacaacatgaaaattattcaggtcgtgtttgtgtttataaattattcgtgtcatggattgtgtttgtgttagacatctaaaataaatttaagagctccacacaaatataatttgatgacactaaaaataacaatttagcttacaatttgccaacacgacatatgattttgtagtttcgacatgacacaaaattcatttgaattgtgttcgtgtttgtgttttataaattttttgtgtcacaaattatgttcgggttagtaattttttagtaaatttaaaatctcaacacgaattgttattactaataatatgcaatgtataaataacatttagggtagacatgttatttaagtatccaaaatttaaaacggaaaaaaaataaagagaatttgttttttttatttgaagctatgtttatgtaatataattattaaatatatgatattgattcaatttttatttgtcaattgttccaaaaaaaagtaatttttaatttaggtatttttatcgttcatttagtatctcttgtattttaaaagggaaatttgattttttatgcttacatattcttgaaattttttccttaaacttataatatttgatatttgtgggatatgacacattttataatattccta

SEQ ID NO: 110508 - DNA, 1162 bp, Cannabis sativa
attctttattattttattattttaatactaaatatatataattatttactttttcttctttaaagtgttatttaattattaatttttttttttaaaaatagtgtggtttagcatcccactaaatttggtgggacactgtagacaaagtcatttatgaggataggtttagtgtcccatgagagtaaatataatgtgaaactacactatatttggtgttttagtgtcccattggagatgaccttattggagaaatatgagctcttctggttttcaaactcctatattattctacatataggctctcattaggtcatgactaaaattttttatcagaataaaataatagaacttgaaatttttgtcactgaaagatctaaattctaattctatcaaaattattaataattaaataatgcaattaaatcgtcttttttcaaacaattaattagttaattaaaaaaataaattgagctaaaaatccccatagtggccgaaattcacttatgagacttggatttttctcttcaattttcaagcccattagacttatcatcttttttattataacaaaattaattaaatttgatgaattcaaaaactagttctataatttaataaaaattaaatcctaatttaaatatatttattaatttaatctttaaaattttataattaataaattaccttttacttctctttccttctatattttcacaactaatcagaaaattctcaaaatttaccaagtcaaccttgtgaattttaattgataattaaatcaattaattgaagacttctagttgatattatcctaaataatgtgaggaccataaacttataaaattaagctctcaatatataaatataaaatttaacaaataagtttcttaatttatttgtcatataaggctctatacattaaatataaatacaatatgaattatttattgtttcaataaaaattattaatgatcaataatagacaatctacaatgattccttaaatgtttgccttgcattagatttatttgttttacttaatgatttatctttggcttaatacaactagagacggaaatttatacagcggggatgggtaactgcggggacccgcttctaatggggtggggattccccatcttggtggttaatggggcggtgg

SEQ ID NO: 110509 - DNA, 1660 bp, Cannabis sativa
  modified_base (43)..(82): a, c, t, g, unknown or other
atatgtgtttatttcatcgtttttagaaagttcatatttaggnnnnnnnnnnnnnnnnnnnnnnnnnnnnnnnnnnnnnnnntaaaataatttccaacacaacctaacccaacattcctatttctgatgggttgaccattcctggtaagcaatccttttaaagtcttcaatagtgacccaattgatctgacccaatccaaaggtacccgtaacccctctaatcttcttaaaatgattggggcctctacttcttatggaccaagacctaagcccaataaggcaaggaagtatgaatcccacaggatgacggtccctaaagggataccaaaaaacccatttttgggggtctgactaaacccgagaatttacaaattggttctaagcgcaaaaattaaaatccccttgagaaaagtctcatcttccagggcgataatctaaattgcacctctgtgggttcgaagagggatgagtaaatgatgtgtttcctgaaaggagtgctatctctaatgatgttcatgttccgatggttggttttaatggagaaaataatggttccccctatgttaatcctatcattttttttggtggaatgagtaaaaagagaagaggttcgccaagtcctacagaggtaggggagtcgtgtaatcttattccaagtatggatttggaggagtagcgatttcaagaaaatgatagaccccgtaagtcgaaaagaaagtcaaataaatctaaaattttgatggcactagaacaagacaatggtctctttgaggagagtgagtatgtctcagcgaatatcaaataccatctgaaaatgagcttcctacaggtgaacatattttagagtcctctagtttgattcccttttaatagatgctaatattgaaatggtaggattattcataatgatattattgggaaggaggattttcatgtaaccgaggaagcgagccttattgttccccccaatacctcatgcaggcggtgtcttggaacttcttgggtttggggaaatccttagcagttaaggcccttaggggttcggttcatggtgaagattctgacatcttttatcttatgaaaactaaattgaatgtgcctcagatgaatcatatatggcaatgaatatggtttttttgtgtcgtggttaaggatgttgttggtttggttggtggattgttcctttgctggaaagttgggattggtgtggaaatttttaggtccaatttgtcgattatcatggccaaattctctaatattttgcatggtgttgcttggttaggggtttgtgtatgcccttttgttcgtagtaatagaatggagttttggaagcacttgtccctggaggttattgacttttcttcttcctggttcttgttggcaaacctgaactgtgtctcggactagaatgataaaattggtggtgctcagatctcttctcatgatactcaacttcctaatgatttccttgactctattggagggatggacttaaggattgtgggaaaatttttcactttgtctaacaagagaagaggcatggatttgattaagaatagacttgatagatgataactctatggtatagagttatttttatgcttttaaactgaaattattgtgagaagagtagtgaaaatgtgtttgtttgcttaatttt

SEQ ID NO: 110510 - DNA, 6623 bp, Cannabis sativa
gaagagaagacgatagtaaggaaggggaagtgaacggttggttcgaagagggaagagatgcgctagctacttgctttgttagaaagctaagcgactagtttactgttgagaggtagcgaagaggacagataggcaggggttagcgctagctagtgttagagagcttgctggatgagagcagactagactgagttccacttccatactccagtttacagtacagagggctaatggctggcttctttgtctagtcccacctcttcaccctaagctcttctcttagttccatccatacacaagcatcccctttctctctaacaacagcaagtagtaaactacctgtcctctaacaagcaagaaagccaactaccttatctcattagcgaagctagagtacatgagtagactgctttcttagttataaaatggaatttataaacaaactttctgtgggctttgctcttcaagttatcggggataaaaacctcggcttgcccgttcccctgtggtgcgggtacctcggagttgaggcctgctgcaaaatcccatgctccttgcagaatgccgagaccctcctttgaattgcttaccgttgtcagtgatgaccgcgtacgggatcccaaatcggcatatgaggtgctcccacatgaattttaccacctcctgttgctttgggaagaggtcccactatgtccatcccccacatagcaaatggccacgggctcgcaatcggatggagttcttccgccggtgagtgtatcatcttcgagtgtcgctggcacttatcacatttgcggacataccttctggcatctgcctgcatatatggctaaaagtacccttgagatatagctttatgcgccttcctcccgagtgatccccgcattccccttcgtgtatttctgccataaccaactcggcttggtctgggtgaagttgaggtgaggtcctccgaaggacattcgatactgttctccttctagttgtatgtacttgcccgccttctgccttatctttgctgcttctctcctaccgtctggcagttccctgtctctcagatagcgaatataggggtccatccagctaggtccgaggtcctgtgtcactgggaatgcctcggcatgaggtcggtttgctatgcttggctcgggttggaactcgatcgggattgttcgggcttcggattcccccagcattgaagcaatataagcgagtgagtcggcatgcctattctctgctcgggggagagtcggtagagacccgccgttctcctcatagtatagttccgttccgtcagggccaactcctcctggatcagggccaagtaccgcgccatccgttcatcccgcgcctggaaatctccattattctgatttacctttagctgtgaatcactgaaaacaaaaatctcgtatagtttcaattcccgtgccgcccgaaggccgttgagcactgcctcatactcagcctcattatttgaggcactaaaccctacactgccttctccaatcgatcatttgtcggagtcaccaatacgactcctactccggaccaatttacgttcgccgacccatcgacgaagagtctccagcctgactcgggactccatgggttgggatcaccatcacatgggagggtatctttctcgtctggctcggcatcccaggtcgggtcgtcaactgagcgagaaaatccgctactacttgtcctttcccggcagttcttggctcgaaggcgatgtcaaattcccctaactgcacggccctttttgctattctccgcgacttttcagaccgctgcaatacctccaggagggggtattcggcgaagaccctgatccgatgtgcctgaaaatgcggcttcacactcggcggtccactcgaaatcattctttttacggagcagctcgaataaaggtcggcatcgctcggaggatctagagatgaacctattgagtgccgcaatccgccccgctagtttctgaacctgcttcacactgctgggtgaaggcatctctgatagagctcggatctgctcaggattggcctcaattcctctcagggtaaacccccaggaatttccgatagccctcatatttctcccggttcaagcgcatcttagactctctgagccgagcaaaggtcgcccccaaataatccaaatgctgctctcgcttgcggctttttactaacatgtcgtcgatatataccttccattgtcgtgccgatcatgtcgtgaaacatcttgttcaccagccccctatctagtaagtatgtggcacctgcattcttgagcccgaagggcattactctataacagaatagcccttgcttggtgataaacgtggtcccacccaatacaccctgctgaggacgtacagtgtcttgcacgttctggccgaagttctggcctccgggattgttgtttgcagttccctgagacccatttggctgataatgggttgtcattgggatcaatttgtgttgttggacttgccctcaattattcttgcctgaggatccttttcgcttggcatgctatctcaagagaacgaggagagtaggactgaagaaggagtttgtgactcggaaattggggaagaatctccttgagatagggtatcggatgttttgccatgatgatgatgacgaaagtctgttagtttgggcctaggcctttcagaaaccagtataccttgtgcgtctcaggcacaggacatcctatcgcacacaagactcacatattctcttaaaggcacgcgcacctgacggaacggaatgaaatctaatgaccggaaaactgcttcccaccgcattaagtgcatgcaagatccaattggcttggccactccataagaaaatatctttgaatagcttccaacaaccaaggggaatccaaaacagcgaaaggaagtcaatttgaaggctatggagacaggatctcagtagttagatctgacctgcaaatgagaacaaatggacccaggctaacctttgcctagtacacttcaacaccagctcccaaagagctttagagcaccgccctgtgaataatggcagcccaaaatgacgtggcagggatggattgtgagagatggaaacaggagtcaagtcccgaagcagccccctaatcaataagcctaccaagggagtccgccatcaagattcatcggtatggagaaagagaatccccttgtctagtctctctagtcccctgaaagtaaccttagggggggcaagtagataagattgagtatgaaatcgtggatacacaagccctgatccactcacactatctagaggtgaaaccaaactgctgcagcatcctcaatatatcagaagatatcaaattggatatctcttccttttctgctccccttatactttctcgaattcttccggagaagccttttcttggtttaatctcctcttcagcttctccctttctggatctaggtagaaaacgggcttcttttcttcttttaaacgacgacgaccaagtctttgaatgagcttcattttgaaaacccccttctcttagatcaagactttcagctgagatatcaaccgagaattcttccttctgtgcttcccaatgcttgaaaaaagattaaccgaagttcaagtcttgcttgaattctttaatatgacttcggttaaggcctacaatgatcactccggtggcttgcagacctccaatgatgacgaactaaattcttagagcaaaaaaatttcagcaaagcacggtcctatttcttaggcaggatctgtctcggaaactattcccgatctcctgtagtaggaaacagagaactcattactaaagatttgttttagttaacgggcgggtaagggcagcaatgaaggaagactttcttggagacgaaactgattctatggattgagtctggcagtgatgttagttaagtccactacctggggattgtcttgcttgagaacccgtttggaacaatctggattttcccctgtgagtcactcgaattcttatatttttcattctttcatgaatagaaagatctccgcttcgtctttcttccaagaagagatcccaacccattgatattggtcatgcatgggctttaactcaatctttcactatgatctgaaaggaatagcaaacaaagatattagccaagcgagatagatcattagggataaaaaaaccttgccttacttcttccttcctctgttaattcaatatctgtctcgcctgcgaatccttatcctaatctgagattgcctgctattcctaacagaggcgatgaatatcgtgactattgggataacatattcatatgcctctatcaatgtattccatccattacacccggcaaagtccttactacatgcagcagtaggcgggcattaaaacacgagtttcagcggtctctgctagaaccctatttgagagagtttcaaaggccttcaggagcgtagcctttcactccgttcctcgcacgcttggttgcaaagggctatagtcagagagagggtgtggacttcaatgaagtattctctcctgttgtgaaagacagctctattcgcgtcttgcttgccatggttgcactctttcgatcggcgattgtgaaaaagagacgatttgaatattgataagagatatccttcctataattcttctatggctatttccgatcggatcttgccaagaatacgctgttgtttcaatgtcattatcttcccttcctccaagacaaaggagtagcggggaaactgactaacgtcagtctatagctcctctagggcccaatagactgaattagtccttctaccctgccaaggcgcgaagcgctagttgagctaggagtttcaagcgctaagtcctttccttcgggaagtcattccaggcaagaaagccaatcagggaggaaagcaagtcagtcaaacggtagcaagccagttccctcccatcggtcctagtcagcctctttcctgtctcttgtgcaaggctagctgtccatagcgcttacatgctcgggctcctgtctgtgatagaatggtttcatgctcttcccctcgctctgccttatccaatcggggattttttagaactaatatctgtcttttgatgcgggaaaatgcaacttttgaaatgcttttcgtaaggcaaggaagtcagtgcaggtaggcgagggcagttccggtctacgatttatgggtgtatatactctttccttttgtcgttgtagcaatctttcttagtgcacccttaggcgagtaaagagagaatgcttggtagcaggacagtaggagttcagtaggcgggccagtagcacgcatgccaaggatagctgtccaaggtctcattccattcaatccagtagtaaaccagtcagctagctgaagttagaaagttcagaagtagctgctctcctagctgcacattcatcgtatataatagtatgccacactgtcctttcctgtcgatggtgagtgaaaaagatgattcctataataagcatctcatgccatggttgttgtgaaagaagaaactcttggaggaaatgccttcttagcaattgaatcaactcctggtgatgaagaagaagaaggagctgtgaggaagggaatgattgcactagtcccacacccacggacagaaggaatagaatacgctctttgaaggacgttaatcaataggagaagatagccacgcacaagaagtagctgcgctatttcattctctcccactcttctagctctgatcgtaaacgctcttcttccaataggagtgattctttgccttgacgctgtgagagcttccggtccttgagtatgagactcctatccgctcttgggttcataaccggtcctattgaatcagttgcacatgaatacggtcttctcggctttccctttcccgggatttctccttggctttgactctttcgatctctggtctgcctgtctgtaaccaatgcctggatgactgtcttggctttctgtctcgactctcttccttcctgctgtcttggtgaagactgtggtagtggtatcggttctttgcttggttgattgaatatctctttccttgcctcccgagagtagccttagtcttaatccgcctttagggagtgaagtgaaccgggggtgatataataagttgtgaaagaatcggtttagaacgtatccgctgttttagccatatccgttgctagagtaaccgctcgtcctttcttcctagatgctttgaatatccccgtcgattgcctttattccggattactagaaagttattcaaaaggaatttctcgacccggaaaaatgaaataagtcaattgccactggtcaaagaagagacaagaggagaatcaagacaaggggggatggctaattccgggaataggaaatatcccaaacccttgactattcgacctgctcctcgaagcaaggaagggaatgaagatggcatagaatgccctgttagcaagaaggaaaggagttggcttaccgcatctaccttctcatcggcgggataagggctggggcgttaactaagtactaaagctgctggagcggctgccttcgttgattccccacgaaggaatcggaatatcgctacttccccttactgtcctaagcggg

SEQ ID NO: 110511 - DNA, 5575 bp, Cannabis sativa
aaaattaaagtaagttgagcaaaaaattcgaccaccaaactcgataattaagttgcttaccataaaaatagaaatatgatagaatcacttctaaatataataaaatagcattcaaaataatatcatactcattataaatttgtatcttattagataatgaatttgccaaacacaaacaactagagaacacacaaaaatgagaataccccaatctcttacgaagaaaaaaagcatgtaggaaggctaaagccttgccgccacatgaggttcaggcaagccatctgctaaagtatcagcaaaacaaagcacatcaccatcagaacaagctacaaccacctccgataccaaattgcctcctttcagtgcaaatactaatatccactaacaaattaaacttacccaaatttaattcacaactcgccccttatgtgattaggattaaatttttttcattcaaattttgacatatatcaaatcatattttatgaatttttcaaatcgttaaattttttttttgaacagttgagattgttagatttaaatacttttttttaattttatattttactatcgaaaacctgacgtgaattatatttcagattggtacgatttgatacatattaaaatttgagagcacgatttactacttgaacaatggctacgttaataaaattaaataaaattacacagaagtctttaaattcaacaatttcaataattttaaaaaaatttattcaaagaacaaaaatgcatattaagataaaagggtctttatttttaacaattggttggttttatgattaaaaaagtatattgtaattagtaaggtaattatggataaattagaattgaagttatatgtaaaaaaagagtcatttttagtagaaagaaagaaactttgattagatttgatttgatcacataccaaaaccaaaaatcaaagctttgggaattggtggaaatgtccggagaagaagaagatttcagcgaagctacacggttgctcagatcatcttcacccacctccgatcatcttcatcatcatccagtatcggcattggcagtgataacaccatctactattgtcgatgatttggaatctcaagacccaatccccaattccaattcaacttcttccccttctcttctcaagggtcttttcactcgtcatttcgatccacctttctctcctcgccgactcagtttcaagcgcagagaacgcgaacgagattgggagcgagaacgagaacgagaacgagatcgactaactacttctacttcttcttcttcttcttctactcatacagattctgattcagtcgatactcttgctgattccgctcctcccgaatgggctttgctccttattggttgccttcttggactcgccaccggtctctttgtcgccgcttttaacaatggggtaatactaataatgatttcaatgattcaatttcattgtaaaaacttgttcttttgtgcttattactatacccatttttgttatatatttgtttccttaataattggaacatgaacacattattctctgaaaccttgacaatgcatatggttgttgttcttgttcaatttagatctaggtagagactgtgacatgttaggccttaatgctagcctcattagtataattgattagaattttagaggctgagttgttggctttaagtgagctatcttatggttctaaggtgttaaaacagttaagggaaatttagtatgaatagagggctgatcatttgtaagaggggaggaattgttttgttacaaagtgagtaaaagattactcggggagataccaaactgtctcgaaaagtttggaacttttgttctcttgatatcatgacattagactcactgtattggcaatgtaggtgcatgttattcatgaatgggcatgggctggtactccgaatgagggagctgcttggcttcgtgtgcagagacttgctgacacttggcatagaattcttttgataccagtcactgggggagttatagttggtatgatgcatggtttacttgaaatattagaacagataaggcagtctacttcttcgtctcaatcacctggaggacaaggatttagtttgctttctggggtttttcctaccataaaagcaatccaggctgctgtcactttaggtaccggctgttctttgggtcctgaaggtcctagtgttgatattggaaaatcatgtgcaaatggcttttctttgttaatggaaaacaatagagaaaggaagattgctcttgttgcagctggtgcagctgctggtatctcttcaggtatttcaattactttttcctctctttgaattgtttgccattttatgtgtcgtaattatgaaaaggtaacttgcttttgtcttatgttggccacaaacaaaacagcaatgataaactttttcttctttttttaatctattctcattgtgacagatcatgttagatgaaatcatgaaacgttgttgttcaatgtacgattcactaaatagcactaccatatgcaaaaagaaaaactcatgatcctttttcttttgccttattggaaagtaaaatggcagtccagattatatgcttaagtgattaaaagcatgtactaagttgaattctgcatatatatatatatatatgtatatatatatattaaagcatttcgttttacatttataatgtcttcataattgataattatttttgaaaaaaaaaaacttctcaggttttaacgcggcagtagctggttgtttctttgctatcgaaactgtgttaaggcctcttcgagcagaaaactcacctccatttacaactgcaatgataatcttggcctctgttgtatcatcgaccgtgtcaaatgtttcaatgggaacacaatctgcttttacagtacctacatacgacctgaaatctgctgctggtaatgaaatttgctctccctctctctattgttgctgttgttgttgttgttgttgtttgtaagtgtgttaaacaaaaaagataactatctagggtattcaatgtttcacatataagcttatcttttatttacacagaactagagtatagatgcgtgagtattgtttttcgactataggtcaatcaaagctgctgttgaaagtgcatcatgggacaaaacttatatattatgtgctttaacaatctatggaacgaaatgtggtacaattgtttttggagttggctgtagcagtgtgaatatatgtgacccgatatgatttgaccttgcagagttacctttgtacctaatattgggcatgctatgtggtgttgtaagcgtagtcttcactcgtttggttacttggttcacaaagttctttgactatatcaaggaaaagttcggccttcctgccattgtttgccctgctttaggtggtttaggagctggcataattgctctcaagtatcctggaatactgtactggggtttcacaaatgttgaagaaatcctgcacactgggaaaactccttcggcccccggaatttggctattaacccaactatcattagccaaagttgttgccacagctctgtgtaagggttctgggcttgttggtggtctatatgccccgagtttgatgattggcgcagctgttggtgctgtttttggtggtgtagctgctgaagttatcaattctgcgattccgggaaatgttgctgttgccgagccacaggcttatgcactggtaaaatgtcccctatcgtaacaactttcttttggatcgccatcaaaatatatcctcactcagctatgtaatttatttaagaaaactttcaacttgtgcaggttggaatggctgctactttagcttcagtttgttcagtgcctttgacatcagttttgctactctttgagctgaccagagattacagaatattgcttcccttgatggtatctcatgccttgctgcacttataaatatctcctttttgatgatcttgttttcattcttcaatttttttttgttttttggtggtttcaaatgttgtgtgtctcttgtagggggctgttggattggcaatctgggttccctccgtggcaaacgtgggaaaggatgctgaagcatctgataagccaactttgggaagaggatactcttctctttcgcctaatgaagacaaagatgaagctgggtggagacgaaataataatggagatgatcgagaactctctgttatagaaaaagctgcttattctgaagctgctaatgaagatattctcttagaagatctaaaggtttactatctattgcttctccactcattggtctttcgatttttatctctattctttgacttccctcaatcatgcattcgtctttgttggcaggtttcttatgtcatgtcaacaaactacctgaaggttcctctctctatgactttgaaagaggcaaaaaagcacatgcatgaaaaccagcagacgttcgtgctggttgtcgacgatgatgactttctggaaggaatattaacctacggtgatgttagacgttgtctatccaagaggtctagtgatatttccaagtccgactcaagatctctcgatgtatgtaattgcaattgcatgattaataggttttgtgcgccttttatttattcttccttccttagactcgtgtataaattcttatgttttgcttgcaggcaaatacatgccttgtttcttctgtttgtactcgagggattagctaccgagggcaagttcgtggactcttaacctgttatccggacactgagttagcgattgcaaagcagcttatggaggccaagggtatcacacagttgccggtggttaagcgtggtagagattctataagagagcggaagaggaggattgttgctgttcttctctatgattcaatcttaaaatgtctcaggtttgcacgaaacaattaaaaaaaaaactggtttcactttcatcttgtgattatttattcattttatatcttttattgattctgtgtggttggtcccgaaattactgtttattcatttgattaaattgtttcatttcaaataaaagtcttgtaaagattgattggtgtattcaagagaatgtgcaaaattattcaattgtttcatttcattatagccattgtgagtgaaagattacaagaatttcttttgtggtaattccaagcaattgttggatgacaatgattacaaataagcagttagcagttacaggtaaagcaacagtgacagtttaccaactaataaaatcatgaaaatataaagttgaaagttatatatagagcttattgacacacacacaataggcctttctttggttgatataaagtaaaatatatcatcattctgagacatcatagggagacatgttaaattgaattgatgttttgctttaatcttctttttttctctgtgttatgtgcagagaagtgatagatcggcggaagttggagtacccacaaagaaaagaggcgaattcggaggaaatcattggaaatggccattaataatgactggagctattcttgaaatctctagctgttcccagccgatacaagttaatggctcttca

SEQ ID NO: 110512 - DNA, 7676 bp, Cannabis sativa
  modified_base (4962)..(4966): a, c, t, g, unknown or other
agttattccataaaaagcaattgcatcgattcacattccctttatcttgacatatgtcctccactgagatggcagccaaattttgggtataacaagtagatatccataatcctgaattgaatcaaacgagtcttactgatgagctgttcaacttccacttgaatatctagtgttcttgatggcgttgaagaatcggcagttaaaactggggtgattctcctagattctctcattcatgaatttgaagaagaagatgaatgtaatgattgatataatactccaaggttccctcatttgtcatcgtcttctctgtgcaaattcaaactcagtttgagactttgggtaaaagttgtaaatgggaaaatttcaccatatttatacataaaaatggtgttctgcgcgtgacctcagatcaatggccaagattatgtctaaaaaaccacaagaaaaatccaacagtttgggaaaacagtcacatacgcatttaatgtgatgcttgacaataagatacaaaatgatgatattcttctcgagactcgcactaatcaattgccatacatcatccgaggggaagggtgctagattccataacacctagagtttcagaatcttggtggtaaatgttatccgtgtttccagatgaggacacgtgtaatttccaaagctagttacaacttattcacttgaggcccaatagcagaggcccaacaaagttaatggactagatccattagcgaagttagatcttctgaatcacaaatagatagctcatccagtagacgtccaaaaaaatagcttcatatcatactcattaattaccagatcccatgatatcaagatttaactctcaagatctcacccgcatatatatcttcccgatatgaaaaaatagtaattatcaagcaacatgtctttattatccatgattataacacgcaaattgaacaactatcaacatgacgtggcatccacataaaattgctcatgcaaattctagggttcaaatacttgtataaatcctacaatcagcacctcatgggttgggctccactagatggttacaaagtcaatatattatttatatttaccccatcagtggaaaaagggaaacaaataagaatcctagcactataaatatgagaacaccaatgcatgcaaagtgtttaaatctcattcctcaattgctcaggcaaattctagggttcaaacacttgtgtaaatcctaaggattttctagtcttagcgtaataatattgacttttggactaaggttcgttcatgccccaaccatgttaaaattatatgattatttctttatctttatatatttctttatttcacatatattttattgatttttgaaaatctccgtaaacaactaggttttttgttttagaaaaattagtcaaatatagtatgttttaatgaaataaaattaaatatttctgagttgttgtgtccagctatgtattggcatttatctgaccatttattgaagatttgacaaggttttgattggagaaatcaaattggaagtctcctttctataaaaggaaacctgtatttactgttcgcgattttgtaagtgcagaacaggacattctaagttgattaaagattttttttaaaaaaaagttttctatgagttctagacgtgtttagtccgtgtatgtgttgtctgatatgagtacaacttttataaatactcatattagtagctgggtcttttatctgttttcatctctttgtatttcattccatattttgtgagaaagagtacctttattttatagaggagagtgagttcgactctacctctatgtatatgtctttgttattattttgagtctataatcaaatcaacaaataagaagaacaaaagtgcaaatcttcgggagaaagttcttgaagcttatgggagaaagtgtttcaagtctttcctcaagaggaagcaagtactcttcaagcaaattgaagggagtttgaacacttgaagtttcagcagggttcattcatcaaggtggaattcatcaagcttgcgacttataagaagagtgagtctatttatgcacaagttaaaaactctatatctttgaaatcttactaatgaattttatatgtgggcgtggtcccgtggactagtaacaatttgctaggattgttgacacaacgtctaaaaatattgtgtttgctggttctctattttgcagttacaaattcgtgttcacttcgtaatcgtgttgtagttatttagaacctaatttttgtgaaaaaaatttaaataatttatagtgccgtaattttttttaatgtgctcgtgattattttttcttatacaagtgataaataattatttaaattttattaatgacattaaaaactattaaaagttttagagtaatctgcgacataattacctaagtttaactctcagttgcaaaaaaatacttaagtttaatttttggctgtaataatagctaagttatatttttgaaactctgtaggtaccttatcattatatgttaagtcattatccacgtgtcattttcttattggtgaaattaaattcatttttttaaaaaaaaaaattatatgacttggaccaattatgaattgccatgtgacaatttacttaaaattgaacagcgaggtacttacaaaagttccaaaattataacttagatattattatcgctaaaaattaaacttattaagtatttatttgtaactgggagttaaacttaggtatttataccgcaaattactcaaaattttataaaacttacaaataattcataataactataatatatgtaaataaaaaattaaaatagactatcttactagattgtcaaaataataaagtaggagtgtataagtacaaaggagaggagtgtagtgaagacttacattactagacagatttcaaagattattatacaaataattttgttaattttttttacttttttcaagtaaaatattaaataatagtaaaatatatatatggtgtttaattttttttaaggggatattattagtgaagcgacaaacatgcaaatcattggtgaactttatgtatgtccattaataatgagctttgtacttgtcaacttaaaaatccttcttcagatttggtataactcactatatgcttgcaagattttatttgttcctgaaaacttaaaagggttatgctgatgatgacacttacctaatattaattacttataatattgtaggaaaattttattatacattttaaaagggatggactcatacatttttatctgttttagtatttgacataatattttaataaaaaaatttctcgtggtcatgtacgttataattatttaagacatactttaaaattttaagaatttcagaaaaaaatttaacacgccaaaatcaggatttaaatagtgtatttcatgtgtgactattttattttatacgcgtgtaaaatagattgtttgaatactactttttatattgtaaatgattctgaatttcttaaaattttgtagaatatcttacataactataacatacacgaatataaaaaaaattgaactaaaacattcttcaaaatatcgaaataagtagatgatgcatcaatgtatctcttttaaatgagtgcgttgtagaaacacctaatattatatatatttatatagggtaaatactatatttgaccatatattttgttaaagttaccaactagaccttctgttttgtcaaacgacaaaatagaccttatattttccaaaatagtaaaactatgaccatgagctcaatttttaacaattttattttttaatataattaactttaagacaatttctaacacaaacagatacagaatatgttatcaattttcttataacatctttagatcatattataattaagttttattttgacaaaaaatcagttcaaggtcatatttatacaattttagaaaatacaacgtccattttatcatttaacgaaataaagaatttaattaataacttttacaaaacacaaaatttaaaatagtatttactcatttatatatttacatcaatttctgaatattattacgcaaccatgaatctcacgtgaaaaatagtgtaaaaataacaatagtagtgctctaccaaattattaaaatgctattcaaatttctgccaacaacaaaaattttgtcgaattcctatatatagtgattggcggctacgaaaatataagtgcattttcacacatgaaaatacatcgaactctttttttttttttgaatgttaaaacaaattcacatggaaacttatagcattttccaagcaacttcttgggaagtattaattaattatcatttaggtaaattgttataattaaaaccactcctcaattcctcatgcatcaacaaattatttatttacaaaaaagctttaatttatttatttaataattaatatcaatttgtaaagtgtgattgaccctttggattacttgttggtcaatgcacatgtgctcattttcttaatatattaatatgcaatatagttaggtatatacacaagacaaagtgtctaggtttcttaatttaaagggtggaggagataaaaagttgggaaacaataatatatatcataatatcaacatgtttggttgaatgtaataaaaaagagagagaaagagaaaaaggaaatgaatataaattattggaaaattctataatgtacctatttaaaagggatacattgatacatttctatgtgttttaatatctgaaataattttttagtcaaattttgtcttatggccatataaattataattatttaagacaacctgtaaaattttaagaaatttaaaaaagtttaataagccgaaaaatacatttaaacagtgtgttgcacgcgtgattattttattttatgcgcgtgtaaaatagactgtttgaatattattttctannnnntaaattattccgaatttttcaaaattttgaaagatatcttaaatagtcataacgtacataaatatatataaaaaaaacagattaaaatattcttctaaatgtcgaaacaagtaaagagtgcatcagtatattctttttaaggaaatacattgtagaatcatccatttattaaatgtataaagttttttaataatatatattatgaaatttattgttataagtacgtattatgctataatttcatcaagtaacttatatatatacatatatatatatatatattttgaatatgaaatatcaatttcattgaaataaagcattcaaattacaagttggcattataatctgccaagacattaacatcatgaatgctacgatcagaataaaaacaagagcgtctagccacatagtgggcaaccttgtttgttggtcgtttaactaaatgaagactaacattagatagagaggataaaaaagatttacaatcatgggtaatcaaacaaaaaacagaagtcatctgttgttgactgaaaattgcttggacagtgagtaagctatcagtttcgacctctaccatattctaacccttgtctttgagccaacttagtgcttccttaacctccaaagcctcaacaacctctgcagagaaggacccatagaagtatttagccacaaaatcaatgacattaccttccgagtcacatgcaacaataccgtacccatatgcattttcagtctcaaaggtagccccatcaacattgatcttgatcgtattatcaacgggtttagtccaatgttcaaagttgttatcaacatcaagtaacttatattaataataagcatcaacatcaagaatattgttcacgtttaaaatattgatgttaagagaaaaagaaagtcatgagaggtcgtaggtacgtagtacaatttctcttttttgctatcttgttttttccattcaaattaaaatgacctcggtcataaatgtcaaaaatggccgcctatatagtctaataaacaagcccctgcaattgcctttgttatatgttttttgatttggtttgtaagtgagcaaggaaatcgtttatggatttcagaatataaaatttaggtgtagaaaagtattaattatattatctactaaaattttgtggaacccactacattctcacgtaaaaaaaatacacactaaataaaaagttctcttcacactacaacaaatcaacttattaacgatgggaagatccattggtaataactttattttttgccctaaaagttattacaggcaatattcctagtactacaccgtcattcagagacggaggtatgggttagctcacaggagccatggccccccttcaattcttcaaaactcatttttttatatgcagttaatttatagtacatgcatgcaatctataacatgtccccctctctctcaccttcaaaaaaattgtataaataacttgttcacttattcaaatcatatatatatataaatattttctcatcaattataatattttttaatataagaaatgaatgtataattatattgtactcgtacttgttatttgaattagataagaaaatttaaatttttggaaagtatatgtctcatttaattagaaagtaaataaatttgtgactcttaataagttcacacattgtatgaacttattaagaatcgaatcaggagactaaaagtaggacctatcaagctaggaatctcagagataataacatttactatatcagaactgattataagaggaattcaggtagaaattattgaataaattccatttataatcagtccctttacacaatatccacataagcatacaacaacgcatatacaacagaaaatagactcaatcctaggtggctttgcctctacaaagattcagaagttagttacaactgattttgtaactaacttccagctttgatcaaccgactccaacacattataaaagcaggaaattaaagcaagcacataacacaaaacagaaaaagtgaaagcgaagagaagtaaaccctagattaaagctccatttccaagctccaaagagtgcaggtccaaacagagagtaatactctcgtggtgaggaattttgggggaggagaagtacatgcacaaagaagaaaacaaagtcatatcaaattactgaagagagaaggaaaaatagagctgtaaaatacataaaatcgagtcttacctggtcgatcttgtgacaggaagctccaaagcattgtaaatcacaattgttgatagtggatatcaagctagatctttcagatgagcttgacagagacgtagccctaatttggggtgaactctgaaatatttcctggtgtattctctccctttatctcttgtttttcatttgtttaaacagacatgtgtgtgtgtgggtaggattctagggttcgtgcctagaatcgagcaagttcttgagaagaacttgctctgctagggttttcatttcgaatcagagtggtgtgtgttgtgtttcagggtttctagactcttcttggaaagtctttaagccttgggggttaaacgacacaaggtttggtgtcgtgttagtttattggtgccgtttttgtctagattcacttagactaaggaaaggtcgaaattgaccttggatactgataataatgttttgttggtgtaggttaaaatagtaaaattcctaca

SEQ ID NO: 110513 - DNA, 6978 bp, Cannabis sativa
tttattaattaattttattaaaaaaaaacaacataaataaaaataaatattaagtaagataataatttaacaatcaaattgattacttgagtatcttagccttgaacaatattaaaataatttaatactttcttgactgacatagacaaatcaaagatacagatgatcattaattatgtcatctaaaatgcattaattgtctctcctttcttctttagactttttgaattgaccccagtccaaactttcgattgaccagatctccctctactgcttggtgatggtactgctgtcaccagagactcagtaaacttcctcggtctccccctctttctctttggaggctttctttcgttggaccctggggagaaagctgcatgatcgtccttaaccaccaaagactcctttgagctactcttcgcacgtgatgcaatcactgaagtggaggcttattcgtgagaaggaagcactccagggaccatataaaaaccatcaatggcctttctttttctaggcccatgttctgtttcttggcacttaaaatcttttatatccagaattggattaaaaagggtaggctcaatctgaaatttgtccaccatgtttgaccctgttaagggcccaaacgctctagcccaacaagctctagacggccagtctaacggttgggcctgaggcccaagaagagaattaaagaaaagccccactttaaagttattattcaaatggaagttctccctatcactaacggctagttcacaagtatcagctaaaaagggttcattctcaggatcattaagcgtgcccagactgtccttgctatttccaggtaagtttcgtttcttgcattgggtgtgaatactgggatttcacccttgttgtttgcttccccaaaatgggaaaggggcacagagccatcctcaggtctcacttcctccgtactcatcgtctcagtgaccgtattggttggagtgtcatgcgcggtcaccatcttctcaggtggttgttcagggatcactttttcaaccaccccctctgccgtgttctcgaaaggcgtaatttcacccgttcccagtagaagcactgtcgaaaaacggtttaaaaccacttctcctgtctccactctgttttccaccaccacctgcacttgtctttgttttcttggcatttgcctatgtagttctcacaactcagtagctttagcctcacgccatcttctctgcatcttcgattgatttcttacagtcggatccttgagcgcttcctgttgggtgatccaatcgttaaaccatttcaggagggggaggtgaaacggagacttctccacagcttcctcatccatccaagaaccaaacataggaaagaaagcccccttatcatcttttatcacagttggggttttgaagcagtgtttctgatcatgtgagagagctctacatttgaaacagatatttggcaatttctcgtattggtattggatccaaagatccttaataccttttctccgcaaaaagaaacccgagaatagaggtttgttaacatccacggttgcacgaaaacaaagagttcccatgccaaatgatcctcgctcaaagtttttctcaatgagccggggaagttcatatactgcagaaactttccctgcaagttcttgcaggtttgtcttgttccaataaaaaagtggtatgctcttaagacgcacccagataggcgtttggtcaaaggacacctccgcgggagtgagccaagatggccatggcatgagaaccagcaagtacccacagacaagccacgatcttctatgcagaacattctcagcatcaaaactcgtttggaaagtgaactagagtagtccatcttctctttccttccaactccatcccgtcaaggatatccaagcattattcagggagccaatggctttgcgtcccagtctggtgtagcaataaagtttgccaagtaggattcgactaggttcctcatttcgattgacttcaccagggttaagatcacatgtaagatccttagtagtaacttgaaccgagtctttaaacaaagagctatggtttgtgtccgccataccaatacaacactaaaaccagaaaacttcaaacacgatatcaatggtaagctaagacatatgatcaaaagcttccacacacatcaaataactagagttagctcaaaacagagcacttaatccaacaacattaaggtcatatttggctcctttatgaaagagagaaatttaaagaacaaatatttggctcatttacaaacgtgtaccttaaaacctataaaaatgaaattttttcaaaaatacaaataaattaatagcacattataagtatattcatatgggtatataggaacatttcagcatagatttttgttttcatagctagccttacatgtttatatttttagcactaaatgaaattataatttaaatttcttgtatatatctttgtgtatactataattataacatatattctataaatctttgaaaaatttgaaataatttacagtaacgaaaacataatttaaacatttagtttcaagtattattattctttttatacgggtacaatcgactattttaacctatgtttcctgtatcgaaaattatttaaaaaaaattagaaacgtataaaatacttactataattataatataaaccgtcatatgttaattaaatagattacaatttttttaaataccaaaaacataaatacttttactctgttgataaggataaaagtaatatcgctaatttaatgctctctttttatatatatatatatattatatagtatatagagttcgtttgataggccgtataagactagtattatattaaataagaaataatataatatttgaataaaaatttatattgtattaattatcacggtcataaattttaatacattacgaacaatattatttcatacataaaaatgatttgtatatagcttatttataatatttagaaatggtcctaggtcggggttcgcggtctgcagtcggaattgggtcctagggcctagggttgggtctgtggttcagactaggtctgattttttagtccaggtttgagactaaggtccgagtttggggtttggttatggtaaagatagtatagttttacagaacctattaatataaatcaatacttattacaaaaaatcttacttttagttgcaacaaaagttacgactaaaagtaaaaaagttgtgactaattataaattatcattactatttgtgactaaaaggttcgtggccaaatatattagttataaaaatcacaatttgttattgtaatcacaatatttgttgtaactaaaactaaattaatcacaacttgtatctaaatttcgtgttttattcacaagtaactttttgttgtaactaaaaatcacatttaatgacaaaaaaaatatatattatgactacaaatttatcactaaaagtaattttttttgtagcaactaaatataaaattatattaaataatattatacaatataatacaacacaatataatataatataatacatgaaaaggacccataaacttttaaattgaagtgatcatttatgattgtttagacatgattctatgtgttcctacttcaaaagtccacctgtagtgcactatacatagtttgtgggaatcttctactccatctaagatctttttctttttcttttccaaattatatattttcttctccttttgggtaacctaaatatataaatatatgatatggaaggaagattcctctcaattaacatgaaaagtaaatcaaaatgcttattgcccatccaaacgtggtatccatatcaacaaagataccacttgtctctattttatgacaaaacaattatgctaagccaaaaagtcactcaattattttttgtagtgtagcaattattacaatcaattaatagtttggagtttaaaattttgagttcgaattcatgatctctcctttttcttcatcccctattaccactaaactagcttaaaaagtcactcaattctatttggtttatttttacttttattcataaatgtcagtatcatataggtttctcaagatatatataggactataacacacataaatgacataattacataataaattttgaaaaattatagtttaaattacattgatattttcctcccttcaaatcttccctagtcacctcgatatatatatatcctaaaaattattgtaccaaaagttccacaacattagacattaatatagggcatttgttaaataataattatattataatattgattaagtattaaacactaggaatgattttcaattagtaatataagaccatcttcaatacaaaatatttgatttttttttgaaaaatataagcatcataatttttgcataacgcggatgcttgcctgcattgtagataacctaaataaataacaattcaaattaatttagttattttgttatgtttgatagcttaaataatataaagtgtataattgtatatggaactttgattaattttaattttgacattatttaaattaaaaaataaaataaaagaacaaaaaaaatttaataatgttttggttgctaaagttgttcatacaatctacaaattagtagttttataatttttcggactaaactatttgagaccagccagtagtaatagtttgatcaatagtttggtcaaacggaacaattttatttgatatttgagttattgtttagaaatcttgagtgcaagttcaaataaaaccagagttgtctatttgatgaagttcaaattcctctgtttttgattattttcatcaaattgcttgttaattatatattattgaacttaatacattgatataagagtattttagcagtttgtagatttcgaaattatctttgggtggttaagacatctgtttaatgaaatttattttcctttaaacatatcatcaaaacaaatttcttgtacttaaactcaaaaattaacaaatgaacatgttgttagcaaaggaagaaataatatgctaaaagtgactcttaactacttagaaacataatatattatacttgttagtataattcactattgaatttagccatataggataataggggggaggggggcaattaaaaaagaatcatatatattttttatataaattaaatatgtaaatatttatttatatagtttttagttatttgtcaactcaaaatatatttgtttataatttgccatcatgaatactataaaatatcattaattattagtaaaaggtagagccggttttgaaaatttgtgagttctaggacaaaaaaaacatatgattagcccttgtgaaagaaatatgtagtatttttgaaaaaatttaaattttttttatatttttcaaaagtaaaaaataattttgggaccatacaggccctccctaactcacgatacttgcaatagaaaaaataatagataagtgttactgttaactctctattataacttcttaactaacttctgtgttcaaaaatataaattggaatattttttttttaaaaattttaataaacatgaaggctctgtgtctctcttaaattaatttttaataaatctatacaaagtgtctaagtgagagtggtgtaggtgagatagttgttgtttataaaagagaaaaaagaaaaaaaaaaggagtaaattgatctaccttatttaatatttatatatggacttatagtagttagggcaataggctttatcaattactttttaagctctttcttttttttcttttcctttttcacatgggttaccagtgttacggctttaagtataaaaagaaacatagaatctttgaatattttacaaataaataaataaaaataaaaattcagtgacattcttcaagcaaacaccataataaccaaggagataaatataaggtattattagtcattatttttatatcttcttatttaggaaaaatttaagaaaaatctatactctcctctcaataagttttgacatcaaaatcaagagttttatagttatttttttttttatcacttacgttgtaaattttttaagactttataaatttttaaaaaattctaaataatttataatgtcgaaaataaaattaaaataattgcttagcacgtgcaaaataagaagtaacgagtgcaatcaaacatttgaaccttatttttaacaccattaatgattcaaattttttctaaaaatttacaggtaattaagattttttagatgcctaaacagataggaaaagtactaaaaatgacttgttaagaggtgtattatagcattatcctataattcaaaatcaattcaattcttttcaagacttaaaagaaagaagaaaaagaaaatatgtgacatttttaatttcacttataatattatcaattatcacactatattggacttcataaaaattcggctgggctggtgatcgtggtacatggcccaattcttatgatacttcagctaagctcagctagaaactgatccaattgtgagttgccttgcctcagaataagtattaactaggcccagcccatacctatgaaataatccacacttgctagttgcactcgtggtttttctctacatttccctcctttccctcactatagaaaattcatttaaaaaatatgcaaatttttaatttttacgaacttattacaaaaatatcattttgttaaagaaaacattaaaatatcgtctaccatggcagagttgataagacaaaaaatttgagtttaggacaggaacaaattattgtcttttatatttggtgtagaagggcttgcaagatcttttggaatcatcattttggaaaatgattttatataggccaatatgaatattccgaactaacataaaaagtattttgaaaaggctaattagtaatttttccctccgaactttgac

SEQ ID NO: 110514 - DNA, 1361 bp, Cannabis sativa
  modified_base (1320)..(1323): a, c, t, g, unknown or other
ttgcaatccacagcacaaaactatacttaggtgtattgagttttctccatactttgttgctctaacagattttgttttggcttggacataacaacttatagccaatttcacccctgagaactgttgtaagtcagccaggtttttgagctgatctttaacagctatcaatctccgccaatactaacttccatgaaaaggaggtttataagaccaccaatcttcatctttgtatcattattttcttccttaacagttcatcccttatttctttgtcattaatctctgttcagatttcgttttgaaccgacagttttacttctatgatcttctgcaactgcagatgatgatatatgatggaatatttggttgcctttctcccgttttcggcatgtttgagtcacaaatctctccaaaaattctgcagaagatactttgttgttattttataaaattttacaattgtattaatataacccgtttctttctctgcttaatttcagaggcaaaatgttgaaagggctaaattggcgcttctgactaataagcgggatggtcctactgattcatatgatgttgacaaaaattctgaccatctgttaatgatggttgaatatatgaaattggaaaagatttgcagttcttatttttgaagcagctcagttttgtacatgataaggtagagtttcttctccgaagcttaattgtgacaataagtgtgaacaatgtttagagtatttagctttatactgattcattaatttctggggagaaattcattttaacttacataaagggaaacttttgaaaatacttgcattcccaaagttcatggttcattttggggggttgtttcactaagtgtgtcttgtgtttctatttctctatgttttagtaaaaagaattgtaaattgtatgaagttagtatttcttcacgatcctaatatgtattttcaatttttgtgcctggttcagagatatgagaatacaatttgattttgctggatagagatggaagataatgttggccaaagcaatggtgatatgatgatgatgcaactaatttgtattagtatatattttattttagggtatgtttatgttggtatttaaaatatatgattatttattaatttttagacaattataactatattatgtatgtatagttataacaatttaaaattacatttattgtgcaattatttataatcaaactttcatgttttatttttttaatttttgtttagggatttttttattaatgtacaacaaaaattaatatattacaaaaaaattgcaaaaaaacttaattataaaaannnntacattttaataacatatttactaatatttagatcatt

SEQ ID NO: 110515 - DNA, 4579 bp, Cannabis sativa
aaaaaaaaaaagagccaaatataattttatggtatattttgaattaaatttaacccaaaatatatcttattgaagatggtctaaatgtatgtcaaaacagtctatcgcaggggtacaatggcaccagacatggctaaaactttagccattaaaaaagcgttaagttagatcatgaatggcataatgttgaactcgagttcgattgtctctcaattgtccaagctattcgaagtaacatcaccatagttttacctcttgaagtagtggtgaagtactgtcgtaagcttctatctattttaaacaatgtttctttgttttttatttaacaatctgctaacatgactaggaacagctttgctagagcgtcatattcttttccaatttgcattaaaaaaatgtatggaagtaggcatcacaatgtatactcaaaaaagtatatatattaattaagaacaaatatataataatgaaaaaaaaggttgtcatagcacaacttgctctaaatacattgaaaagatatattagtacaagtataagcatcaatgaatgaggacctggaatacttcaactattacgcctcctactaatgcaaatgagcattgaagttcattacaaccatcaacaaacttcgttataatctttttaagtatttatttttaaaggtgtacattcattcttcgtgagattcagattgagatactaagctgcatcatctcacaaattcataaaagaaataaaataaaaaaaaattatactcatatcatatatgcaagaaaaataaaccaggagatggaaaacatcttttgttcagaacgttgtcaacacctagttgatacggacctgcgtgtaaggtcaatattttacgcattaaaaatgtttgtcacaaattaaactatcaacattaaaagccaattataaaggccttctagttaaggtagccaaagagttatatagttatataaaaaggtagaaaatatgtagaagaagagaacacattgatgtgcatgaacgcgcccaagcataatactagaggaagtgtaatagttcaaaccttatcaggtttttggatgatttctccaacttttcagtaccatcttcagaatagacgccagataaagaatctgtaatgtctttcaggccctgcaatacagtgataaaataacaagttttaaaaaataaatccaatttcaccctacgatatgacaaaggaaagagtgacctgattatctaaacactaatatatgaaaactggagctgctcataaataaattgatgaaaaatgtgaattttggacagtgtttgtttgtgtgcgcacgtgttcatatatgcacattaacttttatggtttcggggcttaaagtccattgggaaaactctagcttaaagtaatccttgtgttcaatgtcccattctgagtcaaacattaaaagtttcatctataatttaacgatataaccattatgcaaaaataacaaacaggatacaactgtgaaagtatccacaaatacgctttatgtttgcttgcagttccagtgatgatttaaccagaacaaaatataaaatgattttacaaactaaccataaggcttggagcctctgaaaatgtcagtgaaccacgtgatgcggtagaggttttaagttgctcctgcaaattagaaaatgaattagactgctttatgaacattacagagacctgaagaaagttgtatggcttgtgattgcagccaaaaaaaaattaaatgaacaataataaatgaacacaaactattagcaataggggattgctaaacaagcaaatagccgcctgccactttgagaatagccaagatatataaatgaatgaagtagatatggaatttgatcacatgagtactccataaaccagtcaatatgggtaaaaataaataaaacataatatacgacttctaaagtaaacaagaaccactatagtggtacaacttttgatacaaacctgcagtgactcgggcattttgactttcttcccatcaataaagttgcacaggtagtataaactagcatttgcaaaatcctgtctcaacaaaaacaagtcagcaactcaattgatcatctgaagatccaggtaagaagtaaaataaattccactgcatgtcataaaacaatggggtccatattgaaagatgctggaagtgaatccaaggctgttaaaaaactatcaaaagtaagggagacttttttattttattttttactgattccattgagacctttaaatttataggttaagttaacaaaaagagagtccatgcattggatgggccaaggaacacaatgcaattctaagtcatgaaagatccatcacttgtgcaaatagagaaactggataagttatttacctgtttaccctccattacgcataacttcccgttctgtcaaaagagaaaaaaaaatagaagattagaacaattttcactaaataaggtacacgggcaagtcattcgccatgatctaataataccctatgaagtatactggccaacgcctacaacagattactttttttttttcttctttttccaaaatatatgtataaaaacactaaggcagcatgactcaccaaggcagcaaccatgttctgtaatccactcaagtcataggcaataccatcaacagattcattcagaacagtgacctgtttcacacgtttcaaaacaagagatgaacaaaggagacatgctttgaatactaatcatttcacatctatatcaacatgcatttgagacagcataaacaaactgcaatatgctaatgcagtacggtaaataaattataacaagtcaatccaagtagataatataccaattctattgaggtggaatgaggctatgtattctatttaaagggaagggggctacatccataatcatacaaaaaaaacaaatatgtaataaaaaggcatacaggtacttgcttcctaatatacggtaaaacactaattctgtttctgacaagacatttcacaccaataattctagagaagcgcgtacactgcataagtgtgctattttaacttaagaataaaaacacaaatgtaaagattctgaaaacttacatcatcctttatttccctggataacttgttctgctccaccattttatcatccacgttctggatccgctgtgtcaagtgcttctttgtttgctgaacataatattgcacacactataaacacttttgtttttttcaaaaattctttcaaggaggtaagtaaactctcctaataaagagcaggatagtgttacatcacaatcaaaattttatgcacgcatgcagcacaacttcagagttgaaaagcgaggagcggcaataaaaaaaagttaaaaagagagcgaattttgccgatcaatatgatgatagacttctcaaaagacattttccttaaactatggtcatgataaataaaaaagcgatcagaggtgtagagacttactgcaacaaaatctgataagttctccagatgtttcgtcaaatttgaaacagccttagccatattactttttgtcacgtacataaaatcccacaatgaacaaccctaaccaataaaacaattgtcacacagtaattcccaggaaagaaaaaaaacagagaacatatttcataaatacttccacaagaaatgggcatacatgatagattagaacaaaccaaacgaatgaataaagcataccttccaccacatgtaaccatacccaactgctcccaatgcagccgcgggaactataagtgactttaagttacctggtaaaatatgataaagttaactactataacagaaacccttcattccctaaaagttattcataaagttaatgttttttcaccccaaaacacgtgaagaacattataaaaaaagatatatttagagcactttcgaatgaaaagagacacaccatggccattactcccattcagaatagtaatgtgtcgatttgaaccaagttgttgaacctcagcagccagtttacgcacctaaaagacagtttgagcaaaaatttcagataattctacgtctcagtttcacataccaatgagaaatccaaaagaaatatgaaacattacacagtaagtcatttaaccaatacctgagctaaaatgggatcactgtaatcatttactccgtctgattgatctttcgatttctccaatcccttcaccaatgactgcaataacaaacccaaaacaccataagaatggagtcactagatataaagacaataaaagtaacgaaaattccaacaactaaaataaactaaaaaaattatcaagtctggtggctcaaattttcgcagaaagtatatttgtcgacctaatttatcctataggctaacaaagccacttggaaacccaaactacaaaatcgaaattaattaaatccgcccaacaataagaagaaagtagattaacaaacacgtaaacttcaataatttaacaacataagaagctaaatttgaaattaagaataataacaagaaaattaaaagagtacctgaagctctccgagcaagtccgataatttatggttattgagcaaaacagtgg

SEQ ID NO: 110516 - DNA, 11838 bp, Cannabis sativa
  modified_base (7158)..(7163): a, c, t, g, unknown or other
  modified_base (8399)..(8401): a, c, t, g, unknown or other
  modified_base (8429)..(8429): a, c, t, g, unknown or other
agccctaaaactagaaacaaagagtgaaaactaaccgaaaatatgacccgaaacttagactaattttagcctaataggaatccatccaagttgatgcttgattgattacttaaacttctttcttagacatgatgctgggctccgagagatagtcaatagggactactcccagtttttccatttctttgttggatcctaacttagctaagaagttttcttgggtgttttttccctgtgtatcttttgaattttatatcccttgaattcttggagtagctcccaaacagacgacaaataggaagacatgcgctctctgtgagctagatattcttcttttaccttattgactatccttgagagtcactaaatattttgatgtacgtggcccccaccatcttggaaagtctaaacctagctagcaaggcctcatattctgcctcattattggacacgttaaacttgattcgtaatgcactttagagccttaagccttccagggatatcagtatgactccagtcgctgacttgttctcgttggcagcattatccacgtacactttctagacatgcaaggtttcttttacagcatcaaaatcctcgttggcctcgttccattccacaataaagtctgctagggcttgtcctttgatggagacacgaggaacataatgaatgttaaactaacttaactccaaggtccatttgaggagtaaaccaaatgattcagacatctaaagtgccagtcagagcgtgtgattagtgtacactttgatcattaagcttggaagtatggtcgcagcttttgggagatactgagtaggcagtaagccaaattctcaatctgtgggtatcgtatctcggctcccaccatccttttgatgaaaaaataaacagggtgttaaactatgtctgtctcgcagaccaaggctgcgctaattgcattttctaaaatttccaaatacatatacaaatcttcaccctccagtggcttagataaaattagagctttggacatgtgctcttcatccatctatccattcaaatttttaaaattttcttagaatgttgaagaatgggatgcatttgtcggttaacctagatatgaagcgactaagggttgctactttctacatgaggctttgtacgtctttgtgcttccttggagacaacatgtctagcaaagcttgtattttcttaaggattagcctttatcccccattgattggcaatgaatcccaaaaacttcccagattttaccccaaaagtacacttctttgggtttagcttcatcccatattttcgcactaccgcaaaacactccttaaggccagttgcatgatccttggagtcatggatttgaccaacatgtcatctacatatacctccatgttgtgacctagcaagtttggaaacattcaatttactaaccgttagtatgttactctagcgttctttagtctgattggtatgaccaagtagcaatatacccatttttcagtacaaagacttctgtattcttggtctgatacatgacccttaatttggttgtacccaaaataggcatccatgaaagacaacaactcctggtcggatgtcgcgttaaccatctagctaattcttagtagaggtaagcaatctttaggatacactttattcaaatcattaaagtctatgcgaattcaccaggtcccgttgggttttgggacaaggactaggtttgccaaccattttgggtaatacacgtcccagatgaaaatgtttgctaacatctttccacttctttctttaaggggcatattttatgatgcacgatggacatatttggattcacattcaatccatgacagatctcattgggtcaatgcatgtcatgtcctcatgatgccaggcgaatacatccagagactcggtgagggtgttcacgatctcttccttgactttgggtcgaggtttcttcttatgtggatgaattttgttggatcctgattgtgaatttgaatttcttctatttcttgcatgggctctaataccttctctgcctctacacatggatctaactcatcctctttataatgttggtcccaatcccttcactgatcgactgccaagactgatttttttgtaactacattgtagcatttcctggcctcaatttgatttccatggatggttcccactcttgcagacggagtaaggaacttaagacacaaatgttggattaaggtcacgacccaaaattccactaagctcagtcgtcctaggatggcattataggcagacgggaaactaacaataataaaagtacaatacttcaagatgctttgcaaggtgtctggacacaacgtgatgggtagtcagatcttaaccattgggatcaagtaatctccattgaatcttgtgagttatgaaccactggggacatgtcttagtttgagtgtctgatggcaaggaacacatatttgaatagtatgtttacaaaactttcattgtctatcaggatgcgggctaataccttgttggcaatgggtgtttcaatgactaatggatcatgatgcgaaaaatgcacaagcttagcatcttcttcaatgatgggttgatccatgagccttggcctttgggcaggcagttgagtcacttctcatactttatcacgattatccaattcctctacataccgattcaacacattgttggccattcctctgttatggggtgctctagatatcatcaccactcccatgttgggttgaggggaatgtccaggaggcatgtctggttgcgtcgaattctatgttggcaagggtatttgtgctttaggagattggggtatacctttctggggtacttgaccccagcgtgtctttcttgcatttgtgacaattggtcctgtacccagtcgtggagatgtcccagttgtattaagttctcggtctcatctttgaggcattttcactcgttggtatcgtgtccaatttcgctatgatattcacacattctggcatgtggctgaatacatttgctcttaggtgtccctaattttggtgtattacatgtattgcgattcatactcgaatggcttctttcctttcttatttttggtctgggaatttcctttcacaggacttttactctgtgtagtgtggtgtgtttgtgtaacactcatggctagaggtgctacgggagccggatggtgaacaaaggctcctagtgctacgcttactgctgtaagagttctgtattaagaataagtttgtgttgaaactgagttttgtgagtaagctgggggtacttagaactgtacacttagagcaggcacccctctgggcaatactgaagatccggtaggtaccccttcagaatattgtatctcgtacgtgtaagttgaccctccatttgggtaatatccaccaaaccctgtgatttgtgcttgttcaagcttaatgtatttctaggcccacttttagaaatcctacaggctggctgcgccttcttgttgaagttcgttccaagaatgggttcctactctaatatcatcttggagcaatgctagctggtgtatgtcattgcctttcttggtcttggatgcttcctctttgaatctctttataaaagtcttcaaggtttttgtggggagctccttgatattggtcagggcactgacttcaaggtttattttcctagcagccacaaattgcctttggaagttagtttgcaacttactccacctgctctcttgtggatcttcctaaggttaacaggaagcacaaacactttatgtcattactcactcgtaacactgtcataactctgttaaactgtgacaaattgttgttggggtccgtgtcctctgtgtattgagtcatctctatcattttaaagttttttgggagctgaacctctaggactttcctagcgcatggctcctgatcttcatagtcagattcagaatcatctcctttctacctttggaacactttggcaatatatctcctgagaacagccagctccgccaagattccttcactcaaaatttccttatcgtttattgagtcattcttataggagttgatgcgagctttaaggtgcccttatttagcattgattttttttttctctcaagtctactagtgggtctcttttgctttgaccaccttttaccttttgtccctgatgtacacgctttgacattccatactctcctagggtctgtgtttctttcaaggaaacagattctccaatggatttttctcttgtaggagatcagaacagactttgcgagggacccgatgggtatcgttccccctgggtgaagggttatctttcaaaatagaagggtcttcagagggatatatgataggactggggaccttttccttccattttttatttcttgaggccatgagggatcttctccagcatcgttgacggctggcgacacagcagcaagatctacattgaggcctgcctgagccatggcttgccgcatagcattcaatgcctctttcatctcatactcatttctttctattatgccaactctgcatcatgcttcgtggcctgtttttctcagcaacacgagttttgcatactcgtcttcgtcatcaccttcataagtttcttcttcccttgaataatcagggtcagtggtaaggcacaatctatctgagaggctactccctcttgtggttgtgccgggtcatcaggcagttgtggaggtcgttgattgtttcttgtcaataccgtttaagtgcaagtttcttcttcgtgaaagctttctataactctgaatgaaagcaccaaaatattcactgaaatttttgacaaccattaattaaatataagtaatagtaatttgggaaaaatagagaatggttttttacgttgtcccagtattaatgaactatagtccacacgttacttttatttatggtagaaacattctcttgatcagagcatattcaagttaaagtatcagagttcactttgtgtgtgagtccagagtccattattcattacaatctcaggtatttataggaaaaaaataaaagtcaaaggagagaaatgtacatctccctccagtctctaagcactacctagccttcgcagtaggagtttagtgagacaagatttgtcccatgtgtggctgatgtgacagtgtaatgcataaacgtcactttatttgcttaggtaaatagattgtcagaacagtatggcttcttaatgatattaatcatgtaccgaactagtcatctatagtgatccaccttagaattcgtgttatacaaataattgattcccagatgacctttgatctgggagctcatcgcctcctagatagccaaagagtgatctctcaattgcctatctcaaaaatggaaacccgtttccagatgcattttacacttagcgagtccatgtaagaagttactgcataatgagtgttaatctcttcatgagtggggcctctaagccacatggagcctcttacacttgccacgtattttgataaaaaaaataggctcaacaaaaactatagtatttattgtgatgcaaattttgcttcatgctatatggtgatcaaaatttagatcactttttattatgtgaaatagttgcattataatttggtacatcattggagtagattgttaacaaagtgaattatatttccgttagagattctctaagataaaataaataaaaagtaaaattttaataaaatattttaaagaattaaatagagaatcttataagtgctcttagttacactcacaaatttacgagtatcctaaaatgtcacatgagtaaatctgcgtagagttgcatcattagtttcgttttactcagtttttttatctgaagctttactcgacttttaatagtataagatgactgatgagtctataatttatctctagagagtttttcagtaaattcccatctagttcagcatttaagaataaatttagtttagtttattttttttttttacgatgtatattgtagttattttaagtcacgtgtaatgtttttttataaaaagaagggtaaatactcatttgagaccctgtgtttcatttaaatacacacttggtactctttattttagataatgatcaattagtattctctatttacaaaaactactactttagcaccctcaatataaataaaattttaatattcccaaactaccccatttaataattaatcttattattattattattattattattacttaaaaataataaagtaaaatacaataattacaaaaataatttttgtttaatatcactatcttatttatactcttgaagaaacacgaactagtactcctactccaaccttttgatcaaaccatttatctctatatttgagaatattttttctaacattattatttatttcataagtattatacatataaaattcatatatagaagacgaaaataaagagagaacgacattaattaattaaggttatcatatataacatgtatatatagaagatctgcaagttgaaattgggtttaagatgaatattagttagttgcaaataatcataataatagaagaccatcaattattattcattgatcatactaagaacctctttctgtatatttacaaacaaccataataatggaagaccatcatttatgatccattgatcctctctaaatttatcttcttatttcatagatctcaattaaagaattgaaggggccgtgtcaatctcatgaaatgataaacatgaattatttttgtaactattattttctattattaaataataataataataataataataataatttttaaaattgggtactttgggaatattaaaattttacatatattgagggtactaaagtagtaatttttgtaaataaagggtactaattgttcattatctaaaacagagagtactaagtatgtattttaataaaacacaaggtaccaaatgagtatttacgctaaaaaagaatagtttacattactgaaaataaggtctagataattgtttccacacattattattttttcttataagcatggtaaacaacttctttaactttatttttgaaactataaattatgtgaatttctttaaaattagcttgtagtattaaataaagggattatttcacnnnnnnacaaaaataataaaaaaattacaacaatacgtttacggaattttaaatatttttatgattttttttattttatttacaaaaaaatacggtctttttatgttgtactcttgttaatttgttgttgattttttgttatctgcatgttattttttatcattattctaattttcatgttacttttatgtagtttttttgttattttcgtgttatttttatgaaaaactgtaaaaatgttaaaacaattctttaaacgtaaaaatataatttttttacaaaaaaaaaataaaatagtgtcttatgtaattatctcttaaatgtaaaaaaaaaataaataaataaataaacaaatgtaaactctaaaagtttcccaaactgccaaaaccaaaacaaatcctttaaaggggtgcatccattaattttaatagtattgccaaaaataccataagttttaatgctattgcatcacatttaatagtaatatatagatatatatatataaatatataaacaaaatatgattatggtggaagccatgtctcttcaaaaagaaagtaatatagggaaataaatcatgattggactaatttggtcgcgtaataataaaagctttcactaaaaggacaacgtaatatctattatctatcaataattcatgagatgagattgatgattattgttaattagattattaattaatcacaaagaagtatatactatcgtggcaagttttgatcctaacaccaattgaaatgcctccacaagttgatctgtctattattggtgcttgccttttaccaatcacatcaccatctttatcatcattatgtgaatgagctgtttctgtcatttcactaactagttagagagagagagagagaagaaagaaagtaggggaattaatcatttcattttataattaatatatctcaatctgagtaattttacttaattactattaattatgccattcttgttctcaattttatttgatttttctttagaaagatttacataaaaaaaaatacaatagctcatttttattgtcaaaatacatttatacgagtatatatatttttatacttaatttataaaaatacatttttctcttgcctcatactttctacacttatcatttggttaattaggatttttaacccctaaactttaacatgtaccaaatcaagctccctgaatttttatgtcgttaaaaattcttcctgaactattgagattgtnnnatttaaggacttttgtttaatttcattnaattttactatttcagtaattgtttatgtactaaacgatatctaccaaatcatgcctctcaaacttttacatatactagatcatgccccttgaacttttatccatgttagactttttttactaaaattagacaaaagtccttaaatccaacaagcttaatagttcagggggcattttttacgaccttaaaacttcagggggcatgatttggtaaatgtcatagtttgggaggtaaaaatcttaattagccttctcacttttaatgggaactacctctagcctcctacggtcagaaatttcgtctccaatccccatcattgcaggcctcgtcttcaagcctcgccgatgcaaatctcatctccaagtcctagtgccgttgtcaccaattcctacctgtcaagtacacaaaccttcttatgtcacaatctaataggaaaaataacatttcaagtttgtctcaatcattcatatgttcttaaaactatcacatgtggttcaagatttattttgttgctattaatatttgcatattaaggtttgtaagtttttttttttcttattttgtgtaaatttcatgaatataagttttgaattgattattttattttttaaaaaatattgttgctgatgtatttgtttaatattaattgtgcttatttaccaacaaattttgtgttttctcttcttttataagttgagtttttctatatatatgtatataaaggtacaactaccaatatttgttgttagtatttctaatttcttcttgatattgttctggtatttttttttgtcttgatttagtatttataatttagtatttcatttgtaaatttttaatgattttgttgatttatcgttgtttattagttgttttgtagtttcttattttatctttgttgtttatatgtattgttatcgttgtttgaataatttttattatttttgttatgtagtgattgtggtgcttttgttgctatatttgtagagttcttcattcaaatgatataattgtgctttagttgtttataaattttattatcgttatttgaatcattttactattttttgttatgcattgattgtgatagttttgttgatgcatttggtgaagagaaagattttcttatagaaatatttgaattgtacattagttgattttaagtcgagtattcatttttcaaaagatatagcaatttattgatcgtagattattgagtactgttactatttttttaagttccatattttatgtttaattagtattgtttgttggttttgttgcaatttttggagcaatttttaggtgttatgcattgtgttgtttctatatagttgcaatgtggtttgcttaccggtaatatgatattaataggtatattatgtgaatgttatatttattagtttaagtatagtttcaagatagttttattatagtttttatttttttttatcatgtttatttttgtttatttatatatgtaggattggaaacgtaagttttacttgtgtaactatttcatgaggtccaagtgttattttacttgcgcttacagtgttattgaaaatattaagacaagcaaaggatgtgatgataatattttgtgccactcaattcggtcatttattttggtatttcagatagccttttgttgactatagtaggacaatcccaaggaagcgattgttgcagtgtcttggcagttattttttagcttttgctttgtttatttattttttttttttggttattgtggacgaagatgttaagacttgtgttcattttatggtcttattatttattcttgtttaagaatatgttgttggaaaaaaagataatgtaacaacaaactatttagaactttgcattaatatgttaaataagatgttgataatgctttacgattctgtttatatttatcatatgtgatacaactttaaataaactgttgtgcaacactattgaaaaaaataataactaacaaactatttggaactttacattaatgtgtcacatatgacgtctcatatgcattactattaagaaaaagtttatgtctaactgctttttcatggcatgtatttcggttgtgactattttggccacatttgttacatctatgcatgtcttcaatcatcgcaagagcataagcacatgacattttttctttttgaattatgttgcaactgcatattttatttttcaggttcaccattcatgaccttctttgatgtaccatttatttataggtttcacctacatgtttaagtataataataagatattaaacgtaaatgaaaccgaaaaacaatgataacaaaatttatagcaactaagatgttagtacgataattattggacaacacataaacaaggtactggcaactatgtatgaaccatgcatttagatattgttaagaaaatatttaatcaattaattttaaactcataaacatcgacttgtagtttgaggctattttgcaaacaataaaccgtaagaacgttgtaaatcaacgtcaactcaaccaacgttaaaatatgaacaagcgttctacattaaaattgtatttatgagagccttgtgttagattgtctatatgaaatacctattaatagcaactaaaaacattgtagcgtgatcaaggtgtaagtatttctacatcaattgtttgagcatccataaaactaatattgaattgtacgacaattatattgcaacaaaaatatcaaaattacataaccagatctatgacccaagatgaatacaaatttagtttattgtcgttattggaatcaaataattctaagattgaaattctaaaaaaaaacaacgttgatgcaccaaataccttaaagactaaaacaaaagaagaaagaaatatcataattaattggtaccctcaactaatacttgatacatataatacatatatatagatagagaaagtgaagatactaatccagagagagacatccagtgagagagcgagatccaactgagaaaaagtagggtatatgggggatttagtttaacgttgcaaaccttttttttctgtattttttatcgattgctttgggttgattttttgtttgtgatatccttttcctttggttgatttgccgacattaatggtgatttgtagttgccctcatcatttgtgaacctgcatatacgttgtatgggtttgcattgaagttttgtttttggtgttgcggctaagaatgaaaagataggtatttctataattaattatgtttgggctgaaaattaaaatggtcaacccaaaatatttgtgtaattttgttgcctatatattaattaaattatatatatatatatctattctatataaaatatataaagtgtgtctatataactgaattcttggtttatgagaaatttatagg

SEQ ID NO: 110517 - DNA, 8800 bp, Cannabis sativa
  modified_base (2470)..(2472): a, c, t, g, unknown or other
aactttcccattttgttatttctcaggaagacttgggctttattttgtattcgttgtgtgacatgtttgtaaaaactattttaaatgtaacgtttaaaataatgagattctggttttgtgtgaaaatatatgtatatgtttgtaaaagtttaaagttaaatcaaaattttaatttatcacgattttcgagaaatcctttgattagcaaaggcgtgtactgtaattagaaagtcattatagcgtgcttaagcattagggaattacattgctccaggctgttctttagcgtatctttaagagtttggttaaccacttttacttgtccatttgcttgtggggaagcaaccatcaaaaaaactcttaatgatttcgtgtctgtcacagaggtcagtaaagagattgttgtgaaactgcatcccgttgtctgacacaattttttatgggagtccaaggcgaaaaatgatgttcttgaccacaaaatcaagaactttctttgatgcgattgtggctaagggttctacttcggccgatttggtgaagtaatctaccgccactacgacatattgaactatgccttttcccttaggtagtgaacctatgagatcaattcctcagacagcaaacgactaggaagttttcatactcttgagctcatttggggcggccctaagtattttggagaatctctaacacttgtcatattttttgacatagtccatagaatcttcaatcattatcggccaaaagtacccttgtcttaatatatttttcaagaggctttgcccccagtatggttgccacagaattcttcatgaacttcaatcatgagtaatttggcttttatgtaacaaaaaataattttaatatttaatagtaacaaataattattttttcattaatttgaaaagaattttttttttgagaatattaaaataagggcatttagatatgatattttgggcctcttactgtataatttatcgtattctaatagtagcaattcagaatatattatttatgtgatatccttttaattttttttaaaaaaactataaactgaacatctaaaatataaaaaatataaataattttgataattaatattaactgatagtcataaatatttgttactattatttttcacttattgggggcttatacttagctaaagaagttaaagttcaaaatattgaaatttagagcaattcccaattggtagtaaatcaaatatctagagattaacagacaaaagatgagaagatagacgcttacgtttctggatccaaagaattttttcaaaactttaaaagatataccatgaaacaagtccctcgggaccagaatgcattcatggatatgttggcaaagctggcaacatatccgaagattaaatagtacagagtggttcccatagctcacctagttgttccaagtacagaatcactaaaagtaaatgtcattaacacttatataaataaacacatatatgtataaatttctcaattttaacttgaattttgtatttttaatgggataggacaagttttgcacaataataaattcttattatagaggtgtgtatagaatgcaattgtaagtaaacgtcgttaatcattctacctcatggatatatcctatatatatatgaaaatcttagcttttaaatataacgataatccttcaaacaaagggttcacaatttatttctttcaagctaaggctgcgaataaaattcataaacagtgcaaaaatacttgtgtaatactcaaaggcgccttttctagtcaaataatattgacttgtggaccagagtttgttaatactcgaaccacgtagaaatcttcgtctaaatctcaatattttatctattttctttggctttattatattttacatcgattttagaaaaattcgataaacaaatgcatattcatgaatagattttttttttattaaatagtcatgaatagattaaatgtattggattagttgaagttgcatacttgcaattgcattctaagcacacctctataataaaaacttattactgtgctaaacctctcttatcccattacaaatacaaaattcaagttaaaattgaaaaatttacacatatatgtatttatatatactaggttcccatgaatgggtaatattagaaaaatttgaatttttatgattattttttctatttaattagaaaaaatttcttatttttacattatatgggctagagttgttacattagttgaaaaaaataataaaaataaatttttggcaaaattatgataaaaaaaaattgagttaaataatttttttttttccatataaacatatttttgatataatgtaaaaatatgtattttttgatattttggttaattaaaaagataaattgaccatagaaattcaaatttctattttattattcgctatcgaatcaaaatcaaatggtttaatatttttaaannnaatatttatagttaaatttgttttatacctattaataagtaatgctcatttagaagtattccatatatgtttattttttaattaggtaaaattattttcttaatatttttgaaatgggatttgagattttaatctttaaggattcttttttttttagctattggcgctatattggtgtgccgtttggatgtgattatatattcgtattttatatgtacagtaaaatctaagtgagatatcatggtgagtatatgatttggaaggcaagaaacaaagttggttggtataaagatgtacaaattgctaatagtttagtcaattttgtgaaagttgttgtaaagagagtttataatttacatatacttaaattaggagataaatataacatatggcttaacagattgttgagcaaagtgtaataagaggtatgagttttaaagggatatggtttgtaaagatcattaaactaaaggttgatgtacgtaattgatttgaagtaatataaatttatttttgtcaggggtgaatctacaaatccataaatattttcaaaaaataattcaaaaataattattgaattatgttaatgtagaaaaacaacaagttaggatttagagccaaattagctaatgcagaaagtaacaaaaatatatatatttgtttcgagataattaattaaatttataattaatgtaaagcaaccttccccacaaaataatatagctaagctatatttatagaaagaaaacacataaatcacacaattaataatataattaaatataaatttaaattaaccattaataatattattcattttttgtacattgtgacagtacatataatatttttttgatgaatcaggacatgtattaactcaaaatactttgtttacatcttaatagcacctcactcggggcctaaattaatcacttttacaatttaatactttgtacatttcatatcactttcctataccatactgtttacgatgtttacaaagtaaaaaaacaattctttatcttcctctttaatcttcttgggtcagaacaactcaattctctgtgtaacaccagctttgaactccctgaccaccttaataggatcttgctactctttatcctagaaatatgtgtttctcatcttccaaatgttatgaaccagactatctattgctgctgctagaaccactttcctgaacctactcattttggctctcctaatccatctgattaaattaagaagactaatgctagcagtattccaatacaatcaagctttaatctcctgcaaacattgcttagtaattgaacattcaaaaaaaaagtgatctgttgtttcattctgagagttacagagcaagcatttctgttcctctattactctcatctttagcaacttgcctctagttttgagcttctgctgcacagccaaccaaagcaggaaactgtatctttggtgtgtttagcctactccaaacttgtttactgtagtgtgtctttgtttgagatggacacagaagattgtatccctgtgagacactgtatttttgctgcaataccatgtgtccattcattacttccttgaattgttctttgagcatgactaagcttctccaataccagctgcactagtttgttgctttatagctccaccaatctacatcatggatatacacactattaatccatcttaaacatagattatcttctttgtttgccactgcccacacatatttccccattgcaatcatgttccaaacaaccacttttttgaagccaataccacttgttgacataggttggaaaatagtgtcccaagagatagccccaagcccctgatacactgatttccctttccacaaatagtttctacagatagcttcaatggctttaacgattttctttggtaaaatcaagatcaggcaccaataagcatggatggctatcaacacataattgataagcaccaccctgcttgcaaataatagatttttagaactccaaatcttaattcttgctatcattttctcagccaacattgcacattccttcgctaaaatcttttttgcatagattggcaccctcaaataggtaaaaggaaggttctgaatagtgaaaccagatgcatctaaaattctttttaaccgatccttaggcatgttgctcctatatactacagacttaaaggggttgggtttctatctaaaagttatagaaaatagtttgagcccatgtagcatgtaatacacacttctaaaatcccctttacagaatagtaggacatcatcaacaaaagccaagtggttgagtttgatttctgcacatctgtcatgaaaatggaagtcccttttatccccaatcttctccattattcttgattggtattccatacctaacacaaataatagaggagacatagggtccccctgcctaagaccccttttaaactcaaagtatccatgcatagatccattaaacattagtgaaaatctaggtgttctaacacaattcatcactagtttaatgaaagcaatgggaaaatttaatccatacatcatttcttgtagaaaatcccattctatagtatcataagctttttgcaaatcaagcttgatgatgcaactaggcttattggatttccttctatagtgcctaataatatcttaacatatcataatattgtgccatatgaatctacctttgataaaaactccttggtttttggaaactaaatcaggtagaatagttttgattctagaacgcaaaagcttagttgcaactttttgaatgacattacaacaagcaattggcctaaaatctttaactatatcaggacactttattttaggcactaaagtcaatacagtggagtttatctccttgagaatcttacctgttgccaaaaaggatgtaatagctctgaacaggtcctttccaactgtatcccaattatcctgaaaaaaagaagcttgaaaagccatcagggcctggggctttgtttccagggatatcaaatagaggctgtttcacatcattcttggagaatttcttgattagcatatcagcttgttgaggggtcagtacaggacctctttcaactatattgggagacactcttttcctgccttccatttgagatctcagcaagtctttataataggcaacaaataccgcaaatacctgatttggctcattaaccctagtgccatccttttgttcaattgaaaaaatttggttttgccttatcctttgttttatgcttgcatgaaacaaagaagtgttactatctctgtatccaggttgtcttggccttttgttgcaggaaggagaggtagtccttctgcaccttaaccaattttgccctggcatccagttcaacatcaatcagagtgtcatttagggggtcatgttgcaaaacctcctgaatttcctcaagctcaactttggcttgtgttgcagtagcgtgtaaatctcagaatccttccttgttaatctccttaagaactagtttaagtgccttgagcttgcttaccacttgatacatcattaagccattgatctactttgaccaaatttccttaactttactttcatattcaggatggcttctctacatcccatgagaatgatcaaacaatgcttcatttagaaaaatggcttctgcatttgggaaatgatcaagccaagcctgattagccatcaccctgtcaatttttgaacaaattctatctttctttcccttgttgcttgtttgtccaggtgaaaaagttccagtagcctttacatcctccaaacgacattaagttacatagtcaatgaagtttgtatcagcatgatatttgatcttgtgtccaactctctcttctttggcaagaatgtcattaaagtcccccatcagtaaccaattatccttagtagccaagtcacataaatatttccataggaccttccttccacatctatcattgaaagcataaactatagtaagcaagctactatagttattatccattgtagttattcttaatgcgtaatctgacttgtgccctttataatatccataatgtatctcaaaggattccacacaattactattctccctccttggtgccaagctatattagagggaaagcaccaaccatcaaaaacatcaaggtacaaggttcccagtttttaaaccttgacccttgtctgaaggagcccaataaaaccaacattttgtgactaaataaattgctttatcagcctctgtttttattgattgttggctccttagacattccaacacaaaaacttatccattaccaagagagggcactcccccctctcttactttatccctgttacttcctatttgaactatctcctcctatggctcagttacattaccagagagtatgctgatgctgaatgagttgcctatttttgtttctgcaggttgcttttgctcctggactttcttttgcttagttacaatttgaaagccttcttcatctacctggactctttcatgttcttcctttttgtctgtcttaataacccattcttacttgggcttcaattttttcttacattcaacagttagatttcccataccagcacagtgagtgcatgttataggcttccattcatatttgacacccacatgggtactcataccatgtacatcctcaaattctagcatattaggcaggtcttggttcatcataacctcaattaaaactctagggtaattaagtggatccctctcttttgtaacaacatccaccacgtcagggttacctaattgtctcacaatcttgaacaatgattttgtccccaatacttgaggtctaaatcttcaagttgtattcaaataggtatttacttcacatcctctttcttgaaattagtattcgggtcccagggcttcatgattacagatcttatattgaagatgtagccccagttcaagactgactccttgtcctcaatggagcaaaatctgatgatgaaaatgccataggcaagaaatcgtaccttatccacctagtccttccaaattcatttcgcaaaactttcaaggatatgtaatggggggtttaaaccgagcacataacatactaaagaaggtttccaataattcacctcctcttcgatgtcctccatatcaatcttgactctactactttatcctgaactcttaaaagagttctccaaattacgtacaacagcagcagatctaagaataggaggagtcgagttcatacctttagcaattgtactgttacattgctcattatcccgaatgaagttcatgaagtcctgtcgagcatcttcactcctttgaatttcctgtagtgaagctcttggtgacagtggagattgaaaaaagaacctttgagcgtgaatcgattccacactctttctcccctcctgttctctgatgtcatcttcctcatcttcaaactgctccaacgactctactccaatcacagcatctatcttcttggtttgaataacatctgaggcagaattttgtcctttcttcctcgatttcttggttgcagatttagattttctattcatttttgaccttgttttagccatggctctaacaagaagctgtaagagcaaaaatgaggaaaaatctttttatttgcttattgtttacagtacatataatattaataatctacagttaatgataatttattgtggtatgatatttcagttaattcggattagtatgttatatttttatttatttttaatttaaaaaaataaagaaaaaaaaaagaaaaaagccaagtaagaatcaagaaaaagaatatactgtagctatactacaattatattagctgttgacctcgcttttagccaacgacagtaagtcaattaataagcgattagaaatataataaaaatagagcaaaaatcaataagcaataaagaacactaaattttaaagaggttcgaccctttaatttggtaatagcctactcctcttagattgtattgacttgagaacaaagaacacaatgtttcctctctcctctcataataaaatctctgagtgtttcctcttagatctctctctgaagcaattctttcgatcccttttacactgaagctagatcactatttataggggctaaatgcatgagggaaggtttcccttttgcttacaatatctataattggtaagaacatttattacataattagaaaacatgaaatgggggattgagactgtaaagaccgcttagctttaatttgaaaattagtagataattaggatttaattatgaaaattatttaagtctaaattattaatttatagtgat

SEQ ID NO: 110518 - DNA, 8580 bp, Cannabis sativa
ttttatttttaaggtatattctgttaaaccaagaaatgccgttaaataggcacttttaatatataaagatatatattatttttttgtggtgtttgctttgccctttagtatttctgaacaattatccacttaaatctaaatattcaatctgtaaagaaatcgaaatcaaaatcaaaatcctcaattttctaattgctcttgttttttttttgaacagaacttataattttttgggtggtacataaaccataaaagctgcaaaagctattccaatttattttatttatgacaaattaaattaaaaaaaaaagttgagaaacaagtggcatctgagtatgaaataaaatgcaaaggaggtttgacacgatacgaacaacgcacgcagcagcgagtgggacaacacgtgggtctcaggagacttttttgtcccaacacactaacacataaacaaaatcatgcctttgactcgtaactagaagaagaagagacagaacaaaatctcaggacttttctgcaattttcgaccggagatctcagctatgccggagcccaaatctcatgacgggctcccgccgggttggaaagttaaggtaaaagtcagacctgatggaagaaaaaaagacaaggtaaactaaacatgtccaatctttttactttttttttttttttgaactactcgagtttttacttttactgtttcctttttgaaagtaagtttttgagatttttagcttataagtttgactatgggtgttagaatttctggtttttgaatctgagttctctgtgttttcttttcttagaaaaaaagcaaaaataggatatggggtgctttgggttttaagtatttatttagatattgaactgcatgcgtttgcatggagattaatattgactttaatgaagttttgagctgtgttagattaggtagagtatgcatgcaactaaagtatttgattttcactcccttcatactaatttataataactaataagaagatctaataggatttgggagggagggatccaaaaggtagaagaagaaataaaaaaagagactacttagttgatatatttatgattatgaacaaagtatatgcttattgcagtattactctgctccctcaaatggacctacatttaattccagggtagaggcattacgctatctgggtactccactaaacaaccatgaccaactaaaaaagaagaataaagcaacttccaagcaagctcaaaaaattgtatgtttacttgaacttttctctgttttttgttttttcctcttttgtttaaatgatatttgaatttgagttccagttttgggtcatgggtgtgagagtttgagagtaatgtaagattcaaataatggtctatagttttcagtattggagtaagattataatttattgaagggattacctcttgggttgattaaagagattcaggtcatgaaagatgataataatacaattagaaatgacctgctatctatcctttggtacttttaacttcacaagtgcccgagtgtacaattatcgattttcttggttgagcctacgttatttctgctccttttgtttttaattgcttatacatttgaatacttgcttaaccttaaaatgccatttgatttcttacagcagtacactgatccttttagcaaaaatgtattccactcaatgaaagctgtaattcagtatgttgaaactgaggaacaaggaatgattgcacagaacataaaaggcagtacagaaaaagacttggaagacaatagaacctttgtaagtgttcgcaagttaagattcatggcttcgctgcttataattgtttaagcaataatagatgaacaatcataggtaggttagaacttataagtagacaaacctatcctttaacagcaccagaatatcaggtcaatttgattatcctatggacacttattaatgcgatttatttttagtgtaattggctaagtgaacatgtatcagaatcctactcaaaatatgataagaaggcagtgcaaacgagagagttagtaatgtgcattcgcaatagttgtgacaaaatgtttccttgttctgctctactggctttacaaatcacaactatttagtcacttctgcttgttctattgttaagaaacacaagtatgtggttttgatcagctgctgtgatcttcaccaaggtttcctctggattctctcaagctgatgctaattaggcccgagtagtagttataagttttacaatttgattaagattctcttttatcgagccgtgcagtctctggtggaatctttttaatgtcttttttcttttttccttagtcaacaagtgtgatacagcaatcagcagtcagcaaagcaaggagacatattaatttcagtcagagctcgaacatgaatgatatagagcaggaggaacaacaacactcgtcaactcaactcttagccccctctgagcatgaagatcagtgtaaagtttttacttacctctcaaaagcattgacttcattgtcttatatttcagttctcatttctgtttcctcaaattatcttggaaatgagatgaaaatgagtttgcaatgacattttctagccaaaaacaatagtaatgactaacagaatcccctgaaaataagcaaacacacctttcttaattccttgttatcattgaatcagaaggtgcagtttccgaattgttacaatgttcattccgacattttactattccatgttggttatggtctcatgttctatatgaaattaaaaactctctgcaggtgagacgggcgtagcgatgagcaactcagatctgcaagaagcccaagtgcaagagcccaaaagaggagaaggtggtaatgcagtttcaccagctaagaaatatctcaaagatcagttgataaaccctgaaaatgagaaggctgaacatggtctatgcaaatccaagaaagagaaagtgcctgagctgccacgacgtgcttcaaaaagattagcaggacttgaagtagacccagtgccagaactgaggccaagaactcgagcacgtcgagctgcagtcgagcagtcatgtgatgaagtagcaggacttgaagaagacccaatgccagaactgaagccaagaactcgagcacgtcgagctgcagtcgagcagtcatgtgatgaagtagcagaacttgaactagacccagtgccagaactgaagccaagaactcgagcacgtcgagctgcagtcgagcagtcacatgataaagtagccggtacagataaagattctgcccatggtaacggagttactaatacgtcaaaaactgcagaatcagaagagcaggttggaaatgtggaagcaattattaactgcagcaaaaatcaagggtctcatggttgttccttggcgagtgaaaatcctcgatgtgagcagcagagaaatgttgaaagtggtgatacaaaactaggattccccattgacttgccttttcatgaattgttgacagatccatgcattgcatttgcaataagaactcttactggaataaactttggctgctccgagagctcagaagttcttcctgggtccataactagtagtgagcatttttcggtcaacatggcttcagatatgtttaaagtagaaacagataatatggttggcacaaaaggagggagctccaagacttttccttctggtaacatttccagtcttgaagaacattcagaatctgaaaccagggctgatgagaagttactctctcctattgaatttcctagtgaggaatcttggcaagatccatgcattgaattcgcgataaaaactctgactgatgacattccagaaaactatgaacagaatatccaacagtactttgagcagcaactaagtttaggaggacccggacaaagtgatcacaacacaagcttaatagataaattttgccaagctgaatattctcgtcagccatttcacaatgtcgtcgagaaacccgcgcctgcactcatgcacaaaagaactgcaagcaacagacaaagttcccgccgatctgttcgaaacaaaaactgaaaggaaagacaataagatgtggcatgatgagcacgaggcataaggcaattttcctgaactgacttgaaaagtttgtaaaatagatagaactaccagtactaatagcactactactgagtctgttagttttaacctttccctgttttgtgtcagttttttgttgttgtaaccatgtagatccctgatcagaactggttatgcattgacacttctaggcagtttattttgcaagaatgtttccatgttttcttttttacttcatgcacacacaaaaaaaaacgacaataacatagacgtcgtttgatggaagtaatgaaaagacataatatgaggctagtagggtaaaaaggtaaatgaacacataaaaagggcgggaaaatactagctaagtcattataaataagaggtaaaagaagaaattgatttgggttttggttgaagaggtggagaaaaatggagataaagataaagtgcaattgcgaaggagagaagtgtgaagagtgggcaatcgtagaaattcaaggccatgtggaagttcaacctcattttcaacttcccatccataacctcccaatcggccaactctgccgcccttcttctcaggtaaaccatatataattattacaatctattatttttattatatataaatgtcgatgacagatctcaaccattcattaaatccaaaggcagaattttttttatatgaataataaatttttctgctatttcttttctctgaacttcaccctcgatgtgtgattcaatgactacagtgataccttctattgtttatactcaattaagagatacctctttgtgattctcaagaagaggtctcaagtttatgttattaatatttgtaggaagtgtatacatttactgttgggtaccatgaattgacgggaaccaaagtggcgttgaagaagccattgttggtgttgaagaaagtgaagcaatcatcggataatgtagctttggaggtgattggacttattcgccaccgtattttgttcaaaaccagacctaaagccctcatttccagttgagttacttttttgcttttcattatttcacgaaatttcaatttttgactcttttcattttttagctactaaattaaacttattaagctaatctaaccaattatttaatctcagaaccacaaccaactatgaaggagaaggagagagccagggctgcagaggctaagctgcctaactaaataaactagtgacccaaatgagtcttgttctctcttacaactattgttgcttttttcttttttcttttctctgggtcaatatagaaaacatgatcttttgtgagtggtgtgatgatatatgaacatgaacatcccatctatttatgaatgttttcctgattttgtgtattgttgttatattttaagcaaaaaagggtttcaggctcaggaatgtaccaagtgaaaagagaagtaactatggatttcactatagagtaaaaaagtagttccatgatgagaatgtaaacaaaaattgaccgtgttttaatcagaaacaaatcaaattaagaccatgatttatttacactcgagttactgagttacagagctgcatgtgggtatactgttgttttaggcagaagcagggcctgttgcacctgtacgagctctcaacatttcggttctcttgctccttgccatggcttccaccaaccattctacgccttctttaatccccagcctgcaatcattattcataatgagtagatttcatctcgtacaattcaagcaccaagaacatgagaaactagaacatcttagtcttggtaaaggatttcgataaagatgatcttcattataaaatcatgaacacatgtcacattgagaaagattaagtgtgaagttcagtgaattttttattacccgtcgtatgatgaaacagcttcaaacatgtaaaccctttcatccaacttctttaggtctaaatatctagcaagttcctctgaggatacagattcagcaagatcctgcattttgaatgatttatcataaatgtgacagtttacccatgaagcaaaatttcatacacatctaaatggttaaaatgccaaaacatgctcaaaatgccaatttttttaaacagtcacagatgaagcttaatatgccaaaacctaagacaaatttgcagtgaagcttcaaatgtcaaaggttggcatcagttggtcttacctgcttgtttgccaaaattaataaaggagctccttgcaaatcctcatgccgcaaaactttttctggtttaacaatgtgaaggtattattagtatcatattctaaattgtaaaacttttatctggccacatttatagaaagaaagcaaagacagttcaccaactccatgaattataaaacctaataattgatcaaaactcacccagagcagattttgaatcttcaaaacgagatgggcatgcagcatcaattacaaagataacagcatgtgcctcttcataatatttctcccagattgagcgaagaccgggctgttttcgaaaaagcaaacaatattgaatcaggaataataaattttcatccatataccggtaaaaatcttaggggttcaaccacaaacaagatcatatgcaatactacatgcattttgatttcattaataatttgtaaggattattgctgtcttttgtaaatttcagctcaaattactaatatgaccacttccataagcatccaacttaaagttctagaagccagagcctgtcaagctttcatttttcctattcttgatcgattgtttccaaaaaaataagttagctactgtggatagatagataatctctcattgtttagacattggatttaaggttagcagttaaaatttgacatcaagaaaaagttcctaattgtaaggaagtccaaaaattcaactaagtagccaaaatatgaaacgttcaaaaagctgtcagctaccagcaaaacatccaaaaaatagttgaaatttccatcgacgagttttacatacctggcctcccaaatcccagaaaacaagttttgtgcctgagacttctatacgtccaatgttgagtcccacagttggaacaattcggtctggagacaggccttccagatttgaatacactgacttcaacttctctagtaaagtctatcaaataagcaacagaagatagaattggcgtttgtcaaaggaaagatggactataatcaataataggtaaaactgatgtatgtgaaaagttaacagagaagagaaatgttaatatagcagataagtaaatctcattcatataggaaatttcaataaggagtggaagatgcattacagtctttccagccttgtcgattcccagaatgaggacatgaaactctgtcttactgaacatatacttccacagtccataaaacaatgaaaacatctcttgtctatttttatcttccttagtatgtgttcctttccaaccttcaaggcgaaaaggaggacttcacaacatctcactcaagctcacaatttcaaaatctgagaaggaagaatgcaatgttcatcaatcattattggctaaagagtattatgagttaacaagttaagaataagaaaatatctacatgaagatacaattcgcataagtctatctctatctccattttcagtttaatataatcctcaaatgactgactaaagcagtgaaattgtcaaatcgaaacaccattcttaagtctcaactcaatacttctataaagtcacgaaaacaaagaaaacttctttcaaaagattaaatcaaagccttattagtagctcaatttatgttcttcagtaaaataaaaacgaatcaatctgttcgacctttcatatgctcaaacgtataaatattcaaatcaaacctgagaccaaataattcactagtcaaattggatcaaacaagataattaaaacggagttctctaagtaatagcatggaaataagttgacccagaaaactaaatgatataaaaaaatgaaagacacccaattaactttgaggacttaaaattacaacccagataggaaaattactcagatcaagggaaaaagaaattacacggttcatatccatatacatatataatcatatattagtattttaatcagactaatgttgagtcgtagcaaagatgagagaccaaaataagtaggttaaaattcagattcgtacttgaaaggatgaagaggaggcgctaatgggaccggccggcaaactggagcttcttaagcaaccaaactctctctctctctttgagatggttattgctttccactgagatcgttcctcaacattctgtgtcgaaaatgcccatattacccttggtgcaatttttagatccacgagatggtggttctgtacaattaatgtcgtttataactaaaactatgtgtcgctttgcaaaaaaacacaagcaaatggtgtacaaaacatatatttgttataaatattaataattatgtggattttcaaatcttttatttattaccat

SEQ ID NO: 110519 - DNA, 4721 bp, Cannabis sativa
  modified_base (4378)..(4380): a, c, t, g, unknown or other
aatctatatattatattattataaataatataacatttggtactctagacttatgacgcggtgacacaaagggcgcgaggggttggtttacgaatcttctggaagtgttgcggagcgttaaaactcgtagtttaaagaaaaagaaaaatcaaaacttaaaattagaattgaaacgaaccgaaccttgtagaagctgtggaattggaaacaatggcgaacactgtgcgacgaagcctcctgatcaacggagctggagttcatcgatcatggaagagatggttctcctccgatgccttagtcgatttgaagcccggtgaggtcgctgtgatttctggaatccctgaagaacatcttcgaagaagggtataactttcattatccatacactaagaaatttatgtctttatttcttttgtttatagaatctgttttcattgatctcttgtgggctttaatatacagtcttgttattgattgatttatgtatttctgtttttagagagtagagtaatataattcgatacgtgacatttgccaggttataatttactcacctgcccgtacagctacccaacaaggttctggaaaagttgggaaatggaaaattaattttctgtctacgcacaagtatgattgaatgccattaccatctatataattattttgcataagaaattttatcctattattgataaaactcatgatctcaattttatacttatgctataattataacatggtaccatattagctctgtaattagagttatgtagctatgactaggagacaaccttcttcttttatgggtgataaagaaaatcttcttgttttgtggtttaacactattaataatagtttggtgtgtgtaggatcacataacatgacataaaaaagtaaaacgaaaatgagctagctgttcatttaaattacgtcattacactctccaaattctcactctctcaatcctcatgagaattgaaagaattgaatgtgattgcgttagcattattttttaacaattaattattaaacaatattactttttatgtaattactaactttttatattaaatatgaaaataaaattcttatgtaaatattattagatagattttttattttaaaatagaatgtataggttgtatattactgtcctaataattacattacatagtaatcgaacatgccatacgataatggataagtaattagatttatgttgcagcgctggattccttattaatatttgttgtggcttacccataacaatgggggaatttatatatcatgtaagtgcagaacaactatcgagttcatcaagagataatccagcttagtatagcaaatgagcgagcaaacgaggttaggaattattgaattagtaatcaaacatatgaactgcgtgacaatgcgttgccttatgggaaagcacaagctactcgctttctatacaattgcgagtagattaattgatgccaaaataggcatttagtagattaattgatgcaacagttgagctagcagtttagtctggcatcgtaatggtcttctatttgcttttaataggtcaacccaaaaccaaaaaaagatttaataacacttgagctccaaattagacattaggcaatatttgctgaactactataaattttatagattttgtgttgttttccagagcttgttaatattggctactgtggttgagaaatgttcaggtgggaaaatccgttgatgggttggacctccaccggcgatccatatgccaatgtgggagaagcgggtctaacttttgacactgaagaagctgccaaggcctttgctgagaaatatggttggcagtacgaggtaggaacttgctccttctcctccaactgggtgtattctgtcatattaagtgtttgaccctgttacaaataattacagtacattatcatatcataaaattgattatctttaattactttttaatacaaaagctagttgttgttgtttcacataactgataatatgttttaatactggagcaggtcaaaaagcgtcataccccacttttaaaggtatgcactcttcatctttcctctttcctctctctcaatacacttcacaacttcaaccagaatatgtaaatgacttgatatttcatgtctttaaccctattgtcacaattacttttgatattagaggacaaagtagtaggataacttggcactaaattttttgtctccaaattttgagtcatttctacgtcaaataagcttgcagatttttgcatcatgatagtggtatcacctacaattatctcagttttattttgttgttttctgatgttgaccattggaattctatgcagcctaaatcatatgcagacaacttcaaatggaaggggccaccgccgcagggtgtagagtaatgtattttcgtggtgtgaaatgtatcaaatatcatgttactgtcctataattaacaagtcatgttacaatggctttagtaaataatcgtgcatgaacagaacataataatttataatactagactagatttcaaacttacattcttttgataataaaaaaacagctaataaaactatatatactcgatgttgagagttgagacgtacaattacaatgtagatgagctgcatttttctaactaaactactatgtagaatacctatattatatatttacagtacagagttcaaacattacaacttgattgagatgcctctctggtgtggatatggaacctccaagtgaagacgtagtcttttggctcgcatgatattctgataacatcacagaaagcgttaactgagttcttattcccatcactcccccattctatcctcacccagcaagagaacccatctgaagaaaaaggcacagctgtgtcggagaactgaagagccacctctccgccgattctcttgcatgagccgcctccgagtccgagccgtccctcagtattggtcaccatggaatcgagccacgagcattcgggctgaccaactaactccttgtaagcagaatttgccatcctaactttgttgttggaatctgttatcacaactggcagggcctcggactcgacctccgcttcaacttcctctggattctttggagcttgagctccaaaggattgggtaaggtcctcgcatatggaccgcacgcatatgctggaccccaccggcctaacgggttgtggtgaaatgacattggtggtggggctggttggaatcctctgcagctgtttcaaaagatctttctcttcaggaacttcagctatggtattcaagtctattactgggttatcctcaccacaagcttttatccaatcatgctttgaaataactggggtcgaaggtgggtgacatgggaggagaggcagtgtaaccaaactggtagtgggtttctgatccaagatgtggggtatggacagctgggaaagcccatgagtgaagccttgcaagatgtttttggcctggaaagccacatggctagtaggtggagtttgcccgaatgcgtgggtcctttggcgcttaagagtaatggatggtgataaagcagctctacctctcttcctggttctggtgggccgagcctgcaattgtggccagagatttcgcaggtaaggggattggctaatcttctgtgatgtagtattactggatggcggcgtggtggtggtggtggtggtggtcgtttcacttgtgggactcgatggtgtctctggctttggagctataggcctgtaccttgacataatctcagccgttttagctgtattagcataagggttgagggtcttgatcatggtggcgactagtgatatattttttttttctttaaaaggaaaagtaagaaaaacagtagagtgctcctcctcttttgctatatcttttttattttattatttgtttggcaacaaagggagagagtactctggaaataactttgtcatgtaacagagaaagacatgggagaagtaggaggagagtttagagtgggaggtgttgaggaggttatggagaagggagaagtattgacggtgggaaatgaccaatggaagctgggcaaacatgaagcagaggttatatgagaaaatgacacttggactaagcacggtgggtacgtgtttgttaatgttagaaatagatgacatgtgggaattgtcaccacaagtgggtccatgcaagcttacacatataacatgactattgaatagttattcaagttttgacaactgagccccaacctcaaacacacacactcactccatccacgccctaccactcactaaaacgctgacacgtcaattttttctttttatacattctaacacctgacgctttatttatatcatatattatttttttttnnnaaaaaaaaattatatttatattttgataaaaaaatttatactttttttttattttttttatttatttaaactttattcttttttttttatatttttttattttttcaatattttttttattagctgatttttttttcttttttctttttatgttagcttggttgattgttttttctttttaatttctctttatctttttctttcctaattttctttttctcttttttttttttttttttaaattttgtttttacattattttttttataatatatgataaatatatatgttgctcctaaaatcgcccaatatacgtggaccagtcaggaagggacacgtgg

SEQ ID NO: 110520 - DNA, 2907 bp, Cannabis sativa
agggatctccttataaataccgtggaaatttcaatcgctaatgaccattcttcttgtagtgattaataatatctagctttaataccctcatttcaattatatgagctgtttatcatagtacgatggtgtcaaagggaagtgcggtaagcgttctctaatatacgtaccggtagacttgaattcgaatattcgatgaattcaatcaaccactcgtttcattattccatttctttttttacattgttatgttataattaataaaaatgattacacaacaataggcatttttttttactgaatggtattttctaactggcaagctttttacacaagcgacaattaatatatttaattatataagaaaaaggaataaccttcattatcacatcttatatttctacttacaccaccaaaccaaaagaaagaaataatataagctttacttcaaagctaagctcatatcagtattcctccactcatatcatcattatacttagtagtaatcatcatcttcacgaccgtccaataatattattatacactcttgtttcaaaaactccaagtctccaacacataaaatctcaaaaacaaaagaactcattcacattcttattccatattgatcacttctcccaaccaacatgaatctcttcatcataattgtattcatcatcttcttcttctttcccaacaatgcactttcttcacactgcaacacccaaactcaaacaaaaaccttccaaaaatgcatgacactcccatcccaacaagcctccatagcctggaccttccaccgccacaactcaacacttgacctcgtcttcttcggaaatttcatctctccctccggttgggtaggctggggcatcaaccccgtatcctcagagatgaccggaacccgagctctcattgcctttcccgatcctaattccggccaaattgtcctcctcccttacgtaatcgaccccactgttaagctccagcgaaccccactcctctctcgtcctctcgacatccacctcatttcttcctccgccacactctacggcggaaaactcgctaccgtccactccggcgccgccgtccagatcttcgccaccctcaaactggctcctaatcggacaagaattcatcacgtctggaaccgcggcctctacgtccagggctactccccgacgattcacccgaccaacgccgatgacctgtcttccacggcaaccatcgacgtggaatccggatccaccgcaggggggcagcgaaacggcgtcatcttaaccttgagaacatttcacggcgtcattaacggcatcgcctggggtatcttactcccgacgggagccgtgacggcgcgttacctgagacacatacagtcaattgggccaacttggttctacgtccacatggggattcagctatcggggttcgtgctgggaacggtgggatttgctgttggaatacggctaggcgatctgtcaccgggagtccagtacggtcttcaccgtaagctgggtttcgcggcgttcttgctgggagcgcttcagacattggctctgctgtttcggccgaaaacaacgaacaaattcagaaagtattggaagtcatatcaccactttgttgggtacgcgtgcgtggttttgggagtgatcaacgttttccaagggtttgaagtaatgggtcaagggggctcgtacgctaagcttgggtactgcttgtgtttggctacgttgatcggcgcttgtatatctcttgaggtcaattcttgggtggtgttttgcaggaaagctaaggaggacaagttgaggagggaaggtttaattgggtcatcggataaggggagtggcatccataattcactcaattaagattactagctattttcttccttaaaaaaaatacgtatagtttattagtcttgctgtttttattttgattttttgagggaaaggaaattatatatatagatagatataggagttgagagagctttctttggtatttttattttttggtgtttattaacatgcaacctgtaactaaggatatataagcacattccagtgttaccccttaataagttaatcttgcttcatgtgtcccactcccatttcatcatggatttggataaatattgttcataatttttttttctttttttaaggaaataaaaggttttgttcatatttataccaagcatagcaacaaaaaaaaactaataataatgaagatgtttttattcacattattataaataaaataaaaaaaagatgtcaaataatgtcaagaatgggattcgaacccatgccctttcggaccagtacctgaaactggcgccttagaccaactcggccatcttgactttgttgtcttgtataattaatgttttatttatttaattgaatattaaagattctaataataatgtaatgacttgtaccttgatctgtttgacttgaaggctgaagtgaaattcaccgtaagcataatgattgaatcctcatttccaagcaaaccaaattatactaattgcaacttgaaatatagggacttagtgggagtactcatcttaaattagtagtgccttacgttattcagattacaaaagcttgatcattgtaaatgttgttcggtaataattttatttttttaattttttaataaagtacaatttttatttttaaaaatttattttaaaaaataaaaatacgtgtagtcactttattttttaattttaaaaatagaaaatatgtgttttgtaaaatttatttcatttttattttttaattttatataagtctggtctaggtagagatggaaattaggccgttaatgtacggggaatgcaatccccgctccatctccgctacctatttatacctacatccccgtcccatccccgtctaataacca

SEQ ID NO: 110521 - DNA, 5988 bp, Cannabis sativa
ttgactaaaaaattatttcagatgctaaaacagataggggtgcatcaatgtatccattttaagggggtgcattgtagaattttcctataaaatgtatttcctttttatgtcaaaaaaaaagaaatatttcttttgctgacgcacatttttaacatcatcctcaaaaccctaaaaatcctgtctttttcgaaacaaatccaaacctcttaacttaacgctcctcattccttccagttccactctctccttgttacacaagaacacaaaatatcctctgcaccaacaacaagtaagaatgaaaaagatttagttctttcttttttctgtttgtgttattattgaatccatttatgaactcttcctgatacatgtgaatcaaaggaaatttattgcctttttcttggtatgtgtgggttctttgttgttagttcagttattacattgtttaaaatctagtattatatgaatcaaaggaaatttattgcctcttttttggtatgtatttggggttctttgttgttagttattgcttttagtattgtatgaatcaaaggtgaatgattgattgttcttgggtgttagttgttgttacagtccaatcactcatggctgaaatgggagtggaggaaaacagagttggtctaaacaaaaaaagacttaaaacgaaatcgaatatggttgatgagaaggacagaatttcggaactacctgatgagattatcatacacattctgtcgtttcttccaactgaggatgttgttcgtacatgctttctttcaaagcgttggaaactcatgtggtatttggtccccaaactctctttttacgaacaaggccacagaaattttgacaattatgtcaacaattgtttgaaacatcgcaagagaggtatggtttgtgacctaaattcagtcataactagttttaaggttactaccaacaactatagaaacgacactagtttagataaatggttagattttgcagttgagaacaaagtgaaggaaataaatcttagcttttctggagattggtcttcttcgtcctactactggttacctgaaactctagtagttaaggcaatatatttgactattttggacttggctttggtgaggttggattctcgttactcatttagttttccatccttgaaatcattgtcactaagtagtgtttggtttgctgatactgatacggtagataagctcttgttgggttccccttcccttgagaatttgcagttagatttcgatgtgtttagttttagggattgtctccacttatgtagtgtaagcctcaagtttttggatattaatacccctaataatattggggtggaaattgattgtataaatcttgaatctttgacgctacaaggttttatctttgacaaaataaatctctcctcatgcagcaaagcaattagaaatatctcattaacttgtttttggggtgcggtatcatcatcgttagaacatctcatctctagccttcctctccttgagaatttgactttgagcaattggcatccgtggaagttgaagcacattaagatctcaagtcagaccttgaaaagtttcaatctgaatcattctgattctgaggaggaattgactgttttaattgagtcagctccaaagttaacatcattttgttataatggtaatttcaaattaagtgtatcaatggtggagtcatgcaatttgttgaatggaacattcatactggcaaataactatgacatcaattggtttgttagtatggtgaattttcttctaaatctcaactgttcctggaaaagggtaagcttacatgtcgactcagataaggtatatttgtcacttaatcgctgttatttcaaatttatatatatattcttgtctgtttattgatatttgttatttttttttttatatacatatttaacatgaaggctctcatcttgccaaaagacttgaagaggttacattgtcctcctttgattaattgtgagcatcttagagtttttactaaatgtaaactggcaagggaatccgatttgagagatgttctgttgtcagtctgtccatcattaaagaccttatctatagcagaaggggcgcggaaggggcatctttgaaagactattgaacatattagatgatgtttataggtagatgtttgatctctttgctaattgctaggttagtgatttttagattgtatctactttataggtagtttagtactaatatatttgtataggaatgggatttatttgtctatatacaatatatatttatatatatttgcttttgaatgagttgatatgatatatttatttctatatttgatgcaattttctacaaatatatgaaacttagacctcacactgattaaaactgccaaaagggtatgtagtttagctaatttgctggagtgtgctgaatgtataaactcttaaaaattagatcaaactaagaattggtcttgtaatattcaaaggatgcgtaggttactgttttgattttctttatacatttttttttaatgtagacatgggtctttaatctttcttttgtgttcggctaaacacttgagacaacttacatattccaatcctacaactcagctacaaactaacttaagtaacagaattaacaaacattctgttatgacagttagtaccgagctagctttcctagtttagttgagattgagagagaaagactagtgtgtctgatctagctgtaaggaagcaaagcttcaattgagtgatctagctgtaaggaagcaaagcttcaattgagtgatctagctgctgggattgctttataattctctctcagattgctcaataaaattcactagcccttggaggctgttctggccgccgagtagacaaaataacacattgttatcttgattgcaccacgttcttgtctctttctaatttcgtttattgcttgttcatagtttagttcatgttttcattttcattgctcttcatttgacttgttgaattttgttttgttttctgttcatgttgagctatatttcacaacaatgcctaaaaacttgagatggatatgtggttcttcactgcttgcttgcttaggttgaagcttctcaaatttcaaggctttgaatggataacttcagagatacataccttgttttggatgattgctaagttttaagcttaaatatgatagtaatatttgaattgaaaagccctgttggaagtgtattttctattattctgctgttataacttatataaacttatgtaatcattggtttgacatatttgatggcacatacatagttctagttttatacattttacccaattttatcattagaataaccactaaatattttactctagcaactttcttttcattccttctttctcttttttccctctagattttggttctgcattgtaagaactaactagctagtttgttaattaatttgttggtgaaatttgtggggtgtgatttgactggttcagctcaatcaattggaaatgttgttggaaacatacaatacaagactaaataaagattgattgtaaaaggtttaattgtggtttcaagatgctctgttgtgtactccttctagctctagcaatatataattattcagctgtctattaatagtggaaaagaagaagaaaagaaattcaattgaaggcagccaaattttttggtaaagcaaagcactatgtgtcatgttttgtcctcattacaaattcaattgatgaacaagacagagaaaaaccaatataaaatggcatcaaacacaaatttgaagagaatctatcctcaagttaaaatagctttttatggaaagtgaatccctcctaattgtgttttgttttgcaagagtcttgatgttgagaaagattcttagtagtgtaaaaatattgatgctgaggagagttctcatgttaatttggtctcttctctgattacttggcttaaaatcattaataataacctttattaattttaaaagtcgtaactacaaggctcaactcgtataaattccagttgtgtctaaaaggcacgtactcgcggattcttttatgttttattttttttttaaaaatttgatcaaaattgaatttaggtttggagtatcaatttttatttttcatgtatttttttctaccaaatacactaaaataacaaatttaatactaagactaaacaaaaatgaattaaacaataaaaacataagaaaataataataaaaaaaaactctaaatatacacaagtctaaaaattaatgatgagaaataatctattttttaaagttaggtagaaaaataatatcatatatataagatacataaattaattttttttattatcagttaatataaaacttatgaatatataatatcatttcacttggaaaccatgaccttattataatctaataattataattatgaaagactgttaaaatttacaaaacattataatgtgcatcacttctacctaataataacaatgctcaagctattactaatttggagccaaacattagtatgtaatgaaaaagccttaaagatgggaaacaaagataaacgaaagacttttgtccaataaataaataaataaaagataaaagaaagactaatcatgtcgaaaagaaaagaaaaaaaaagtaatggtgactggtgagactgagatccctacattaaacaaaagtattaattttccaccacctaggaaatgtgggagaatataaaacattaatactctgtaccattattcctatatgaacataaactcaaatgatttctccactagctaagaattaatactttaagaaaatatacttagctaatcgcaaaataacatatctagaggtgttatacacaactgatattcagttacaattacaatgctcaaaagcaaaacactcagtttattaatagtaaggaaatttacatggtatactaacttttgccatttttttaagaaaatactgccagacagtattttttacttttttaccgtatttttttataagtttcatactgcagtatactgtgttaagttttcactggcgttttactgatgttttactaatgttctactgctgtttttagttatactgctgtttttagttatactgctttgtgttttattagtattttataaaaacacagtatttttgaaacaattttcgtgtgacagtatttttataaaagttaacctaaattctaatatttttgtaagttttcctaatagtattagcatacaacactaatagtaaagaagtgggagcccaatatttattagaacatattgtttctcatgcttatacaaatgtgaatgaatataaaacataaattcacaacttcaattccacattataattcttcaaatcatgttctctctacaacctactaaatgaattgaaattggagacatatcattattattaaatattgaattttaagtttaaaattgaaaaattattaaatgtccttaaaaaaaacaaaaaaacaaaaaaataaaaagagaatatttttttaggaacgaccgataaatattatcataataaaggcgacaaaaattatacaaaaaacggtttcttatatttaaaaaaatttattgtctatcctaaaaatatgtttaaccaatctacgagtctcaacatgctcataggtgagatgccttacaaaactaaaaaataagactttaatattaaaaaaataattcataatttattcagatacattaaccctccaaagttagacaaaagaatattagatccaatgatattaaaaaaaaaaataaataaaaaaaataaaaactgagacactcaacccatagtcatataagatccaatgatattaaaagcgtattaattgtccccacataaaaaatagaacattgctattaggcatcagtggtgcctagcacctttgcgacatgtcgcgttacgattggctagcgatactccctaaaaactattata

SEQ ID NO: 110522 - DNA, 8150 bp, Cannabis sativa
  modified_base (7272)..(7274): a, c, t, g, unknown or other
  modified_base (8091)..(8100): a, c, t, g, unknown or other
ctgttgtttttagttgttctgtttagtgttccactattgttttataaaaatacaatattttttaaaaaaattccgtgtgacagtatttttttagttctgatgggaggcgttagacatgctcccttgagcttacattgtatataataatgcataatgtaccgtacaacaccgtataaaaatgcagttgaaattttatgcattgcagttacggtttgcattttttttcaaactgcgagtgcaatttacgatttaaaatttaataattgcggttcaaaccgtactgcactatacattagaaaattactaatttttacaatataatttttatttttttttcataagaaagaatatatcattataaatgtaatatatattatattattttttgagataatttaatataataacttgatgattagtatttatgttatgatgttaaaattttaataaaaattttctttttgtattgttaaaaatttatagattaatttttaattttttattattatgttcgataatgataataatataaattgctcaaactgcattacgatttgcaatttgatttgaaaaaaaaaaaaaattataacctacaccacctgcagtgcaaacatcccaaataagttattacttcacttatttagttttaaaatgcaaacattttacagtagtcctccgaccaaaaaaatagttatatgtgtacttttttatatattaaataggttgaaaaaaattctctctggttatttgtaattttccctctctcatagactcatattatatttttcttataatttactcccctaacttatgtttctccctccgccactagcttccacatatttagtattaatattataacttattgaaattatggcatttggcacatttcaattctttataaataactaattccgtaaccaatttcggataacattaagaaagaacattgtgcattagttagccatatgacttaaaagatatatagaatcaatagttaattatactaatagcagagtcaccaaaaataatgccatgcacaaataatattttttaacaactctcattttaaataataataaaaaaaactaataaactgaattatttcatgatcacaaagctaaaccattatgcattgtaacagctaaagagcaattttaatctcttgtttctaatttgtaacaaaaaggaaaacaaaaaatgaatttacgatagattttaatttctgtttccaatttgtaacaaaaaagaaaacaaacaataaatttaccatagattttaatttctgttctagtttgtaacaaaaaagaaaacaaactacaaatctaagatatattttgatttctgtttgggttttcggttcgtttgaccatagtatttttggtttattattttgaaggataggaagattaaatcaatttgcttaaaatagccacaaatacatgaagctccatagctttcgtctggctcgtgtgactattcctctcctaagtcttcgttggagcttttttcatagactcagagtaattaacaatatgataataataataataaataaataaaatcacacgtacgtcttctttgaatgaccaactaactaaccctacccaacccaactgacaacgagtcgtaagaggaataaaattagaaagaaccataaatacaactcataataggacccttatttcggtagtgccactctaacatgccaacctttattcctttcctttttatataacaataacactacttgtacaatgtaatgatgttcttttagctttctgcaaccattttcctcacacctctactccctagcttttctcattttcccggaaaattccaagaagattgagacgaaagtattatattagcaggattcggtctcttgtgatgtcattttctagcatactctcaaagtcttatatcaaataagagagcatagttatcttacgattcctgagcctgcattatttcattctcaaatacgtaccgtacacccctgattctgaatggggacaaattgttttatgctctcacgataaatggggaagtttcatcatatcaaaagctttaatgggtttttgttacggtcagaaacatatgaatgcaaatcaagaattgaaccaaagagattggagatatagagttttttgggttgatatttaatggggttgttctttttttccagaagttggtgtatcatcttggttatctccttgtcacaatcacttgttgtgaaaactaatactactactactactaccgcttcttctttaaccacttcttattcttctcatcctcttcatcgtcatgactctaagtctttggccaactttttccacgactatgcctcaaaaactgtagtgagagttacaacggctgttaattacaagattcgtctcccagctaacttcaccggtatgcaactcagatttgtgaggttcaggacaccaagtttaaggcgcagaggaggtcaattcggctctttttacgtgccaccacgagttttatcagcctttccaatggaagccagaagaatagccatagtgtatgaaaatttaggcaattggtctaattcatactataaagtgcctaattatacgttggttgctcctattattgggttctctgtttatgattctccagctaaagcccccggtggccttgtagtaggcgatgaaagaatcagtctaagtgtccagccagggaaaaagcctattgtgataaagtttaagaaaattgacaaagatttgaaagaatctcctctaaaatgtgtcaagtttagtgacgatggaagctatgaaatcgagagcatgaccgtgccaaatcgatgctttgccacatctcagggccacttctctgttctcttttccaccattagttcaactacttcaccactaccgtctaaggcaaggcacaaggtctatttgaaatggtggttgacaggattcggtgggggttttgctggtgtcgttttgctggttttgctttccactgtcgtttttaagattgtaagggacaggagattaagagctatggagaaacaatctgaatgtggtgtgttgtttgacacatttagtgttggaaaaagtaaaatgccttctgctccaatggttagaacccaaccagtcattgaacatgattatgttgcctgacctttatttatttttcatacatacattttgggagttcttttcttctttttcattttcatgtgtacagtacattcttccacacttcaaaggaagaaaagagaaacagtatatttatttcactcattctatgtcaaccttaatttcttcgttttttgtattactattattatgagacactttcttatttctttatttttactagtattattataattctgttctattcaggagcctatatgaaatttggttttggcacatcccaagtttcaaacatgtgttttttgcgaggacgccggcaagtttggctcttatgccaataatgtaacattttctagcctagccttgtatatataaaatctgtaaaaagacaaaatatgagtttggtacaacagaacaaaatttttgcctctcacctttagttatgctattaattttaaattaaagaatctcttgagtttttttaaagaaataaaagaagaatcttgcgaacaaactcaacccaatctgcatagatacaaattttcttatgtataaagaaaaagggcttgcctttgacagcaataataatcaattactacagtaaatagagttgctagcgctagtctttgaatagtgttttaagtagtttccacagcattgaatatagatgacgaaattaaacacgttagcatacgaaagcaatacgctaggagcttaccttacagataagtcaacccacaaggtcttttttaatttaaaattttaaataaatattttgaatgattgatgtgatttgaagatataggtatttgccactactagagtcacttaactttgtcaaatgaaatgatttaaagtgacgaaggaataaagtaaaatggttaacctattggttgaagatcacaaaggtgggacaaaggaaaaggaggatcaaaataagagccacttagaattgccttggtgatgactttgttagcagcttcagaggcatgaatcccatcccagcttacatagttgtgcggatcactacaagcctctgcagtcacattacggccatcgataaccttagtgtttccgcagtaaactctaggatcaaaattatgcgcaccaccaccatgcccacaacaagcttttgtaccatatttcaaccctgtttccaaaaaataaaaaaaccaagaactggtatggtaaactcaaatcacaagacacgacactttcataatctaaaaactagagaccttattattattgtgaccttctatgattattattggattaaaaactagagaaggtgtaacacgttactagtggatgtgtaacacgtttctaatgccgttctaaactggtgtaatagtactacattgattgattttttttataaagaatttggctggtaaagtagttagaacttagaattaataaatgcttgctgtggtacttagagaccactcagcaaaacctttaaataatgaataccgtgagatgtaggatggtgggaaagctctagtaggatagagtaagtgtccacatagatgagggaagcatttgggagcgagcttctagtctgacttagggcatccttcagtaatttgttgtaggaaactactgcgttgttgtatgaaattaggcatccaaaggggtcaatgtctgagctattatgaggaacttgcaccaaaaccgctggatagcaacccacgggtgccatgttaagcacaaaaaaggctcgccctcctatgccatacagctcctattacacatgcatgaaatgaaatgatcaattgggcttttccataatggggcctagtatttggcaattgttatcataggcctaggcccaaattatacaacctttattgtataagcaatttgccaaaccacttgtggtagatattgttggactccttgtataccaatagctgctaggttggaagtgaaatcattttgcccaatgtagaaggtgtagagtgactttccgaatatgtccggtgaaggaagtctttgtgattctgcaaaccaactttcatatcattacccaaaaataatgaaggattcgttttctgatcagtaaaagaaattttaaaaataatacaaacctttttggtcagatgagttatgaaattcattaaccctgaccttaaattccttcatttgattgagttggatagctagtgaaaatgggcttatcccagtgacaaataaggaagtgttaggaaggagcacagtggacgcaagtgtagcataattggccccatgtctataatcagatccaatggattgcaaatatgggctcagaaatggcaatcccagagcctgagctgccaagttccacacaaaagcatacattttataattttattattattattatatattccatgccatcaatggataatttacttaaacaaaaatataaatcattatcaaaatttaaatgtcaaatgataatacattattcatttcttgtataattcaatggtaaaatttgactagaaccaagacagtataaaaattaaaaatgcgtaagtaaataatctacataatggcaaaaactatctttgacttgaaactcactccataatggataacaatgaaaattcaagaaagaatttgatcaaaactccaaactttttccagacaggtctgtttgctgtctcctcttccaagtttggagttttctctaataaagtaatatatagtgccctataggactgtacgacacaacgcagaacacaaacgtctcctttatctcgaggtgttatttattttcaattttgaataaataagtagtaccatactgatctcgagagtgagcaattgaaatgataaaaatagataaattttgcaataaatatgaaaataagtttagccgttacacttaattatgttgggacgaaaatggtcgatactaactatgcagagtagaataaccaaaatcaataatagagttacgaattttgtgttttgaacaaaacaaataaaaaatggtaatatatatatatatatatgttaattagttacccagaaaatcaacgatgagcctgccatcagaagctcgaccagaaggtttgttaaaataagtgatgccgaaaggcccagactgagctggaaaagcggcccaaaagccaccggtatcagtgttggagtctccgaagttaaagattgctttgaattcacattttgaagagcttgaagttgcaccacaaaaacttggcaccaacacaaaaacccatatacataaaaccactacaacatgactacttgacttcagtttcacacaactcatttttctcttcagctacttcagagagagttcagtgtatatcactatgacaaatgacataaagtatttctactattttaatatatattccaaattttatgaaactaaaattaatgtgcaagtctcactattagattgtgtcggtcgtgctttgaacttttgtgccattgtcttacggttccatacagctggcacagacagagcacatatatgtaaaattatttatattttatgatcatatttcaaaactgtaaacacctatatatagaattatcatttcataattcctgtaaaagtaatttaaaatccttattgcctgttggcatttcgatttcgaaagaggaactgtgaaatccgtggttttaaaaaaagcacccctcacatccttcaccttcaaggctcaagctgaagtccccctacactttcagaaccaaaaagaagaagaaaaaaacaagattttcaatgatttgacaaaatgtgctacacacactatactatactattgtgtatacacaacataagagcaagatgggatattgggatgagatcatatatttgcataaataagagtgagggtcacaaacaaatggtcccttataatttaagacacctcataataattaatacactactaatttttggaggtaacattaatggagttcaatcattgagcttcattggcaagtgaggtgagcaatcctccactacaagatatgatatatgatgtggaattaatttttagtgagaccgctacatcaatagtaaaattgaattggttattgaaaattattgtttgaatttaatctctatttattttccttttttttttttctaaaaatacaaaattaaaaaaaaaannnaaaaaacaaaaaaaaaaacaaaagtatatacctatacttccaaaaaattacaatttaaaaaatactaaaatattattattaaaggataatacaatattattaatatactatactattctttttttaaataaagttacttcaaaataattgtttattattcaaaaagattaaattaaaaaaaattcttctataaatacaatttatcgctaatcacttatcaactcttctcgagtggaagaatagtatttcagtctctcatcgctcaacatttatcataggtatattaatcacgtcttcttttcttcatatttacaattcatttatacatcttttatatttataagatgtttgatattctatttttctcttttttatacaacattgtatatgattttttatatataatatataatttttcaagtaagaaaatgctatataatctcataccatcttattatctattaaacttttagcaactaaattctcttatcgtttcacttacacttaatcttttaagctcaaaatttggcagtaaaatctttcaaactactgaactgttagcaaatttaagaaaacatccagttaactgccaccatacactccttacgtgtatattcttatacacgtgagacgtttatattgatacacttaatatttttatttcaaaattcattttaaaattataaaaataaaaataaaatatttaaaaaattaaaaatattataaattgaaatgatttttatggttttgaaataataatattaagtgtacccagggacggacccattacaataatgtgggggctatagcccccacnnnnnnnnnnattgtcttttaaaaaattaaatatttatttttcaatttaataattataaa

SEQ ID NO: 110523 - DNA, 7143 bp, Cannabis sativa
aatccttgattggtccaagtcattgaatttttagttttttttttaaattaatttaaatataccaataaaaaaatgacacgtggataatgacttaacattcaacggtgagttacctacagagtttcataaatataatttaaggattattaccgccaaaaattaaacttaagtacttatttacaactggaaagataaacttaagtatttataccataaattactctactataaattattaaaactctataatttaaaatatcaaatttcatgtaataatataaattaaaataatattaaatagtctatttcacatgtgtataaaagagttacacgtgtaatagactatttgaatcctatttttggcatgctaatttttttttttttgaatctctcaaaatcttacaagatgtctcaaatagctacaacatacatatacgataatacgagcatgaaagaataattgattaaaaaaatttcccgaatgctgaaacagataagagtatatcggtaaacttcttttaaaaattacattgtagaatttgtaataaatatatgtatagaaaatattattatacaaatataaaataaaaataataataataaaaatatcataattacagtgtacgacatatatgccgtgtactgtaacacatactgtataacaatgtaagatatagtaatatattaaatttatttttttgcaccaaattcaacatttaaagttacgttagaggtattttaaaagttgttagtagtgttcctttttttaaaacggaacctattgtaatcgcatctaattatgaaaaataacagcagtcagtcacctaatctaattttttctttgcttacattatataaacttacaaaaaaaaaaaaattcaatgcataaaataaaataatattgatttatacaaatacaacaaaaaaaaattgttctctgaaggcttacaaaaaagtcttttctaaaagaggaagacaatcattagaatatattgttattacagaaaaatcactactcactctcacacttccattactcttgctctcaaatctcaattccaataacgataatcatttcataaatcaaagtttaaacatcgagataaatagtttattaaacatttttttgattatttattggaaattaaactgcaagtttatggagttgcttgtctaagtgccttcaggtggtcacctcttaggtgttcccaaactttccctcattactcgttgtttggtctacaaattgtttgtgaacgaaaattttcgacctcgattgattgtagattttagcatttagaagttagcgtctgccatgagcccccgacaaactgatgacgagcaaagcaatccaatatccaagagaaagagtgcgtcgtcaatgaacagcttgctttgatggcctgatggcacaggagaaggccgagcgaaatattacaatggaggcacaaatagtttactgaaagcttctatagcaacccatcaatggcctaatccaattctgagttgtaatattgcctatgcaaccatttgattcaacaatgtccaccccagcagtctgacatgccagagtctcaggcacctggttggaacactatttttccaaacataaaaagaaatacaatgggagaagtcaacaaaggagtatctacaatcattaatgcatacgacttagagacgtaggaaaggtctaaagtgatgcaaaactcaaatacaagaaatttgaactcttttgttttgtcaaaaacacttcaaaaagttcccaaataatgattctataactttataaagcacaccagtaattacattaaccatcaaagtaacaaataaatgacactttcaccagtgattcaataaccgctatattcacaacaatttggagctttaacatagcatcttttcaaaagtataaacacaatgatgtatcagaaaatttgtcctcacacacccactgtaacttcctgaggcatgatctcatgagcagcaggcacaacaagtacatgatcaatgttctcaccggtgacatttgtttcaggatcttggtctattttctcattcaactgttcggattctggtatggcttctttctgaatttgtctttctttgccaactgattttgttttctttgtcttgatgggctttggctggattttattagccacagtttcctgagaatgaaccttagcttgtgacttcttgattggtttctttggctctgtaacttctttttcgtaccccttgttcccattgttctggctttggttcagaggctggcctaaagaaacacctccttcagaagagttgctcactgaaagattggagattttattccttccaagcttgggagatttcgcacgtgtagttggtatctgaaataatttgtagatttaaagttatgccttttctttcctctaaattttttactgatatgttaataatcaaatagggttcaggacttgaaagtctttgcaacctttttaagttcaacttttggaggtggctctttatagaaatttggcattggggaggctttaaatgtcatactcttcctcagttgcttgatctcagcctcctggctttcctgcataatatatataaacattaaataaaaatgcacaataggagataaagaacttcaagtatttcaacttgttagtgccaacaacaccttcgatttcacttgtaaggtagatttttcctcctccttggcctgaatcttctcctcaagctttgtatagaactaaataacaatgagcaggacactagttaactctttaagcatgtatttagaccatttgaagaaaaagataaagaaatcaatgttaattacctccttccgctttgcagcacgttcatccagcctaaaagcaaatcctgcagcattgcttctccgaccaccagttgtacttctgatgatagtacacagtaacacaaaaggctgagtgcaaaacaaatggagaaatggttcaaacaataaaaagaggaacatcaaatgacaaaatcatcttggatcgtacgaagtagtggagtatgtatcatcctcctcttttatttgctgtgctgctgtgacaggaactgagctgttatcaattgatctgcatatgtagcagcaaaaattgtaagaataatatcacaaattcttttctttcattaatttattaattttttaagaaaatagaattttcatgttatgctgtgcttttatgaaggcataagatgagttagtacaggtaccccatttataattttcgttacaattgggcaattgaacataaaaatcttgtagttgaagtttatggtaacttacaatgaggtttcagatgaagggtcattagcagtttcactaacagagccaatcttcccagactaataccaaaaagatataaatcacacaataagtcacataataaagaaatgtagcaaaccaaatcgcatagacaaaagagaaaaattaaccaaaaaatggagaaaagattcttactgtagattgcttgttgctaggaattgatgtcaatgtagccctccgggaagtagccccattaggtttgtttccttccttcaattgtactcctgcaacagttgaacgcctatttgggcgacttaaagaagatgaagtgactgttccattggcaaaagaaggttcaggtttggttccatttgctcgagcttgtttggtttctcttttcacaggtagcccatccacacttttcttcattccatcagcccgagctcctctagctgggaaggaaaaactctgagaaagaatccctttctggtttctagaggactgagtggtgctttttaaaatcttttccttaataattttgctgttcttagaggaaccattgtttgaagcatgagaatcctgtccacacaatagactaatcaaaatgatgacagcagagctcaagctaagagaacttctacatttttattctaagccacagtttacctttgtagttttagaatttttactcggtggagcagtcacagaggccttaaccgcctcacctgcagaatctacgccatcagcagtgactgccacaggttcagattttccattcatggtgggagatttatcctcaagatcagcattctggccctcattatccaaattattcactggttcttcaacttggtttccctcaacaacacatttctcatcttccaaattgaccccgttttcagattccatagaagaaatgcttaaacaaaatcaaagggaaatatcatcaagcgtgtgatgttcgaaccatataagctaacaaagatggtttagatagtaatttgggcaaagaaatacaaaatagtaaaaaaaaaaaaaaaaaactagttgatgtaagagaaagaaagcagatttagtgagaaaggtacaaaacatagaaccagaaaataaggtgagaaaaactttaaaatattaaaacatgagatccacaagatcaagataaccaggtcaaaaacatcaacatctgagtggtgccccccatacaagaacaagaatccaatgctatatctttaagctagaaaaatagatgaaaagaaggaagaagaagcatattcttctatttccttaaacaaaaatatctctaaaatattcttcttggaaagaaaaactagtgtatttttgtggcatcgcctaagcttgaattaacattaaaaaagaaaaaagaaaaaaaaaagaggacaacgaaaattagccatacagattttctgctttacaacaaggaattatatcacaatgcttacatagttccaaaagcctaaaaaagcaaagttcaatccttagatgattctgtatagcttccaaaatttcactctctctggatcaagtcatagtttctagattaaagaataatccaatagtcaatctaacacgttccaagaatgaattttcagattctgggtagtcttttatactacatttttctaaaagaacaaatcaaagattcaaggaactaccatagatcgatacttttcatcaatccaatacaaacccagatgaaattaaatgacaacaataaaagatacccaatacccatatgaaaaatcaacagaaccaataataaaaaagcagtaagacggttaagaaaaaacataagagtaagtgagtaaccgcgccatagatcaagagaatgaagaacctaccaagtttagtgggtggattccgaaattaggttgtggagatttaggtcgaaatatttataacaagaaagaaaagagtgaattagaaatggattatggtttgaaatcagaacaaaaataaaatgttggggttgaatgatggagtagagtgaattattattaattgaagcagtggaaaaaaagtgagttggaagaagagtgaagagagagagagcagtggtgattggtgaagggtttaagttgaagtggtttgaaatggatagttagaaattgaaagctttagagagagaaagctaccagagttggtgatacaatacaacttctctctgggttttgcttcgacaaatacgaagtgtgagagaaagagagagagagactgagagagttatttcatcacgaagtggatagagattgactacaatggcagtccgaatttactaaaatacccctctaactgtagaccttgttttttaaattctcaattttaagggggagcggccgggcaaggacaggattagttttttgaaatgtactttgtcatttcttagcaaaaattctgagaaacaggtaagttggttttttttattattatgtatataaaaaaaaaacagtaacaaatatttcttttttctcatttttttaaggatgcatcaaacttttaaactatgtgagaaagaaaaatatagaaaaaaaaatcaatttttctatgatatgaaaaattttggtgaattaactttactttcatactaaaacatgaaaaattgatgttagtaacatggggtgctaactcccttgggaaaggataactagaaaaagcaaacaatctagctcacacggctagatcattggcaaccacattaagaaattttgcgatagcagcataaaagatttggtagtccgataaaaacactggatacatgtagttactctccatgacaaactgcactgtaagaattccaacctgaatcttagctttaaaagctgaagaagcattgaaaacatcagttttaaactccaagaccttaccatttgcactgtaaatgattacaccaacaatccctttgacacctacaaaagaaccatcaaagttaaccaagacttggtgcctctcaatcaaagggagaaccctagggtaagataagggttgagaggggaaatttgtaacattagatttatgcatcttcacaatctcatcaacacgataatttataaccagcaataaatcactaggagccaataatcgatcctcatgaatttttttatttcttaccaccagagggattcacaaaccgtaattccaaaaagagatgaactccctctttagattgtactcctctaaaggaataaagctagcatccagaaatcattgaacaatatttcatcttgagctaaaactcaagctatccatatggataccccacctattaccaaaccatatagctttcatagagattgatataattatattgtttgctaaggtttctcttcctaaatctttagccacgtgaggttatttttttctccagtctttcctgagcttagacgtggcttgttcagagtttataattttgctactgcgattaatgttgtctctgtgatatagttttgagtatcttttgtttaaggtactgccattagtcttatctctgtgacatggttttattttattttattccgttgttagttcatctttttatttttcaatgtctcaccatcaaattattgttagtggttgggaataataagttctctgcggctgaagggtttgttagttgtacagttacgtatcttgcacaatagttgaatactcaagttaaatgcttgaatgaacttgctgcaatagatctactattgtggtttttgagcagcggagtaaactgattataggtgtccttaaggtgaactatgatactgcttttcagtttcttttgttaaacaatccgataattaggtagtccattagttggcttatttttctgattctaatcttggttgtgtttc

SEQ ID NO: 110524 - DNA, 5478 bp, Cannabis sativa
aaaaaaaaaaaaaaccttaaaaataatgatggacacgtgttgttggaaaattcaaggtggtcacgtcgtttgcattaaaaaatattgtttcgtaaaagtgccatatttctttattttttcttggagacaaaggaaaaatgtcattttatttatttaattaaattcaattccgctctcttctctttcccctcttcccattttttttttatctgtaccaaattatcggctaccatatccttcgatcccggtcctgctgtcctaatacttctttcaacaccaaatttgctaattcgcggcgcctaaattcaatttcaaaacttcttcttcagctcaaaatccctattcttttccgtcccaaccaaaccctggatttacagccaaccaatccttaatctgttcttcttttcttacgaagttagttgcgttttgattcattgtttattttgggttatatcgttggaaattggtacttgaaatgccgccattttcgtcttattcgaaggtcataggatcctttgtatcacgcagaaacggtataacacacctggttaggctcgctgagaacggtgggcagtcacggaaatggcatcagcttcggtgctttagcggtatcgaaactccattggtgggccgcagtcgagagggtgtttttactccgaacccgatttcttgccatgctagtactgttcaaggaaggagatttcttggttgcggtgatggtgaagagggcggtgttctatccaaaatttatgaggagaagcgcgttttggggtaatttttgttcgatgcaagttgattttggtaattcatttggaaaaaagaagtttgattatttgatatgctgtttgagcagtaatttttattttttttagaattgcagatatgagcacctagtatagttatacattgttctcttaaagtgagtttctttagcttatttggtggtctaagttatgtttaagagatttgttataggtggcccaaacacatgcccattgcagatgtttggtgccaactctctatgcctcctttctctaatcctgtgtttggtgggaggcaaggggagcttcattactgaaaagtgagttattttctttttggtatcaaaggaaccagagttgtcctacttggcgggattaaaacatttctcaaagctcaagcatgatagacaacttagttctttgaaagaatgatgaaaggaatttattgatcaaagccaaaaggctagttgcaaaatccaagttatttgagaaacttggaaccccacagagtaatttcttactctaaacaatcactaaaccaatcaataccctatcccaggtaaggtctattttatttataggctatgcctaacaagtcacctatatagccacccagtagtaacaaaggtaaatgacagctcaattaacacatagcacctcaacacttaaaactaaaacactcagctgccttttagagcaactcagcaataaaactttaaatcctttactaccttggatgcttggaataggtgaacgtgaattggaagtaacaatatccccattccacactttcaccttgtccttaagttgaaccttagaaaaatgattgttaatcatatcttagtcctcccaaggttgctttaaaatgatttaggaatctccattggacggggacctctaatgtggccaaaccatctaatgtgtttagtctaacatttagtaccttttcgggttcaacaagtagctccaaaggtggggatgtttgggaggagagtggaaatgacattgtggctctatgtgctctcttcaactagaaatgtaattgcttggcctaatgtctattgaagaaccaatctagtaatgttgttttcccaatcttggtggtgtagaatcagcccatgttctacctgaggttgcatttgccgttacaatctggcctctgcctttgcccttatcatgagtccatttctttctccctttttcattaaaacaatatgtaaatcttaccattgcccttatctcgcaatctaaaatcatagctctttgttggttagtactcattggagatatcctagtttatcctagtaattcaagttattacatatggctttaggaaattgagatatgagagtggtaggctcataataagagactcactctagaatatccacgactgttcctcaattcatagatttccacaaatatcaagtctagggtctaattcgtagacttccatagatagactcccactatcaaagggtctcacttttggaatatcccttcatgttgttgaaatccattttttctttttctaaaatatttccttccaattaaccacctttcccaaagtctgttcacttatcctctcaaccatctccactttttcttaattttcaattatttgcttttttgaataaaatgagaatcgtgattaagaagggatatcatccataaatatggataacatcacatagagagtattactttctaatagtgcaaatctgagtttgaacaagaagctcttgcaagatgagcaactttgttggcaggctgtttaacaaaaactattgaaacatcatttgaactagacaacaaagccttacaatatgaaatcattaagccaaaagattagacaatactaaaagaactacacatggcctagataaaccttaggtcaaccactcaaaccttcctagatacctatagcttgaccactccttgtatcattcttcttgtcttgcaaaaactcttggcctcttgtaatctttttatatgattgcacacaaccatcttgtagccaaaccttccttctttatcaattgttgatgcatctatgttaaccttcattatgttgatttggggcttactccaatggcctttcctttcatcaggccaagttgtagatattaatagtgttgttatgctagtttgagcattcaacctttgttgaaggcagacatttgccaatgaaaccacttcttctgcggtcggagattgttgttgccatacctctcattacgagccttccatattgctcaaacacaagaaagtaagttcaactatcttttcctttcatcctttgtcaaaaatatcagcaagccatgatccaagatccatttcaccacccagggaactgtcctaaaccatctaattgtaggcacctctaagcaaattgcagtcaactatgattgtgaaagttagattcttgagacagagtatgccaaacacattgattggacctcacctaaagcttgagttagcatttgtaccatacccacccttgagttcttggaggaaactataggcacttttggtataataaatgctcaagctttctttaatccactaccacctatccttgtcatagctaaacgaaatgctaaacatgggattctggtctctcttaacaaagaaatcacttctaacatccttcaccccactccctagcatccatcttcataactctttggtcttctaacatatcaaggcttgtgcttacatatggattttgcaaatagtacaccagatgtagctcaaattattacccaaagaagcactcaagaatgagacccttggataatatctagctataaagatcttacactaagcgataggtttaagatcacccgtagacttgggattcttcttcctaggactcacggcaatattagtatcacacaagccctcattgaaagaaccatatgcaaaagaccttttaactgacacaacatcatggcctacaatgtgctagaatttttgaaagaaacatgaattcttacaattaagccctggcgacttgtattgattcatctagaatatagtatctttaatctcctgacctaattaaggattcaacaactcctcattttgttctgtagacataaatggttgaatattctccacattttctgctctttcagggttagatttcgaaaacaaatgcttgaaataatcaaccataacattttccagcccattctccctttcaacccattctccatcattctttttcaatctatgaattggattatttctttttctagcactagcttgagcatggaaacttactgatttggttgcctaacttcaaccaaaactgctttctgaccctttgcctccaaaagatctccttttgatccagagtttcagatagtttaccctgccctcattaaactgcctgtgtactcaaagtccccattaacacaaattaacacacttgctaaaaaaatcacactcagaataaatctcccaactatctccttcactatctgctggcatgttggttccctcaaccagcattttagaactttaatttcttatttacaactggagctaaaccatatcaatttactcatgataatcaatcttgaataagccactctggatacggggaacctcctcgcttatctcttggcttgtcacattattcatatccccgactatacatcatggcatggaactactttcagccaagcttctcatcaacttttaagtttgttgagaattaggttctctatataagtcagtaagtctccactttctcatgccatgcaccttcgtcatcacatccatgattcattgagaaattcaacagactgtctctcctttcaaacagtctaaatgacagaaaaaattcctctgttcagcattttactctattcatgatgcaaaactttcaattttatgcttttatttatattgcaatttggagactcaagattaattgtgctcatcagcttatttgttaattgaaaatttcatattagtactaaaatttcattgttgcgctaccaattatatcttttctatcccaattgtatttttttattatcagcatgaactcatgcaatgcaatgcaatgtttgactttaggtactctccggagcagttatataatgttgtcgccgctgttgatttgtatcacgactttctcccctggtgtcagcgttctgatatacttaaacaatatcctgatggatcttttgatgctgaactggagataggctttaaattttttgttgagagttatgtgtctcatgtagaattagtcaagccaaagaggataaaggtataaacttttattcgacattaatttggatgaagtttttcttttgcttttggctctaacttcatctgtatgctacaattgctactttttaactgattactatttttgcatgtttatattaatgtgtttgtgctgccactgagggcgatgtataccactacagggaatattaaaactaatttttgactatgaaagcagagtcctatttggtttttaatgttttattagatttagaaatttcagtttaatggaacattattccagaggatcaatactcctgtcagtagcctgtttttgattgtgtttttatagtttcatctttagcaacatttaagggtgcgtttggaaagccacaatgtaattggatttgtgtgtaattggaggtaattacacaatttggcatgtttgtctgaccatgtaattacactg

SEQ ID NO: 110525 - DNA, 1825 bp, Cannabis sativa
atttttgtaaaagttaactcaaattccagtattttcgtaagtttccctttttttttaaaaaaaattgagctccaaacttaggtgggctcgaggtgcaagcccaatcttacaatcaattttgtaaggaaaaacaatgtgataccaaagtgaaaatcaccaactcaatagtcaatatcaaaaaatataactaaagaatatttgttaaaaaaacaccaattttaacatcacctgaatctttgcattgactaacattttaatctattttgacctgttaaacaaaaagtaatggtatcaaattaactagttcaactcaaaattttgattaagaagctaaaatgtgttgttcttgtcattgtcagtgagtatcaaaattcagattatattggaattgctccaatccaaatttacaaaactggtgaaatcttaaccttctccaataaaatcaaatgtatgctgctcggtgaattttcgctcggtggaatcaccgagcagccgttagagaaggtcttggtcgatctggttatcaccccgagtaaaaccccggggtgaaactcaatctcttttctcaagccagctaaaaccagggcttttatgaacatgtttctccttcataacctttcttaaactctgtacctcttcccactctccatgagcagcataaatattcgataaggttacaaaagctccaggtcttttcaactctaatttcaacagatcttcagccattactttagccaaatctcttcttccatggattttacaaccactaaataaagctatagcaattgactctgttataaccattggcattcccttaacaatttcataagcttcttccatcttccctgaccggcacaacatatcaacgacgcaagcataatgctctttactcgcctcgacaccatatctcgctttcattgagctgaaaatctctaaacccttttcaactaaaccgctatgaccgcacgcagacagaacacaaaccaaagtcacttcatttacttgcattccttcttcttccattctctcgaaaagctctaatgacaaatcaaccataccgtgtttcccgtagcaaccgatcattacattccacagtgcaacatttttgttatgaacactgtcgaatacacttcgagcattcttgatgccaccacattttgagtacatgtcaacaagagcacatccgacataagtgtttatatcaactcccattctgtatatcaatccatgaatttccagccctgtttgaactgaacccgtcaatccacacacggggagtaatcccgtgatggtgacttgattaggtttaatccccgaaactatcatgtttcggaacatttctaaagcttcaccgacatgttggctttgaacaaaacccgaaatgattgcattccaagtaaccaaatcaggagcatgcccttttcttcttctcatactagaaaagagctcagtgactttatggatatctccacaccgagcgaacccgacaatcattgcattccaagtgaactcattcggctccaatccttccaacttcatcccctcaaacaaatcaagagcaagctcactcttcccaccattgaaataaccacaaatcattgatgtccaacaaggaacatctctttcaatcattttatcaaacacattacgagcattacacaaactcccacatttacaatacatatcaatcatagcattcccaacagaaacatcattttcaaaacccattttgtaaaccatagaatgaacttctcttcccttatttaactccatcaaaccaacacaagctttaagcacaatcgaaaaagagaacttattaccagta

SEQ ID NO: 110526 - DNA, 1287 bp, Cannabis sativa
  modified_base (748)..(762): a, c, t, g, unknown or other
ggatgtgaagatagagagagagagagagatgatgcagagaaagagaatgggtgaattgtgaagggggtatttttggggttttgaaaaaaaaaagcatagtttttttagggtttagatttttggtttaataataaatttttttaattttttaagtatataaaatcaaatttccctaaaagaggaagtgggtaccatccatctcttgaagcaaataatttgacctataaactcaaaaggcatttacttaaaaaagtaggatttgattttagggtgcttaatttgctttcaatagccagacttgaatgtactctttcccttgaaatgatcattcatcaccatatacctctttttctgtgtccgggttgatgatgcatgcatcagatgactcatatgtgtgattgtacaaataaatattaaatattaaatattttataattacaattattcttaatggtaatgttagatcccttgaatcattttattattagccaatcatttcttctttcagtttattaaatactctcaactattattctatttctatataactttttaaatttaaattttaatggtaaaattctccaaactactgaactatattaacaaatttaaagttacatctatttttcacagttaagtgtacacttttatacatgtagcacatctatattaatacacttaatattattatttaggaatcataaaaggatattttaaaatttataatattttttatttttataatttnnnnnnnnnnnnnnntaaattttgaaataataatattaattataccaatataaatgtgtaagtgtatacataaatagtctatggtggcacaccttaaatttgttaacagtttagtagtttagaagttttaccactaaaatttaaacttaaaaaattaaatgcaagtgaaacgataattgtaaaggtttagccaaaaactccatcaaacttgtctttctatattttttcaatttcatcacaacataataaatttatatatatttttctttgaaaaaagttaagtaatttatatatttgtatgacaaagaaagatccatcatttagaaataagacaaatttacacaattctaaattttattaaattattatttattgaagatcatacatattatatgaaatttacatttcaactacaaaaaatcaagttatttagggattgattagtttgtgattcaaaaattgtgttttttaaaaatgtgttttggaaacaaaaatttaaattttgtaagtgaaaaattgtttctaaatatgtgattggtt

SEQ ID NO: 110527 - DNA, 2246 bp, Cannabis sativa
tagggcataaaacccaacacgcccctatttgaaagtgcttactttaacgtctttagctaagcgctcacttctttttatagctcagctaggttcaagtccactatgcacatccttataatgtcataagaagaagctagctttgtaccggtggaaacttcgaaattatctccaatatcatcaaagctttcaagtttttcataaaacaacgacttcatatcaacgtggaatagaatagggtcattttttggtcttcttctttctactttttaatcttagaccatcatccatcacatcaactctacaacaagtgtgaataattgctgcaaaaacattaaatgttacctcttcattttgcactcgcaacttcaattcttccttttatacatcaatcagcactttccatgtggctaagaatggcctccctaatataattgagatatttgcatcttcttccatgtcaagaataataaaatcagtagaaaagatgaatttaccaacctttaccaagacatcctcaatcactcccctaggatacttaacagaacgatctaccattcgtaaggagatagttgtagggtgagcttctcctaattttagctttcgaaaaactgatagaggcattaaattcacattagcccccaaatcacacaaggcttttgtttcaactgagcctcctatagagcatggaatattaaaactacctagatccttgaactttaggggtagtttcttttgcaagatagcactgcattcctcagtaagtgttatagtctcatagtcctccagtctccttttctttgataaaatttccttcataagcttcacataacttggcatctgttcaagtgcctcggtatgaaacgggatgaggtggcgactgaggttactgtgacagctgctaatgttgaagaagatcccgctggaaatgctaaggatttgaatcatggcacaggggactcatctattgatagagaaactttaattggccttgatcggagagtggtccaaggtggagataattcctttaaaattcaatacaataattatgtagctgagcattttatccctgatgttaatattgctcatgtggcaactttttaagagtcgtcttggtgataaggatgtggatgtttcctaggctaaggaaaaagttttaacaaaaaaggaaaaaggagctcatacaatttaggttggtatggcttattagtgttcaccctaaactgatttttagtcacaaatcttctggtcctctccctaattcaagccagaagaggaagaaattgaatgagacaaaggatgttggacaaaaccttcatgtggattctagtattcaaggaacttcacctaatcaaggctttgtgcctagaacgtgctttggtgaggaaagtttttgcaagaaacgctaacttgtgcctagaacgtgctttggtgaggaaagttttgcaagaaatgctaacttgtgcctagaacgtgctttggtgaggaaatttttgcaagaaatgctaacttggtgtattctgataaaggaaagaatagtggtaaacacatttgtcatgcctcctaggtggttactagtggtgttcctgatgctacctttaatccacagagagattgtcaagggcaggggctctctcattttaaaatggatggggatgtttctcaaaagtcggagactagaccagaggatttggagggaggtaattgggagctttctaatttgtcttatgcaaggtccccattggagtcacatgggctctcttaagaagcaggaatttttcgtggccaaggaggcaggccttatcatgccccccaaatcattatgaaaattcttacgtggaattaccgtggacatggaagttcgctggcaaaagaggctttccggacccttgtctctaaagaagatttgaatgccctctttcttatggaaactaagctagacggaagatggatcgatggagaatatagctgtggagattgcaaggattaattctccttgggttttgatgggagatctcaatatggttctaaagcttggaggtaatctggtggaagagactgattgttgtaaaggtttgtctaattttctcagtatctctagtggagtggaattggggtgcattggaaatcattttagggataagttgaaaaatacctcttttttgtatccattaatcaaaaataccctcatattatattttattaaaatatacccacttttgtgtgtgggttgcccaatatacccttat

SEQ ID NO: 110528 - DNA, 3144 bp, Cannabis sativa
tacagattacagagtttagttgagtcaagaagtagttagtgcaactaaccaagattctgttaaatcaagttacactaggatttctaagtgttaacttggaccttaagtactcaaactgagatgttgaaagaggttttgtaagtatatcaactatctgatgttctgaactgccatgtctgatgtcgagctgattggatagaattctgtctctgatgaagtggagatcaacttcaatgtgcttagttctttcgtggaagacaggattcgtggctaaggatgtagctccaagattgtcacaccataaggcggggcatgtggagcaagggaatccaacttctttgaacagagactgaagccagatcagttcagttgtggctgaggcaatggcataatatatgaagtaatttttgtcaccattttctggttcttctcacaccagatatcttatcctttcttctgcgttttagctttgcttttgaattgttatcgtttattactagagcttgtattttagatgtgatccgtgtgataaaccaaacatttccagatgaagaatccatttctttaaactaactattagaaagcaggaatagggaccaactagttgttactaacttactatccttctcaagtaaaagagaactttttcttatacttttagtaacttcaaaatatttaacatctaatttaccagaggatagtaattatacttactccgattacaataatggtgttatgacgtatacaatgtgatagtttagaaagttctgatcatgcaggtattcatattaggattcggcaatattggaattgacttggcaaagcgcttgagaccatttggtgtgaaaattattgctacaaaaaggagctggacttcacattctttggaatctaatggtacgcatgaagaactttctattgagaaacacacttagttgttacaacttatgatgtaacttcttcatttccaggttcaatctatggcagtgatgatttggttgatgagaagggaagtcatgaagatatctacaagtttgcgagcaaggcagatattgttgtttgctgtttgttgttgaacaaggaaacagtaagacgatcttgcatttgtttaagatatccctcaatagctgatattactgtatttcaagcatgatatgtagatttgatcaataaagctaccaaatattcctaaaggtaaaaacaaaagcaaggcacatataagtttgtccttgagaatattgaattgtataacggtaaacattcaggcaaaagaatgtgatataactttctttctgagcatgatatgttgaagatgatgaatattccaaaaaagaaaataaaggtcaacatattatatttattttagtcattctactggtgttcgatatatttattcctgaatgttaataccaatggattcaggctaagttgtcgccccaagtctgctctatgtcgtggtcttgttcttgttgattagttatttgcagaaacataatttctaagcttagtttcttaatgtttactgtttgcatactttgttttttcaggtgcacattgtaaacaagtcatttatttcttcaatgaaaaaggtttgttcaaacactagaatagttttaattattattgttatcatagacgatatatatgtattcttgggaaataatcccaacagaaataataggaataattttatgtgattggcgaagtgaaagcttttctgttttcaaattacaggcagtatagtattgcactacttcatgtatttatcgaaaaagaaaaagaaagataattcaaaatctatcgtaaaatgtttgtaatgaaaaacatagaattaattgctgatgcctatattcataagaaagtgatgttattatttgtgaggctgctattgtcaaatggaactaacaagtcaatcatggttttagctgaggtctatctgtttcttctgtagtctgcacattcctatatgcttacaatctatggtgtgtagggtggtcatttggttaatattgcccgagggggactcttggactatgaagccgtttatcacggcctcaaatccaaccatctgggaggcttgggtattgatgttgcttggaccgagccatttaatcccaacgatccaattttgaagttcaataatgttctaatcacacctcatgtggcaggtgtcacagagtattcttatagagccatggccaaggtatgtactttggcaaatcaatcatgcttttaaagttatggtcaatctaatatctgcttctttatctggttgaaagtctactaaatggatcagtgagagtggacactgaatagaatttatagtatgtatgttcatttgcattactctttatattatctcttttcaaaacaatttccaatttttcacaatttaagctacttgttagtgtcatcaactttgtttatgatatttgatgaaattactgagttccataaatgtcgtttttgttagatcctcttcaaccattatgaatgcatgtgctcaaatgaggcaatgccttttcactgttgcacacaacccaaaatttcattcttgcccttgaaataaaatgcaagagaaaaatgggtaaatgcaatttgcatgtataaactttattagctaatgaacttttagttcgctctttgcaattccctatcaatttgtttggcatgaactatatgctagagatgctgattttatgtgaaattaattacagtgcttcttattgatttttttttctttccaaattaaatttccttatctgatttgtagtatttttcgcaaattctacaattgcaggtcgttggtgacactgcaattcaacttcatgaaggaagaactctgtcacatgtagagtttgtcaattaaatggtttggaaaacgaattcttcaagcaagtatatcaaaacataccaagactgtttgagataataattgtcattattcttctctataaaatatttaaacaaatattatgttaggaatcgcctatgatctcactcaacagagatttccaaagaacacactctaaaatattccacagaaccaaggcacaaccacacacactaagagcatgtttggtattgttttttattttttgttttcaaaaaattgtttttaaaaatgagaacaaaaaatagttt

SEQ ID NO: 110529 - DNA, 2833 bp, Cannabis sativa
  modified_base (2778)..(2788): a, c, t, g, unknown or other
tttcgtgttattttttgaaaaaccgtaaaaaaaaattttaaaaaaattgaacgtaaaaatgtaattattttacaacaaaatggtgccttatgtaattattcctatttcttatctcatgttcaaagtaacaatttgaacaagtaaaactcatatggccttgccaaggtgggttagctatttgaaacacctaaagtaaagttccaagttgcaaactattttataatgtgaagagacaaactattggtggtaatgaaaaaaataattttttaaaaaaaaaaaaaaatatggtgacaaaaagaataaaatgttagatataatgatgtcaaaagatgctaggtttgaagaaaaaaataatttgtccaatagcgtaaaaaattatagataattgatattaagatattgataaaagcaaacccataattctacccatattttgcatctcaaagactggaacgggcacgcctgggaagaagattttgtgcccatcgactaggctgagtctttccagataaaaaaacgacccatactcttctttgtttttttttttttttgttttaagaaacctgtatccattgcaaagaagaataaagctcgggatacaaattataattaaaattttgatctttctaaaaaactttctgatctaggcctaatgcaaactttacaaggcggtgagcatcttcattgtgctctctagaaatatgtacaaaagtagcattaggaagagaagataggaagtttttaaggtcctttgcaaatatgtttaaaagtaagtgatgattagcagcattacaaacgtaaactacaaggaatttacaatctgaaacaatataatctggctgtatgcttcgctgttggtaccaagaaagagcatagtaaagtgtgtgagcttccattaacaaagccgtttgagttccttgccacggtgtagctactgacaaaagtaaatccccactgttgttgaagagcgccataccaaaacctgtcttgtttgttgttgtgttctgggcagcatctacagaatgttttaattgaaatgatgaaggtgtaccatgactatcagctactgcacaagaaaggttggtccccaaggtgtgtggaagtctgttgttttgttgataaatgtccaaataatttgaagttgcttggatgatagtgactggtgtcactagcttctggtggtggagaaaatcatttctctaatgccaaagcttccagagcagagagagaaaaacccggtaatctcttgccgtgagagaggaagcggccacatgaagaatatatccctgcaagttagtgacatatattttgatataaaagaggagaattgagtcaatttccataccttctggatagttgaacacctaaaaatatcatgctctagggtctccatttgatgttggcagcgacaacaatttggtgtagggatagtctttctcttatgcaaattgtagcttctgggaaggatgccataaaaatctctccaaataaagtgctttactttaggtgggattggttgtgtccacatcttcttccaccaggtttggttagccatggggtccgattgggtgggatcatctttgcacattaaggagtgagctttatggtaacctgaatttacagaatagtttccatgtgttgtgtatggccagtaataggtatcagggtatggggaaggcaaaaggggtatagattcaatggctttgctaatatcggaggggaaaatggatctaatacgggtggtatcccaatgatgagacagggttataagatctgaaacttttgaacttccgtttgaaagatgcttgaggtagctaactttaccatattcagggatccaaatagatcgatgtatttttaccattacctattgattttctgagtcctgataataggagttccttgccccaagagatactgatccaaaccagagaaggtcagcgtcctttgctagccttaagaaaggtgttgtgtgggaagtaacgagctttaaggatggttgcaacaagggcgtggggtgcctgaagtaagcgccaagcttgctttgccagcattgcttgattaaaggccttcattgagcgaaaaccaagtcctccatgaaatttttccaatggatttttcgactgctttcagttcctccccaccaaaaacaggccatcatggactcgatctttgaatgaaaggaggcaggcaacttgaaaccagacatggcataagacggtatcgcctgaaccacagacttcaatagaatttcttttcccccttttgagaagtgctttgagttccatttgttcaaatgtgaccagacgtgatctttaaggtaattaaagacctcttttttagttcgcccaaaaagtttggggaaggcccaaatatttctcaaaagaattttgaatggggacacccaagaaagatgtaatatggtttttgatgtcctcattagtattgggtgagaaaaagagagatgacttgctataattgtccatctggtccgaggctgaactataatcctgcaagatatccttgattgtggtggcagcacttggagaagcagggctgaagagaagacagtcatccgcaaagaaaagaacagatatgattggggcagtgcgggaaatcttaaggccaagaccttgggtacgtgagttaggagtcaatgtcttctgggtaatgagcgaagaaagaccttccaagcaaaggaggaaaagataaggggatagtggatcaccttgacggattctcctggaaggtatgccttgttgggttttgtgccctaannnnnnnnnnnttcaatataatcatatttacttactaataaagatcagaaataaca

SEQ ID NO: 110530 - DNA, 6015 bp, Cannabis sativa
agagcatggaaaggagagagagagagagagtgacagagagagaacatgaagtgagagagagaggggcttacaaactggagaaagagagagagagtggtggaagacaacatataaaatgaaaccctaaatctaaatgtgcgttatagcaactataaaaaaagggggtgggactttttatcccagattttatgtgaaaaccactggaataaaaagtcccacttaaaatgctaaggttgcgtttggcaaatgcataaaaatttcctttccaacacccttttttgtgcaatttccaaataaggcccttgttcctaacttttgtttaaggttccaaatataaaaatgggacaaaaagtcccttttgttgtagtgaagataacatgtcaacggtggacttcaaggaccgtctgaatgtgtaatgggaaaaagcaatatatgagaaagcaaggccttgtggaggagacttaaaaagtaatatcaatgacagaattcgtggacgtgagctcccagatgacaacactagatggctagaagaatagatagctgctctgttaaaaattacagactgtttggtccgaaagcaaagtggcgacttatctgactcggaatgcaaggatttaaagccatgtgtgagacagatcatagatgcttcatctttcctttcatctttttatttcagatataatatatatgtggtgatccttgggatgtggtacgattataataaaatattattattccgctatgtacatgatttagtaccacaaaaataagacgagatacataagcatccattgtctcccatttcgtttggtactctccagatatctggttcataactagttaggaatcgctgtatacttcgacgtttttagctttaacttccttagataagtataagcctccaatcattgtttcgtgctccactttattattggaaactctaaattcaaagcggagggctctctgaagttggtgcccttgaggagaaattaaaatagaccttgctccagataccttctcattggaggctctatcaacgtaggccttctagaaaaccagtcctggaactcactcttccagattgtcattagttcctatacatttcataataaaatctactagggcttggcccttgatagaaacttttgggttgatactgaatatcaaactggctaagtttcatagcccacttcaacagtcttactgaggattccagcttctagaggacttttcggaggggctgattcgtaagtacctttaaggcctgggcctaaaagtataatcttaacttcctgaagcaatcaacaagcaataggaaatattttcaatcattaggtatctagactccgcgctcaacaatcttttactcacataatatactgaaagttgtacccttcctttttttcacactaagggtacattgatagcttgattggacatgaccaagtacaagtatagcggttctccctcaaccggctttgacaagacatgagccttaactagatgctcctttagattctaaaaaatatcttcacactcagtagtccattcaaactttttgcttccatcaaggatgttaaaaacataatgcatttgtcagtttctttggacacaaacctgctaaatgctgctattctagaagagcctttatcttctctagatttacttcgatccacagaaactgacgatgaaacttaaaaattggggtcaagtacatcatatgggtttaaatgagaagaaacatgctttaaaagattaatatggtgaatttatcatggatttggagttatacgatataatgagtgaaaaattataagtttgggatgctcaacacgctctatttgtgattaaaaatcaagtttgaagttttaatctaatttttgactatgatccattcactttcaagaacattgtgaatagaagttatatatctttctttcagctttccataacatctcgaatcatccaattctgagttatatctagagagtgatgaccaaaatatgttcagttattgtagtaggatgttagagtccaaaattcacatttagagccacgacacccaaatgaagagctgtaacgatgacatccgtacaagttatgaaaactcaattttagggggggcaaagatatcttttcacctaaaattactaaggttacgatataaaaatctttaggtgtgattttcattagtttttttacctttgagaaactcataaaaatatttagaggctaggaataatgaagattggaggcttgttcaagattttttttttcttttcttctttaatttcttcctttaatgatttttaattttagtttgattgatattaatatgcttatcatgaaataattttattttctagggttttaatatagtctcttgatactctattattagttaatgctatttttttatgatttcttctttttcattgtgatttattcaatttgtttaatgcttgtggatgcttgggcacctttatgattttaattcaaaatttaaaaagtgacagttaaatatgctatagttgaatagacatgaattttgatattggacaaaagtaccagtatagtttgtatagcttcaaaattgttttacgtatgcctattatattcttactcatcccaaaaatgtagaattttttcatgtaattaagatctatatgtcctagtaagaatatagaataccattattaatccgctatcataataagaagaagaatagtaaaaattgtattaatgaaaaatagagtggacaaatgatgaaaaactctagtttttattcattgaattaattgtgtaatttgtttcttaattttctagttgttaactttagttttttttattattacttgtaaaattaaattcttaatagtcaaaaagaaattaaaaattaataattggtaattagtgataacaattcatgtgagattgatactctacttttattattatttgtcaacaatatgtatatttgcgttgtaaatttttcacaacagggtctatgggggtttggtaaaaaaattggagatttgtgtctgtgaatctcactcgcaaaattgtgtcggttcttaacagtcgcaggattggttagtgaccattaccaaccaacgcaaacatcaaataaaattttaaaaagcctccttttactgtcgtaggttttgacgtgtacttctaattagtaaccaacacaaaccttttttattaccatcgattattaaacaatgctccatttctctcttcctctattgtgtcggtcaatacaattgaccagttgcgtttaccgacacaaattctcctttttgattgttcgaataaggtcctaacaaaaatttctaatattatagatttatataaatttgagaattcaccataaaatttactttttttggcaaaatttttaactaggaacatttcaatctaaactgttacatcatgtatataccctaacttataaatacaagaccacttaaaataaaagagaaactattgtagaaaggaagaatacctaattgaacataagggtatttaggattctctacatgcactaaaattatgcgtctgcaaaaatcttataacgcgcctagaaatgctttgaagacacaaaaagtttcatcctcacgggttcacaattattcatcttaaaaaatatattatatgtgtataagatgtttttttttaagaaaaacaaaaaataaaactattttataaatatatataatagttagaaatttattataatagatatgatataaacaatatcaaagaattgaaaacaattgatattaatttgaaattaaaactaaccatactttgtatttgaataattcttttgaaaatacaatttaataaattagttaatattacataattatctctctaaaatatctataggtccgacttcgttgggctctgaatttttctccgaccagagtccaccgaccctgttttgggtaggtgtgactctggtctgggatgggttcatcgtacaacagtgattctctagatgtgtccctcttttcctgcctaggattttttggattctcaaatttttcgtcaagtcgatggtttcacatgctgagagcgacttcggtggtctgtgtgagggctgttttctcccatgactttgtctcttctatcaattatgagagatggttttatctctctcgatgggttgggtgggtttcgttcttgctggtgggcttcgctctggtaagggtgaagggctacatcggggtactgagggcagcaatggctttagtagggcttcagtattggagttccaagggcttcagtggattttcagatctaaagtgaccttgagtgttaaggatatatggctttctctgcattttcttagttgttgtttgtgggtttattattagcttttatttttattgtttttaaccttacttagctttattttagctttgataataactgtattttgtcaccagtttgttattgttttgatgaaagattatggttttggatccaattgtattacggatgcttcatcgatggattcaatgtttcgttttggcagggatttcttcctctttctctctgattttgagatttggctagggttttttcaaattttattggtcctatgttttgtacatctatctttgatagtgtgttacaatatagttggtcgagttatttgaatataatggagttgttatttcttaatttttattggaatatcattggctgatagttattgatatataggtaaactctcatagattttcattttgttaatttagtatgctacacatttctttgatgcttaaccgtcagtgattcattagacccttagttgaagttgttgttagcattttcttccagtttaatgtaaacaacttggtcaggctattgttgatgatttttctctatgagttagatcttcatgtaatggattttgtctaatttacctattaatggacacttttcgtttttctctctaaaaaaaggactaataaaaaatatatttagatgtgtaaaaaataaacagtctacatatttaatattcaaattcagagaaaatagcttattagtcagatatatatttagattcaaaagtgtagatcttatataaaaaaaacagaagcaccataaaagtgtatgtactaatttgtacatatatatatatatttatctgtgcaattcaatatcaaatcacacttattttaatttaatacaagattataaagaaccgttaattaattataagatgtcaagtcataaaagtgtaagcacacgaatctttttaaaattaaatttaaaaagataaattaattatatctgttattattctaaatgaaactcttataataagcttataattgtttgtttttaatatcccaaacgtctggcatctataataaaaacatgctttggtggcattttaagtcattcaactacaatattgtggagcaaaaatatacatatattggtattagaagcaataaatcttttatatacaaaataatatacaaaaaatctttatacatagatttgtgtagctaatattattattatagggttatatatgctatttcttggtacgtacgtacatcacatgcatatttgcagtgtagacaaacaagcatacatgcctctgttatatatggtcaccatttatatcatttttgtttagaataataatcaactatattgtaataaatgattgactcacctctccaaatgaagtgaatatggaccgacattgtttgattaaaataatacaactatatcatcatacacttgtttttttatattattattattatttgtttaatgcagcattattctgatttttaatacttcgaaaagcacatcactcgtcgtaactcgttatcttaccttatatacataaatcaatatcaatccatcaatatatataaataaaggaaagtaaaatagtgatgacacgacagtttttatgaattttttttttctttgttttctcctattttcacattttttttttcattttttaattat

SEQ ID NO: 110531 - DNA, 1960 bp, Cannabis sativa
  modified_base (1875)..(1877): a, c, t, g, unknown or other
tttttatatagagaacatacatagaaatattgtaatatatattatattttggctaaattttgtttagcttttagctgaatacattgatgggagtactgctcaaagacgtttctctttcattggtattaactaagcatacacgctgtcaaatcttagagagactttctcaatacaagtgattaaaatggagtaggtctcttaatggttgagccactataaaactgaccagttattattatatatatatttttatgtgctttttaatcttcatcctcttttaatttcttagttgctgaaaaatggcttcaacagtcctaaacaaacactccatgttattcatactatcaagctagtccccccaaatactatcaaattaattaaccatcttccctcaagtgggtgagcttggttgtgtagaggtaatggcttagtcgccgagaatgctggtgcagtactcacgagaaaagacgataataacttcatgatggttgacaggctaagtgtatgttttttgtgaacaattagaccattaaaaattgtgctatatttctcacaaaaaataactttatgtttatggtagatataaatcaaattttagcattatactctaattttatattgcaaaattttaatgtaaaatttaatatttagccgattaatatttttattaaaaataaaattaataattttattattattttaatataaaaaataatataaatacaatttaatgttatagttaaatatattaataaaataaaaatattgttattgggcaacagtgttgtctatcacttttttagacatgttattttataattggttagtaatactctttaaaaaattatcatattaaattatatgagacatgatatttaataaccataactagtgatattgatacataaaaaagtactaaacactttagcatttcttaattataaaataatatcaatagtataaatataaataaaaaacataatacatttattgtgatgtaaattgttattttgtgtggtaactcgtgttggcatactataaactaaattattatttttaatgtcattgagtgttgtatgaagttttaaaatttattttaaataactcgcatgaacataattgttgtgtgtagaacttgtaaaatttcaaatcatattagtatcaaaggctcaatgacttgaattgctacccatactttattttgactaacataggacaagataagttgctctttccgtggaattgaaaaaaaaaaaaaaaaaatctttgaaatgaaagttgtcattttgtataaaacacattatgataccaaattcaaagcaatttaaaataaagtatgaaataagtcaaaatacggtacaatgttgtataattttggttttgtttatatttttgactgtttggataatttattgcaataataagccgtacttatcagatgggaatgtcttcttaagccgaaaggttattttagtaatttcgtagattaataataaaagttttggatttgatttagtttcttaaaaaacaaatcactttgcaacataaccatgggaattcagatgcgtggcagagcaagtagctaggatcaggagcgtttaggttacgcgccaaaaccaacaatttgcagggaaaagtggggaacacgtgtgacccacacgaaaagggtatagatcagtaagttgttgtagtgagagttatgttgtcgttcccattttctttttacggttatgattaatagatgaagttaaattattagtttagtgaaaagaaacaagtttgtcactggtaaccgtaagtggtcatgcaacttttaatgaatttatttggtaatagaattgttttagaggatgtttggtattgttttctgttttnnnttttcaaaaaattgtttttagaaatgagaacaaaaaatagtttttgaattttttaaaaatatgtttggttagtgttttttaaa

SEQ ID NO: 110532 - DNA, 10574 bp, Cannabis sativa
aactgggtacccatgttttgaaaagtgttatttttttttaataaaggcaacattagtatcttaacgccagtttatttatggcatcttattttacataagtaagggcgttacaactaaataacaacatggagaatctttgaaggcatttctaagtccctttagcacgacaacaacaaaggtttaaaacttgaatgatagtattctattggcaacactctaggctaggataacaactgatttgtctactgtcggtggaaaactttggaatgatttgcaaggacgcctagtaaaatcaataaataaatttaatgaaagggctcgcatctatgttaggaaagaggaagctcggtctatgttgaagatattaaaagatggctcgagaaataaacccagctcaagcaatgccaaaggcaagatccatgaattgcatggaaaaagaaaggacgagtccaaaggctcatcaaaacacaagaagaaaaagaaaaaatctaagaagtatatcccaatttataccgtgtatatcgagctgaacgaaacataggaaaatatattcctcgcaaatgagaacaaggttgcattttgcaaacctgaacccatgagaaatgcgaggaataagtaggatcaaaataaatattgtcgctttcataaagacattggtcacaccaccgaggagtatcgacaactaaaagatgaaattgaaagtttgatttccagaggttacttcagaaaatacgtgaagaataaaatgaatgaaaaaaaccaatcccataaccagaatcaaaaccaaaatgtctagcaaccacctatagagggtgaggacatcttggtaatttttagggagccaccttgtgggatcgagtgacactgcacaaaagagatatataaaccagttcaaaaaccaatctttaacttttgcaccagaattagcaaaacgagcaaagactgtagaacccccaataactttcactgacgacaacgcgatgcacgtaagatttccccatgaagatccactagtgataactatttagcctgtgaataagagagtgaagcaagttctggtggataatgggtcaacaccctgtacaaagagaccttaaagaaaatgggattagaaggtataactctaaaaccatccatggttaatttatgcaaattcacagaggatagcatcgcaagtttagggacagttgagctccctgtgacaatgggagactcacccttgtcggcaactctaatgcaagagttcttggtggttgacctttcctcgatctttaatttgatcatgagttgcccaacactgataggaccgagggaaattagcccaataaaacacttgccattcccaattcagaatggagtaggaactgtaaaaggtgactcgtttttagctcaagaatgctataatatagagttgaggaaaagaactaagtattgtcaaatgatggttgtgataatcttagaaattgagaaagaagaataagatctttaacttgatcatgagtcgcccaacactgataggactgagggaaattagcccaataaaacacttgtcattaaaatttccaactcagaatagagtaggaattgtaaaaggtgactcgtttttagcacgagaatgctacaatatagagttgagggaaataactaagtcttgtcaaatgatggttgtgataatcttaaaaattgagaaagaagaatatgatttggacccaagaataagtgaagaaaaatcttagctagggtcgattgatgagttggaggaggtattactcgaccccaatgaccccacgaaagctataaaaattggtaaaaggttaggggaagagttgaagttgcgacttaagcacttattaatggcgaatcaggatcaatttttctagagccattctgacatggttaggatcgacccaaatgtcataagccatcaccttaacatcgaccctcactatcatccgaagcaataaaaaaagaaggctttttgattcaaagaggcaaaatacattgaaataagaggttgacaagttgtgaaccaatgacttcatacgagaagcattttatccacagtgggtttcaaacccagtgttagtgctaaaactgaatgggacatggagaacttgtattgatttttctgacctaaataaagcatgtctaaaagattgtttcccattacaaacaattgattagctcatggatgccattgcaggacatgagctcacgtcctctatggagccacatatcaacacttcataaataacatgtttagaaataaaataggtcaaaacatagacgtatgcgtggatgatatgctcgttaagtcgatcaaaaatagtgatcatgggattgaccttacagaatgtttttcaatcttaaggagatacaacatgaaattaaacctaaagaaatgctcttttgaggtttcctttggattgttccttggttttatagtaaatgtgaggggaatcgaagccaatacagaggaaataaaggctttgctcgatatgccctctccaaagaagtcaaaagaagttcaatccttaattggaaagatggcagtgttgaactggttcatctcaaagtcaattgataaatgtgtaccattttttaatatattgcaaggaaataaatgatttgattacacagaagaatgtgagaaggcattccaggagataaaagaacatctctccacgtcgccagtactttcgaaaccaataacaggtgaaactttatatctgtatttatcaatcttggagcatgcaataagtgcaacactagtgcgagaaaaggaaaaggcctaattaccactatactatgagagaaaatgttaattgggggcagaaacaaggtatatgcctcttgaaaaactcgcattgagtcttattcatgccttaagaaaattaagaccatattttcaagcacatcctattcgtgtgttaactaatcatcccttaaggccagttttgttaaaactcgatgcctcaggacgactcataaagtggtcaattaaattaggacaatttgatataacttataacccgtgagcagccatcaaaaatcaagcattattaaattttctaattgaagggatagatatcgataagaacataagtgaacctcctgatcaaggcatctggaagttaattatggatgattcctcaaatgattgtggctcagggcaggtataatattggtttcaccagaggactttaggtttcactatgccttaaagtttcaattccgtgctttaaacaaggctgaatacaaagaacttcttgcaggtttgagagtagcagaattagttaatgtcaaggaaattcatattgcctaagtgatttgcaactgattgtgaatcaggtcctcagagaatactaagcaaagggaatgaaaatggtcaagtacttagaaaaagtttgaaaaaacttaggaaaattcaattattttaaaattgaataaattttaagagaacaaaattttgatggaaactcattggttaaactaccgtcccaatctgattataatgacctcaacttggttcccattaaaaaactagtagtaccaagatcatgcgagatggaagaagatggggaaatgattgagatagtctttggaaatagtctttcagaggttcccctggcctttgtttgacctccactaagtcctccagtatataaggccttttttgggaagacaagaattgtgtgtataactctcttgtgaaagagttccacgaatcaaacctttcggtagctagtttgaaaaaccactattgtgcggtttcagacaaggttgccaggaacatccaacaatggatcttctttccctagatttcaaaatccatctggattttaaaataattaaagtgagccaagggatcttctttccctgtgtaattccttgtaggcatattaaacttggtaggcaagggaaacacattgatgcttgtagagaaaggtgaccctcatggtttcttgaacttgaatctcccttgagtacggggtttcttcatcaaactcatcatcatccaagcatcccttcgaggcggtatctatctttcaacgtagatctcgcatatccactttcagctccttcatcctttcactaatcctttctcgggagttagtgagtggagcttaggtcctctttatggtttgcatagggcccgcaaaaggtattgctcttgtcctattaacacgtggcttcccaccaaggctaaaggataaggccttacattttcttttctcttgggaggggatcataggcaaggtacccctagaacgagaccctttgggtgaagtctttttataaggtaatggagtgttttcctcaatgcaattttctcatggtgggtaggcttgagttgtctcgactgaaccatatgatttttgtctcgcggtgggccctttcctccttgaccttctggggtgctattagtggatgacatggagtctcctccaacaacatatgtggttgggaccccattcttccaccggtagctttcataccaaaaatttgatgtttgagttttgcctttgagtatgccactcaacaatttttgcatgacaaccaccgtagtttcaagtcattcattcttccagcggaagtcgtttatctcctcttcatagtggtgattttgggagcttgaggttaccgagtacactcgcttctacttcctcggtcctacatcttgaagtgtcaggctcttgtggcacaaatggtgaagggtgtcgctccaaagatgtccttcttagtggttgaatgcttccattgacggggttagctatcaaaagtcatgttgtgttggggcctcgttttgagcattattttggtggttcacgctttggttattctccctttggtcttcttcaccaacgggaggtggaagttctctcatgatggtcagcagttggttgtcatttaagtgaactccattttcttggagatgttgcaaacgtcgacgcatggtggttggttaatacacaagaaaaggtgtagatatggacttgtctttccaacaaacagcgccaaactattgaaagtgagaattcgttaacgatcttagtgactagaaactcaatgtatgtatataggagattaagaaagtagatgaagtaacaatgaaacttaagaaaaattcgtagatcaacaatggtaaaaacgaatatcttgtattattaggttagaagctcttgttctcaagaatttttagcccctttacaatatttcaaatgtatttatacttgagctattgatcaagctctaaaagacacgtggtcccaaaagttaggggatagaattctttttgtaccatgaagatcagcatgtcaaatggatagtggagaagtaatgatcgggtgtcaattagtacctcgagtgagataaattgtgtctccactacttgtacttatcgtacaaccaattcttcattagaggtatgcatactttaatgactttatcttttatttttcatttcttggcatccctccgtttatagctcgcattcatgatgtgaagctaacacttaaaaaacttggctaagtgttaggcccatgtgagtctccttgtctaaatgaggagagtgaaggagagtgattgagtgagggaatagagagatagtgatagagagttagagagatcatgagggagcggggacctcccattcgacgtgcaagaggagagagggagcagggagttctcgttgggcatgcgaggagagggggacaggggagctcctactggtgcgcacatgaaagaagggagcgggaagctctcgttggtgcgtacgaggagctccttgcatggggagctcgtcaactgccttggctcctcattgtgtctgctcgcccccttgtatggtttgactacccctgtttttttgattatatactttccaagtttattgtggagaattttcttagattagcttaaatatttcaaaaagttttatacagtgaattttttggttcaacaaccacatttaatataagataaaagataagaaagagacatgtgaagtgagtttaaatttgaaatgtaatatatatatatatatattttaagaaaatagtactttctattatatatagccacattgatatgtattaggttgatgttacgtgcaatgcacatataattagttttcttttgaattaggtttaattaagtgatgttaagtgcaatacatgtacgtttaatttttttttaattaggtaatgtattttattttttttgagattttgatttttgaatttttttagctatcgcagctacattggtgtgtgctctttagatgtgattatatatatattttatatatacaataaaaaaataaatttcagtgttatacgtattttatacatattttatattgatctctctctatatataaggattatattaaaaaaaatattttaacaaataatttaagtttgattagagaattaattacttttaaaatacattttgtatattatgtttaaacatatatttttaaaaaaataatgatatagatacaatattcttaatttgtagttaggagagtgtgattataataaagtgtacaaattattcgaagcatatatattattaatcatttttaaaacaaaaagttatcatgaaattaaatatatatattttatatatagatgtaatttttatttttaaatatatataattcaattaaattttttaatataaaatatctatataattttttattttaaatatatatataataatattataaaatttataaaaaatatttgttatgtaattagaatattatgttaaagttaacgtaaaaaaaaaaaaaaaatcgttaaactaaaaattctattaaataaccacattttatatatataaaataaatttggttggatatatcatgtgggcgttatagtggattttttccaatctagactcttcacttatgggctctaaagatagattcttcaacctcccattcagatggtatatatgcctttctctttttcttttttctttatcccaacttgcatggttttcattttgttttcattttgttttttttttttttaaaaaaaaagaaatgcaaacagaattaaattatacattgaattattggacagtatttattgatatagatatgagagaacaaattcatcgtgaaagaatcatggaagagaagatactagtaatatcattgctaatataattcatatatataaacatatcaaaaccgcccatgcagtaaataatatatataaaacatagcttttgtgaaaagttgtgcatcgatctcaaagtcccaaaccaaacccaactatatatatgtaaattacaacacacatcttcttcagtccttcgtgtcgagtcatgtactaatgatgagtgtgtgtgtggagcccatatacatatacaaattaatatttatatgtatctatattatatataacgtgggccaataatttattgccaagtgttcctactctccaacataagcacgactttgtgtgtagattgcatgggaacaactagattttcttaatatattccctcctatatatacacaccattgatgatgagatacgatattttctttttatctttctttcaaagtatatatctatttgcatttgcatataatatatatagatatatatattattttgtatatatcttcaaattaagcacacagaacaaaccacgacacattatacataatagtttaacctatatagttttatgttttatgtctcttttagatcgagtgtcattcatatctttctttttgttcctcttctttaattattattgcaaatttttgaactagctagtatttgtttggtatactcacccacatcatgaaattaatgggccccatatattgtcgacctctcaaggggtactaaataatgggagaatgtgttaactcatcagacctaatacaatgaaaattaatttatatatatatatgtatatgtgtataatgtacatattgcttgacctaagccatgtgtgaaagtagaattagtacctccacgagggagacatatcatgacatatattggagtatatatatacttcatgcatattgatccgacgattattaatggtaaaataataataatatatatcaaagaaaaaagcttggaggattaagtataaaagaatattttcagagaaacaatagttttgaaaataaaccaattaatagctaggagagtatttaaaaactagaagaaacatgagccacgtacgcaacgttttttttaaatgggatcaacatgtaaaagttattgaaaaatttactctacaatttggcaattaaaaaaatatccaatataatttatatatagtattatatatattctcacatacaatattattgttaaaacatagtatttctcatattgataattaaggaactacgcttaaaattactatatgtttttgaggtagaacctctcctcggacttgtaataaatgaactttttttctctcatttgataattagcttagcggtccagacctgtatttaataattatcagtataggactttttaacattaaccaattaaaaatcaacacatcaactggatatggtaaaatatatacattcatgttgcttgtaaggtggacagagagagctaaccaagccaagttggtgtgcccaaccaacctgctagagctacgaaaagtcaacatatgataaagtataaagacctagctagctaggcgtagccctataggagtgatttttattcgtaagtacgtatatggatatttagacaggaatgatggggcctgggaaggtgaaaataaaaaagaagggttaatagaaaagtgaaactatatatagctattagggttttttttagataaggggacaagagagaaggcatcgataaacagatatgggggagttgttgctctaaaataggagacactcaccatgtgatgagatgataatctacaatcatcttgtctttacatctttactcttttctgattttatttctatttgtttcattgccttattcattatgtctttttaatttatgttatcatttatttcacacatcataaatgcccgggtcgttttttttttgttcatcaagttaatttttaattattcaataaataatagtatatatttttaattactatataaagatgattattaattaattaattaatatgaaattttatttgacttgtaagtttgtacgtaattattaatgtctatatgtttgactgtacagttcaaagtattaatcaagacagttgatcgataaatgtgtatgtattttgctgcaaataaatattgttctcacttctttaggatttaatatttaactcttacaaaaataacttgttagaagaaaaaaaaaaagcagacacaaaagaatgttcttagctagctagagtcaaaaggacacatttatatatataaatatatatttatgccatgatcatcacgctttgtattcttttattcatttttttttttttttttgtgaaaggtgtaatttctcattccatcaattaagtatatatatagggacacaattgtctcctattttcacagaatgtatttcgtgatgtacgataaccgttagatgggtgagttatttgatctgaaggctagctggggttgatttagaggtaattaagtttaaaaaatggtaacgtacccgagacccatctaatatactacggaatacattccgtgaaagtatatcacgagagaaaatcgtgttcctatatatatacaattacaagagaaattgttatatatatatatattatataaataatactttatatcgtttactgaaccacaccaatgaaaattccattgatcctttatgctccaagtgtacatttgtacacatttatggaccatgctatatataataatttgtgcgtgactctagtttcctagatataatcagtagaaccataaacttaaacaaaaaaaaaaaatctagttaatctaataatatctttgattaattaatctgatttgtacaaaagcattaaataagtgaggtttggtttaaacaaacaagtccatgtgataacgatatatggaacaacaaatacactgatggaaaatgattctgttggatgggaaataaatatatacaaatccagtaaactgagtacgaactcacgtatattatgaatttatttcgtacacagtacatcatctaaatgtatataaattattaaaaagaaaattaattagtaatttcgctatgtaataatagctagctaagctagctagaatagaagctatacttaattactagatagaagtctattcaatgtatagtactaaatatggggctctcataattatgctatctatttgtactagaatttcatttatttcctcacaatcatcacattaccgtaggttttgtcactggcctctctttagtagtctttacagttcaccatcgaattattatgaggctatatgcctatatatatttgggattttttcaataatatacttaaaatataaattatttataaaaataccttaataaatctcaattataataataccttgccacgtcattaaaaaatac

SEQ ID NO: 110533 - DNA, 8261 bp, Cannabis sativa
cgatttctgatatttattaattaacaaatctaattatattgaaatggattttatttaggatacaaaacctaacacattaattattgtgtacactcaaaagttgtacacattaataattaagaaaatatctctatgcaaaataaataaaaagacctacagtaaaattattcaatatatatattatattatataattataattctctttttttctatttacattttttattgttgtaaatgacttttaatttataataatattgtttttttttttttttaaaaaaaaattctttttctacctaatatatagtgtaatcttgttgtttttgtattttagtacagtagagttgttatatgatattcttctcccctaataaaatctgccttaaaagatttaaccataccaaaagaaaaagaaaaaaagtggaagaggtaagagaaaaatggactaaaacccgttataataatatctaacaaaaaccccacttgcaatattatattcggattaggacaacaataattagaaagataatgtaacataatcaataattatgacttgattacgtgtgctgcatcggaataatgaagggagaaaaataaggatgtgatgtttttattgtaagtgccattattactcccattaaaagaagagaacaaagaagaagaaatatttattactgcattaggaaataagatctgaatgtttacaaataatgatttatgtattaatttaatctaaaagtttaattaaagttaaaaagttaagtgtgcgtttgtagatgtcgtgtttctttttttcctttcctttttttttttttatttataaaaagttagttttagtttagattacaaattagtcgaaaccgcgtgtatttggatgaaattaaaatttgagaaattgaaagcgaagtactgattagacaaaataaaataatgtagcagttatggcggtttgaaattggagcatgcgattgtctccagttccatggttgtcaaccacgtggagtttcccgctcctctcagcaattcttctcacgatggccaaattcacagaacaaggaacgtggtggcattcaattgcgtcacaattttagggttcaattaccttttttttttaatctctactttttaatttgattcccttctaatcaatcttttaagcttcttttaactccaagcaaaacccggctatggagttcaagctttcgcttgagtcgtattcttagatacgcgatctctttcggggttatcaaatcataccagttattagtttctcgtccacatttcgacggcttattctcagatttctacagctactcctcttttcttttttcctactttttgttttgttctttttttttcttttctgtatcggttctttgttttgattttgaactgtgtggtatgttttttgatttttttttttctttcaacaacagctttggattgtgctgattccttttgtggtaatacccaatcgggtttcgttgtgtggtggaggtttttttttaattatttatttagaaaaaaaaaacagaattgggaaaaattttcacgactcaactgggcactagaatatatactttctgtcttttctttattttacttgtggaagtaatggatcaatttgagtaccgttgattatagaatccctcttttttttttttcttctctttctttgttgaatcaaggtttttctcttgttagactatcatcattattattagatgaagtctgttgattcacaaaccaaataaattgataaaactaacatatttgttgcttgcttagcggctgaagttgtgtcaaatcggttttgaacaatctactggctttgcctaaatagagtattgtgtgtttttcttttaggatgaaaatacattaagctaacggatatttagtgggtctgggtggagatgaagatttcagcacttctgacttctgctggaatcaatatagctgtgtgcttgatacttctgtcgttatactccatattgagaaaacaaccaagcaatataagtgtgtacttcgggcggaggactgccacaggacgctcaagacgcagtgatccttattgctttgagagatttattccttctcctagttgggtattaagagcctgggaaagtacggaacaagatcttttgaatattggtgggttggattctgtggttttcctcaggattgtggttttcaggtaagttagatgttaaacttgaaaaaatatatcgatttacactttttatcagtcttaattcgtataaatagaatttgtactcattggatttgcattggttttcagcagcttttaaggtgctaattttttttattttgtctacctacagcattcgaatgtttactatagctgcagtcacttgttgttttctggtgcttcctgtgaattattatggtcaaaagaggcagtaccaacaaattcccttggagtctttggaagtatttaccatcttaaatgttcaagaagcctcaaagtggtatgacttttgtgttaattagtcctaccattaaatagaagaacttttccacaaccaacaaatgtccagttgaatcttttagttctactttagcatttctttactcttatttattagatggaatcctttagcatatcttatttattatctggtatcctcatgttctactgtagcatttttttttctgctgctttccttacatttctctttcttgctaagtagtgaccttgagattagtttatctctagatcacaggcttccactaaatcatgattttctttttgttttttctctttaccttaaagtacttatttttcatttgtttactttctcccaggctttgggttcactgtgttacattatatatcataacgttctcagcttgtgtgcttctttactttgtaaggatgaaaaacctgtcttccatttatatttctgtttcaagtttttaataactttttgcaagttatatttgcacattctttcaattattcgctaactgcttccatttttcccccttgtaggagtataaaagcatttctaaaatgaggctcgcttatattagtgaatctccaccaaacccaagtcattttacagttctagttcgtgctattccttggtctgatgaagactcgtacagtaatagtgtgaaaagattctttatgaaatatcatgcatcaggctatttgtttcaccaaatggtatataaagctggtacgattcagaaattgatggtgagtaaattactcttaatgatcaagaaatttaggagtaactcccatcgtctatatgcctctaatatttattctatccatattatgttgatttattgtgttctttctttttttcttgagaacattgatttattgtgttcagtaggtgtcatttaatgcaagttgtgtttcatttatagacggaaatagactactacaagctttcagatggataagtgaattgttttctaggttcttactataataagctaaaactacatgtctgttctgattttttatttttactgcacgtattcctttgcaccagcttgatagtgtgagaactattttatttgtgttttcttcttgcatcttgctcaaatctttttttataaattcatggttacatttatgctattggatctagttgtacaaacatactaaatcttctagactgtaaagatgagatttgaaacatgaaatattagcatgctgaaatttcgaaaagtaacacttattggaacttaaggtgatgaatttgagagttgttgtgcttgtataaaaaaaatggaggtttgtttggttgtctttaatgcaacacaatgatttttcatattagatgtttacgtaattcataatttgttcgactttgcagaatgatgcagagaagatgtacatgatgttcaaggatgtttctgttgaaaagagttgtgcacctagtataatccattgtggtacatgtgttgtagagcattcaaattcttttaagatcctttcttctgagggtactgtcaagggaaaagctgacttttgtgacattgattttcctggaagtaaaaaggtcactaatttgtgttgatggatgttactcattttcttttttaggttatttatatacaacttgcaattatctagtttagtacattgcatattgggtccatgcaatgccaaattatcatcagcttttgggtttgtggtaaattttactgcaattatttaaaactatcgcttctataattcctagaacaacctttaatcaccattaattactttctttggcaaatatgtgtggagataagaagagatggatgtcttttacatagtgtactgtacatgctaacgatgttgtttgtcatactgatagtgtgtgtgcttacgccaataatggcaattattaactggttttgattttgttatctcaactgtcatttgttatagcctttaagataacaagatttttaagagtttgtttctcagctcgtggccttcatgctcaacttgaaaattttgtttcattaatgtatgtgtatgaattgattcagtgtctctatctaactgatggatccctataaacaggagtgtgccactgcttttgtctttttcaagactcgccatgctgctgttgttgcttcacaggttcttcaatcatcaaaccctatgttatgggtgacagacatggcgcctgaaccacatgatgtttattggtcaaacctttggataccgtatggacaactttggattcgtaagatagcaactcttatgtctgccattgccttcatgctcgtatttcttattccagttacgtttgttcaaggcatgactcaactagagcagctacaacaaacatttccattcctcaaaggaattttaaagaagtaagtacatgtagcagtgatgatctctgtttgttaactgtggattactgatgtttcctaccatagcgaggaaagatgggtaaggctttaaatttataaagcatgggtgatatgataaattggaatttggaaataaaaatgctgtttacattagagcaattccaacaggataaaaatagagttgcataaaggcttgtcaggtggtggggccaagggggatgatgtggagagggttttatcaattagcataggcaccattgcaacagtgccaacttatatatttatatatatggatacattttaaaattctgattggctaaaaaggtgtgggatcaaagtggcaacaaatggggttgtaggagtttcccctaatggtcaataattcttttattttgtattaaatctgaggtttactgggagatggcctacaaaataggggtgttttcctgtaaaaatgcctgattattttttattttggcaggaaactcgtaagcgggttgtttacaggttaccttccaagtgtgattttgattttagctctatatacagttccacccgttatgatgttattttcagcagtggagggaactatctcccgaagtgggagaaagaagagtgcatgttgcaaaatattgtacttcacaatctggaatgtcttttttgtcaatgtcttcacggggtctgtgattcgccagttgcgagtcttttctagtgtgaaggacatacctgcacagcttgctattgctgttccagctcaggtgacattctctgcaacttaagtgtgttaattctttgcttcgtatgatgctctaacctatatatatttctccttcacttacatgagaaatttgagcttctatgcttctattatgccctattaaaaaaacatgctgtttaataataattgaaaaaagaggtcgttttcgaagcattggacaaaattatccttgccactaacagccccatcaaccatctcaagctctttttctctctacaatgatggcaccaccatctccccaacctagcaccacttcaacgctgcaactagcattaacaacgtccttgccatggacgccaccacttcccaattccattacactgaagcatgctatcaaaacaccaatctatattttttgttccttatgttttaaataatcaaaaccacacccatatccacttaaaaagactaatttaaaggtttagaacacatatatgtatgatttattgattttgtttgcatttgtttttcttcagatctgaacctttgaaaatgtgcagaattttaattagaacgatgctctagcattgctgcagcgatgttttgcgatgctcttgcgatatttcgccatgctcttgcaatgtttttgtgatgcttccattcttcacgactttttgaggtaaaaatggatgcattagaggtgcttttgcaatgccccgcatgaaaacttgattattagaattagaattgtagtagcatcgctagtgcatcatttttacctaaaaaattatgacaaatgggagcgttgctagagcatagcaaaagattaatttttttcagatttaagaggtatagatatgaaagaaaaaaaaaacattgcaagcaaaaccaataaatcatacaacacataaattttgtaagactataaaattagtgttaaagatattcttactctactgccgtggggaggtggtggtggtcacttgtggtggtggtcacttaaggagggacatggtgactttatatataactatgtggtagtagcctttctccaaaaataatttatatcggtggagtttggtaacatttttgttttttaattttttaatcactaaaatataagtagaatgtatcctataacaacttttgtttttaaagttaaaaaacagaaaataaaaatgtgttatgtaactacttttattttttaattttttttaaaaaaaattaaaagtgtgttctctaactatttttgtttttcaatttaaaaataaaaaacataactatttttttttttaaattttaaaagcaaaaaataaaaatgtgttacgtaactacttttgtttttcaattttaaaaaacaaaaaataaaagtgtgttctgtaatcatttttattttttaatttaaaaacaaaaaatataagtgttttctgtaattatttttattttttagttttaaaaataaaaaacattaagttgttttttttttcagtaaaaaaattatgactataatatattttttttaaaaaaacaaatatacgaaaattataataaaaaatactcattagcatctaaaaaaattcaagttatttgaaatcacgagactcgttatctatctatgagataacacaaaattgatgaaatcatacataaaatatgaattataactatttttgttttttaattttaaaaacaaagaacatgaattttttttttattttttaaataaaaaattacgtatatcatttatttatttttttaataaatatgcaaacattataataaaaaaaatcaaattataatgctcattatttatcaatgaagtaacacaaaatcaacaaagtcataataaaatatgaactaataattgtccaattttgaagaggaatgttaagaaactcctaacagtcaataaacttgactcattatcttcatcgtcgatatgctttttatatatgatgagtaatttcaatacgaatattagccatttcacgaattcgatctcttaaaatactaatctcagtactatcattcaaatttctgtgagtgctttgtatagtagtatcttgtactttaagaatctcttcatctccattaaaaatatcttttcctgcattcgtccttataaattgtgaatctcacagaaggcaatcacaatgtacttctgtattttcagattatacgaaggataattgaataactccttttttcttgtagaatattgattcaaatgatatctttccctttgatatgggaaaagaaaataaggcatgtttgtgtatccaaaatcaactaaataatattttccaaaataatgttaatttatattagtttttccataaagatattaatacaaaatatcaataaacataataagtttaataacacttaccatgggtggagctagaaattcataatttagatttgtggcacatttggaaagaatccgtgcatcattagctgatccttctcatccagtaacagcttaaacttcatatcaaatgaacatatacacatgacgttttgagtcatatccaccttctgacctcgataaggtatttgttcataaatgggaacaataatagagatataggtcaaatcagaagtggttgtgtgggagacagttaaattttggacagctacttgggtctttagaaccaaacattttgaggatctgtcctttctag

SEQ ID NO: 110534 - DNA, 8940 bp, Cannabis sativa
aatgggcttggacagtaaaaatgtaaagtttgctgtgttccagtatttttgaaaatatttggtaaaaaaacagtatttttgtaagttttccaaagcaaaaggtaagtgtgtgacaataccaaataagtatttactcttctaacaattgaatgtgagtcgcagcaaaaacaaaaaaaaagagaaaaaaagaaacaattgaatgtgtgagctgtgtaattgataacaatcttgttattttttttattattttaataaaaaagtttatttttgcatattttgaatatgtaataggttaataataataagtaacattattttagaaacaaaaaactattaagaatcctaagtgagatgcagatgataaaaggaaaattaattgtatactcacacagtcaatcttctatatatcttggccaaaaatctagtctatcatgaaatatcaaaatatattgatataaggttgttttggataagagagtagattaaagatggagaaatagaacttgagaatgtacttagtgaagagaatcctgcaaatgaaggaactaaagttctatcgtcagcaaattccaacattgtttgaaattgatgaatctttgctctacttgaagataactagatcactgccctcaggttttgtcttgtttggttctataaattaaggtggaatttgttgtttggtaattcatagaacaaacacaataaaaatataacagtttattttaactaacatatgttaagttagttaaatgctacatcattgattcagtaatgttggttgaaatgttgtagaattctatttagttagttaagtgcatttggttgttagtttgagtctttcattgcctatttaaaggctttagactgaattgagagatagtgaggtcgagtgggtgagagataaagaaagaaaaacagagtgaagagaagttggtaaaactggaccaagattagtgttcttgaagtcaaaactcgagctgagttttaggaatttcacctgtaattattttctagggtgcacttaacaactcaagcttgtaagtgggagagagataaagaaagagagaaaacaagagtgaagagaagttgggaaaactaaaccaagagcagggcttttggagtcgaaactcgagctgagttttagaaatttcatctgtaattgttttctagggtgcacttaacaactcaagtttgtaatcatcacattaatagagaaaaatctcaagggagtaataggaagtaggtcctttaatttggccgaatttctataaaaattctgtgttcttttagtatattttttctttcatttttttatctaattaatttttctggtttgattacttatttatttgctgatgttgttgcgattggttttgatctatttgaatgttatgtggttcgaaatctgtgttgtaaaattacaataataataattagctaagagataaagtatgttaaaaagaataaaatttttagtaatgattcctccgtttaagttaatccaaaaaaaaaaaacgattcctccattttgtctacattggtttagaatttgaaaactgttttatgtttttgaatattaaaatggtggggtttcatctaagacttctggattgtttgagtatttttaaaaacaaaatttgaatactattttgagttttaggctaaaaaatgaaaacacaatttttatgttttttatgttttcagatcatggaatccaaaaagagcattgctattaagcaccagtggtgcctaatactttctcgacatgtcgcgttgcgattgactagcgatactctctaaaagctattatattaaactctatgagacccgatacttagttggaccaatagcgatattgacacataaaagggtgttagccaggcaccagtggtgtcctttagcatttcttatccaaaaattctcaaattattcttttatttttttagtttgagattctcaaccaatcacatattcaattttttaaaactcaaaaacattaaatcacactacaaccaatcacatatttagaaacaatttttatttaaatttttgtttctaaaactcatttttaaaaaacacaatttttaaattacaaaccaatcaaaacccagttacctttccaaaaactttaaagaaaataatgagaccaaatgtgtcttatcacatggtagacacacaaatcatttccctcgttactttgaattccctatacctctctacatcatatgatagagttgttattgtttgttatgaacaacttgattaaaaaaataatcacattatggaccacttcactaacccatcattcttttaataatgaggagatttatccattaaatgatgattaaaaaatttaaagcccccttcatcattgagagattaagaagactaaaggatcataggccatgtaatattctaaggtagctactcctacacctaacactaaattggatggctctcaagaaacttttatgggggctattctcattccatatatattattgtcaaaaagttttggcaagttctatcctttaatgctttgagctatcactgtcggtgataccatagtggaattaggggtatagactagaggatactaattgttatgtattggctgtattgtattgccaatatgtccaccccaaaattggacattatctgtatatgtattaccaaagaataattgttgtgttcgtgaaaaagtgctgatgcgaaatctacacgagctgtaggaaaagaccttgtagctgtgggatacttttgtttttaaggtgctgatctattttgtccttaccttgaacaattatatcattagctagcattacttcataatttagtgagagaaaaaatgctaaaaggtattggtgttgcttaagatgaaggcattatattgttttggtataattatgtattgaattttatataatttcaatatcatcactaactatttttaaggtgacacctcttaaaaaaaaattatgtttaaacatgcaatacttcatatgtagcgctagccgccacctgcttaaaaaaatgggatagggactattttttttttctttttcaactcattaggttttcttttttggatggtgctaagtagcatcaagaatcttcattttatatcctacccatgtagctaaatgggtgaggtcgtaattttcaggcacatggtatcttataacatccattggaaataccacttttaagattacgaataaatatcatcttagggtttacgtgaccaataattcataggttctagatactaaagtatcatatcatatggttttggtcaaattaactgcacagaatatgaccaaaagttcgatataaactatgatgcctaaggctaatgccctattaaaaaaaggaaattactatatattataaacaataatgatacataatactcatggatctgattgtcactttcacacaacaaaattcctcaatggcttttgcaccataaaagggatccgcattatcctcttgggctccctacgtggaaatatggctcttaatgtgctaaccacttatttattttattttttatacgtatatttagatttcgcgtccacacacacaccaccattagtcaattgtatttgattttataaatagaattattattatttatttttgaaaactattatgataccgcgttaataatgtcttgcgaagttaatgtaaggatgggcaagtatattttcaggacctttagttgtggaaaaatggcaaatagttgggattccttgagagccctttaaaaaagggaccatggagagatagagtcatagatgttccacatttgtgttctcggctatctataatcattaacaaaatttaatattaacattttcagtcaatattttgctaatattttaagttgaagcattaaccatactagtaatttcggtaacactttgtaaatataactaacaatattttgtaatattatcaaactaaattacgtgagatttgatattttttctctaatgtatgtgagactttaacattttacatcagtaatataaaatttatatttgttaacttttttttaaatgaatttgttattttggcctttttctgtcttacatttatgatgcatttatctttgtcttacatgagtaattgtataaaagattcctaaaccttccaatgtaactttctccatacacccgtagttgcacactgatgactgaacaaggtttccttacaggccatgtagggattgatttccaccaccctcggaaagatcaaaattattacttaaattatgggcctctttttcttcttttttctttttaggttgaagcgtgcttggtgaacttcttggctaaaatcatcttttcttaatggtgtgccaaaaacatatgtaatattaaatttagtacaacatttaatatcatgtaaaatttatatatcaataaatatgctactttattattacatttatttcatttatttcaattgtattattttattaatttaagtaataattttgatctctctgagaaaggtggaaatcaatccctacatggcctgaaaggaaacttgataagtcatccttgtgcaaccacgggtgtatggagaaagatatattggaaggtttaggaatcttctatattactaatgtaagacaaagataaatgcatcacaaatgtaagacagaaaaatgccaaaatgacaaattcattaaaaaaaatcaacaaatataaattacatatgcagataaactgacttgacttatttatatatacactgaagataagattacacatttcacaacaaatgatctctcattgaagacactgacccttcaacattatgactcccatcagatggaccagtacaaactgatgttaacactgtgagaagaaaataaattttatatataaaaaaaaagtaagaagaaacaaaaagaacaaacccttctcagaaacaaagataacttactacctaaacacagtttgctagtttaagcagcaaaaaagccctcctcacatgacaatctctggcttcaaaatgctagctttgatctctttgtgaggcaagaccacacctccattgctgtagatttcatcactcacatgaacatcttctccaagaatagtcatgttctccacacgtgcccactgccccacagttgagtgccagccaatgatactgctggaaatgcaagcatgcttcttgatacgaaccccccgcattactgtgcagcgtgaaagcctaactcctgattcaacaacacagcctgggccaatggcgacatctggcccgatcaaacatccctcgccaatggtggctgtctcatcaattagaacattaccaacgacatgggctccagtggccaacttaacggaagatttcttcctcaatgagtctaagtagagtcttaggccagtgatgtagtccctaggctgtccaatgtccatccagaacccgggaagcaccattgcaaagagcttactttcggctgcaatttccgggaagacctctttctcaattgaggtgggcctcagttgaattcgatcaagaactgaagggtttaacaagtaaattccagcattaattttgttcccgacaaacagttttggtttttctacaaatttctccactttccctgttgattcttccataactacgacaccatactttgatggctcgtctacctgcacaatacaaagaaattattataacaaccattactagaagataaatgttacaataagcatacagatggaacaaactgaaaagatttatattaatttaggtgttaccttggtcaccataatggaagcctctcctccatgagacttgtggaattcaatcatttccttgagcggatactcactaatgacatcactgttaaggacaaaaaatggctcgccggactcgtctatcaacttatccctagcaagcgccagaggaccagctgtgccaagtggctcagtctcttgtgagcaagtgatcttgatcccgagctttgcctcaaaatccttcaagaagttcagcatcacctacataagtggaaagacagattattataatttagataccccatccaattatggaacaaacattttaataacagaagtgcatcaattagttacctctggttggtaattgatagccaaaaccacttcactcacgccaatagccttaagagcttcaatctgaaaaaccattgacacatagaaagttatggaaaggactaaatgagcaagtagcagagtacaaccacaactatatctcacaatttagatggatgtttaatacatgttataactcatctccttttttctctgaccaagaattgttttgaaaaaagagaagaaggtttacatgaaacatgagatgtaatgaagatcggaattttagattggaagcaggatgcagattttacctgatgcaagatcatgggtttgttggcaaaatcaacaagtggcttgggaacactgagtgtcaatggcctcaaacgtgttccgaaccctccaacaagaataagggccttcattttctgtttccctgttttgtttacctgtcaattactgtatcataaatgaggcaactcaacacagtgaaatacagactgaatacaaatagtatactcctaatataactaggtcaaaaagaaagaaaaagcagaaagattgaaacttaatatgtgtagatctaacataacatcactagtatcatatcccataggaaactttcaaactttagttaacgggtagcaaactgatgttgccatgaatacagtaggcagaaaagagagaaaaggcactagttcattaaataagtagatatgaaagagcaaaacaaatttaagcagggaacaaagggaagaaaccaagagatacaaaaaaagtgtcataagacgaatcacgttgctaaaatgagtaaattaacatcaatccaaaccaaatgatttagctggtagcttccagctatactgcgggctggacttttagatgagacaatgccaaagccgtacacttggttgggactgatctcagattagaatttggaacaaaaaccaaaacctactactaatattcaattttattgcagtcacaaattcatccttctaaacttcaaaaaagaaaaaggagaaaaaaaaaatctcctttggattatattttaaaaggtcaacgaaaattccaatctcagcaatcataacaaaacagatctcaagctatacgacaaatcttcaaaaaattcaggatttcaaaaaaagaacgaacgaaaagaaaaggagtcctacgtatggagttggctatacacttgtttttccattcttttggtaatattttcaccaaaccatcaaacacccattctcaatcagtttatcgacgtaataattcatataagaatacttcttttgatttctttttttatataaataaaaaaataatcatgaattaaaaattcacactttcaacctagtacaaaaacctcaaagcaaagaatcattctctttactaacacctgggaccaaatacacaaacgttattttattataaaattttatcctaacctcatgaaactgtgtctctcttaaagaaacaaaatgacctcatcactaaagcaccaaacaaccaccaattaaatgaagaatagcaaagtaaggaaaagaaaaataaaaacattgttacaatcagatctgggagggaatatataataaaaaagtacagaaaaatcaaaattgaaggagattcgatcaagaggagacaaggttaagaaggatcagaaatcccataacacatccacattgtataattcagccaaaaagaaatcaaaagtaatcggaaacaagacctaaatttccgtacatcattcggatccagaaaatcgcagagagaaagagacgaaagaaactagagtgaggcagacaattaccttcagatctcggcgaaacggtcggaggagaaaggtcggactcaactcggaggggagttgggcgagtcaggagtgagtcagaagcgtcggtgggatgaggtgaggtccgagtgaacctggcctaactcggtaacagtccttctgtttcggatttgagcttttgtatgcacaggggggcgttggttaaggaaagcttcgcgggatttatatatacgcgcttaataactaacgtgtgtttttttctcttaataaaataattaagaaaattaataatggagagaaaatatttcgtaaagtggctttttattggttgaagaaaccggggtgacgtgggcatggggttaggctttgtttttgaggtgggtggctgcctggctttcggggtagtttcgtaatttgtcagctttgcgctgtggataaattagtactgcttgtttttgtttggcgacgaaaggaggaacactcgctccgtatgtctttcacccgtactaaattgttttcttcttttatgacaacattttcatctatatttttaatactagtaataatttttttttttttttttagttatttagtagggtgttcgcggtgccggtagtgcagtttttgacactattttcatctataattttctaatttcccaaactgcacccgcaccgtaaaactaaaaaactgcagaaatatcactgcaaaaaatggttcagtgcggtgcagtttttacgatttctgtggtttggactatcaccaaataattaaactatcacaaatacaacaaatcttgagcaacacttatcaaaaataccgtaaggctagaaaataaatataaaaaaaaattaagtttcaataatacaataattagtgagttttggggtggacattcacatattggacctaaataaatataaaagttcgtatttttataatatacagtgtggtgcggtttgaaccacatattaacaattcaaaaccacaaaccgtatcgcaccgcgcggtttaggaaaaattcaaaccgcgaccgcacctcaaagaatttca

SEQ ID NO: 110535 - DNA, 1403 bp, Cannabis sativa
ttaaacaagtaatgaaattaaatatgtttctttattgataattgaatagaaaagattacattgaaatagagttttatttaggacacaaagcccaaaaacctcgtggttcttccctagattaacaggcatcaagttcgggttaacttcgttgttcttttgtagatggaaaaggggttgctgctgtaatcatttacaatatagatggtaaggtctttgggcttaaaattgagattttcaatgcttcttcaactctttaagctgaggttcgagctgggattcttgcagtgcagtttgtcctagagagtaaccggtccatatgcatcatgtgtttttatcagactaccatgtcctttgtggtgctactaaaagcatggtttggcttagttggttggtggcatactggtatgatttgcttttaatctccttctctctacagattttgtgttttgttagatcccgagatctcttaatgtggcttctaatgatctagcggtgtgggctagagtgcctgctttttctggttatctttcagtaagggagttagcactaggagtgttcgcggttcgagtggtgcaggtttagcctattttttcaaaccaaactacatatgcagtttttataatttttcaaactgtaaccgcatcgcatgactttaaaatcgcgaaaatcacaccgcaaaaatgcggtgtggtgtggtgtggtgcgctttacactatcaaacattaaaataaaaattaaaagattagtctaataaagttgcaacaattaaaaaagaaacaaaatatcttatcaaatttttaacgtcataacatatatactaatcaagttattgtattgaattatctttaaaaaattatataatgtacatatatattatattatatatatcaataataataatatgttaataataagaaattaatgaaaaataaaaaatgagaataatttatatggatgttctttaaatttaattatatggcttgagttttttaagcatatgagttgttcctatataaaaagagaaatcttagtgtaaaaattaatatttttgtaatatataatgcagtgcgatttgaactgcaataattaaattcgaaatcgcaaattgcaccgcaatgtgcggtttggagaaaatgcaaacacaactgtaaaaaaatttaaatcgcattttttgtatagtgtggtgtggtgaaaacgatttgtacaatgtgaacggtttgctgaacactcctagtaagccgaccatgttgctaacactctctatatttattttgttttgaataaatccttcttttcagcaaataataataagggattttttctataataaactgaaaatggaaaaaatttacatttatgacctacatagagaaaataaacaaaaatagaaactaaaagttgtt

SEQ ID NO: 110536 - DNA, 6377 bp, Cannabis sativa
aaaaaaaaaaaaaaagacaaacataatgttttgctaaaaaaagagaataatgaataaaggaaaagatgtttctttcgaaaataataataaaaaaaatagttaatatacttaagaaaacaatagtatgaagacagctcaaagggtcttgagctcaaccgttgaaagaatgagaaagaaagaaatgcagttgaactcagaagagctcagtgaaaactcttcattagtgaagaaaaatatgaacattgagcatagatttcattttatgaagaaaaaaggagactggagaagccgaggagttcaaaagagtggaatttggttggtttttaaatttttccaccaagtaggcgagtcactattcggggactttggattcattttacattgagggagtgagttgaaaacaattaaaagcatttatttatttatttatttgtaaggacttctagtaagtccattcactgaatttatatgaagaaacagttacccatgccttgctgtattgtgattgcgtgaagaaagtatggaaaggtacggagttctcacagtttggtatatttggcattgtaggaacaaactttttttcacaggtccaacaactagagcaggagatattcacagtgctgctccgtcctacctaaaagaattcaaggaagcttatcttcatcaacaaatcgggcaggttgagacaagcattgtttcctcaccttcttggacgcgcccacctccaggaaagcttaacctcaacgttgattcagctatctcagaacattgctcgagtgtgaggctagctggtgtcttgcacaacaataacggtcatgtagtagctgctataggtacccgattgaagaaattggtgatccagcaacaatggaagcaaaatctcttcttctggcacttccgtggtgtcaccaggaactctttccatttgcaccaagtggaatcgaattgctactctgactgatgcaatccacaccaagctggtagaacctgactttgtttgacgattttgtaactcaaatcaaaatagctttgtctcattaccctttgcagtaagccatgtccgacagcaaatgaaacagcccataaactggctcactttgcactggggttagatgaagctgcaatcttgataggagatgatccctggaaccttttagacattctcccttctcaaaggatcatctttcctctagaaaaaaaggaaaaagaataaaactaaatgtgtaacccaaagccgaaaggcataatcaacaatcagagcccattattcaactagaaaaccttctaattaaggaaataattaagatatttttggggagatattcacaggttaagaaatattctccattacaaatacttctaattatgcatacaaaatttattatcattttacaatagaatatcatgtaaaccaatctgtaaccaatacagaaagtaaattctttggcatgatttattttctcttacaactgaacatcgcaacgaggctgatatttgaactaaggttgggagttataaacaagaacaaaaacttggctagtagaattatgtaattgtcggggaagcaatgtgaacaaatagttcaaccgaactagctatataatagtttatatcatgaaatcctccaggaaaacacaaagaaactctccgttctttttacgaatttcctattcttttcatggaataatttttacaaggagcgaccccaagcaatctatacctagctggcaacttactaattcctttctccgcgccaatagtatcttcattatttattattgttccggctctgtacaggagcaaatcatgcagaaggacttgatgacttcctgtttttgcttaaacatgaacacttggcctttgtgtctgaaagtgtctgcaaccaaaggaaaatatattttcatacaagggaaacaaaagttggctgaaattccagttgatgggaacaagaattagatttttctttgtaccttaacctctttctgcaggtctttaatgtagtcaaccaccaactctagcatatctgctgtgtttgtttgctgtcaagaagaaaaaaacagttaaattgaaagctattaccatgaatacatgatcacatctgggtttggaatgtctcagccaccttatccatatttgggcatagatcctgcaatcttctgattctttcactaatccgagttcttctattctgaaattaacagctgtcttaatatttttgcaatgaatccaacaaataatgcaacaacaattattatctctttaatttcccaaccaacctaacattttgagcataagcattagtttatctactagattgtttgttcaagaatctatggacatgttttacacaaatcttatgggagtctgattgtttcaagatttgactttcatccttcattatcaaaatatagaagaatgggttcttcttaccctctctgcaatgcttcgcggatgagtagcgtagcccctcttggctcgcattttgcaaggaacagaaccctgaaaatgcaaaaccttttctctaggagccatctcaaaattctttggcaagctcaaatgatgtgtcaaaccacggctgcagtttccaaagtctgtgctctgttgaaagataacgtcatttatattgatgtcaaccataatggtgggaaaaggaaaaaaaaaaaacacaaaccccaatcgttacctccatttcaaagtcacttgaagtagaaaaaatcttcacatcattgtgatctctggaccttttgaggccactgaatgctgattcatcccaagaatccgttgggaaacttgggaggtactcaccaccattttcaattcccacttcatcactcccattctcagaaatctgaggcatacgccttgagcatgaagctgacccggatgagaaattcaattgagtatcgactctagagccacctctcatcgcatcaaaacctattgtgcatcaaaattaatacagatttactttagaagaagagaaaacaatgaaagcatgaacaaatcatcaaacgagtaaaataaacaagaagatattattagatataagacatactattctcagaagctagagcggagaagaacccagctggagagctactctgccgaagaagatttgagcgatcatcatttggaggacccatcttaggttgaagcgaatttaccagtcccttagagttgaaaacaccgaacgaactctccaaattagagtccactgaattaaggcgatgtatgctatggatttgcggagcttgagaaccgtttttggagtagtccttaggctcctgcttcattgaagatctctctcctatgttgtcagatccattacaagccgaaatgaatctctctaacatggtctccacttcgggactcgaggatcgcaaatcacggtaatcctcctcagatccaccttcaacagcagcatcgttatcattattaccactgttttccataagggtcgccagaaaggagcccggagctgagcaataacgcgttaaagtagagctctcttcctgattttggtcgaagctcaaatccatgaattctgggtagttctttcccatctccacctctgaacgcttgaaattcggactgtataaaagactcattgaagtccactctttcacttagatgtataaatagaattacttgtgtataaatacagtacaatttcacaagtcgaaccaatcaagttattgaggttagaatctctcttgggctttgtttcaagaaaataaaattggcaaacagaaaacagatgtgtgccagtgagacgcgacagaccaactatgaattttaagctttctggctatggaggtcctgattttgtgtattattttaatctaattttttgaaaaatatattatatgtgttcagaaattgggggaattgacattaagagttttgagttggagaacagtaattgcaaggaagtagtaaaataaagtaaagtagactacttagtaacacccaacaaacagccggtgtttctccactccacatccacaatccacatctgaatctgatcgtcatctcctcttcctattttatccaccccacattaaaaaaccgacctcgaaatcccactgtttttacggaaagagccattggacagtgacgtactctggtcgatgagaaagttcgtcactcatttgagttgaccaaattatccccgatattatttcccatcccattgcattcctatttttctagttcttatttatttttattttttttcgtttaataataaatcatattgtttatcttaaagcccttgacaacgccgatatttatgtgtgtttttgtccgaaaggaaagtggtactgtgtttaagccttaaatgtgttatcatcattaatataattaagaattgctatattgttttaatttcttttagctaaaaaaaaacttcttcctaactacctaataactactttggaaaaaaaaaattaattaatttaaagtaattactatttaattgatttttcttagaaagaaaaaaaaagatagttagtggaggttagacatagaaatagcatagaaaacgtagcttgagggccaagcgactctatttcaacgcggagaggtgatttgggattgtattattattatttgttaatgcaattgtacgggggctactcagcgtgtccaatgcggatgtgggatgtgggtggtctttgggtcaaggcaagaggcaattcactctatactttaggtgcatgtattttgtcacacacacctttcatatcttattttctgtccttttcccgactactcttctttataccacagatttctcaacttgccctagtccgatcataatatatatttttttatgaagattcacagaataagtgttgctcctagtagaaacatggtacttctttctgattattagtacctttcttcttcagataatgattattattgctattattttatgtcacttttctcttattttttattttaataaaatattaatggctaaataggacaaaattttgatttttttaacgacataaatttatagataaaagataatccatccagatcattattatcttttaacttaattaattatagttgtatttttacaccataaactacaattgatggcaattaaaatgtatcagtatcatcaataaaattaaaatgtaaccattatatgtccagaaaaaaatagtgataataaattttggttggtcctaatgtttgacacaaacaaaacacaaaaggataaatggatacaaaataataataaataggtctgtgatgtcaaaaataaataaatcaataggtctgacatttatttagaattcttaggagacttttcttccgaaaaatatgatacagtatttatatatgtcaattatatatatatatatatatttgggttgaaatcgggtcgtcgttcaaactactgcagcgcgagggcaaaaggagatcaagttttatccacttggagttttaggtcaacgagtgaatgagctttaaacaaaaggaggaacaatattaaaaggcaccaattgtgccaagcatcctcctacgtgtcaatattattattgctctaattaagtatcgagtttcatatagttaagtataatagtttttagggagtatcgttagtcaatcacaagacgatacgtcttaagggtgctagacactactggtacccaataataatgctctatatttaattgttgtatatatattgaatttgacaattaatagactaaagaaacaagatatcgaagagaaggtactcagtcaaataaaccatgcataacatataaagttgtttatgaggctgttatagtattagtatacactactgaaaattagatttttaaagacaaattttaagaatttatagggtaaattttagtaaaattcgctaacaacactactatacagatcgctaaaagatagtaagaaaactgaaagtataacccctatagcatcggtattacaaaataactaacgacatatgtgagccttatttcgtaaaccctcttatgtagttattacaaaaaatatatgatagatatttttttaatttgaaatcaaattgatttttattgaaaattaaatttctatatttataaaatgttgttttttttttcatatatttatatgttttttatttttattaatattgttatcctaacttttgcactctgacttggcatcaccacataaataatggtgtgacacgtggaattcacacttggaatatctgctcgggaagagtagtccaagtaggacatatcgctcgcacgctcagagcgaagtattcagcaatccacgcagagcaaccaacacttagtgaattcagctttcgcatcatgagtcaacagcacaatccctataactcaggg

SEQ ID NO: 110537 - DNA, 2108 bp, Cannabis sativa
  modified_base (2054)..(2063): a, c, t, g, unknown or other
cagcacagctacagctgctttttttcacagcacagctacagctgctttttctcacagcacagctgtgccaaactagccctgagtcaccactccacgaagtccgaatgtgtaagtactcatccggtagcagttagtggtggtttttattatttgcatgaattttatttgagaaattcataatctatttcaaggtattattgtggggaaggatgtgagaggtattcattaggttgatcaacttgattaacttgaaggcatatatatttattgcattcttatttagtattaatggtgcttaatactttttattggtagcgctttatgattagttgatgatattttttaaaaaattattttcttaaattatatgggaccgaatacttaattatagcaataataatataaaatctaaaacacctataatacctcttaacaattctcacatatttatattcaataataataacatttgtaaagaagtgtaagaaatagatcgaattatatgtttaattatgattaaaaaaaaagtatgctttcacaggattataagtactaatcataacttcccacatgataatcaaaatttaatagataaattggagaaaatttgtcaatttaaattgcaattaaaggagaattgctaaaatatattattggtgcgtagtattcttttcgatgtcatactcctattagtgtaattaagtatcggaatacatatcaattaagaattgtttttaaagaaatactgctaactaattataaggcgtcacctatactaaatgctggatactactattacctaataacaatactcatttaaagtggtgatgttttccttgtagtattactagtacgtggttaggtgaaaagtatagcatatacataaagtaacgaagcatgaaaaaatcaatcactcagtcagttgttcaagtactgataggctagcataatcagttactattgtaatattcattaactcctggttggagtctcttcataacctctttggtacttagaaaaaatagacatatatcttattgaacataattttgcttagtattatgctaaatgacagatagacatgccatacccctaatataattgtggaatcgactgaattgcacagccatagcttaacatatgcaccctactaataaccttaacaaaataatgtttaaaaatacactaaaaaaaatcaaaagaaaaacaatttttttagcgtcgatcaacacgtcgattcaatggcggagggaaagaaggcaagtggggtcatttgacccccctcaattttttattcatataaatttgtatataaatttttgggtattttatattttcatcctataaaaataattttttcatctttgtccttacataattttatatttatttccataaaatttatatttttcacttttattctcacatatatttattttaatgttataaaatttgtattttttttcaataaaaattatatttttcattagtgcttgaaaaaaaatttgtttgcccccactaaaatgttgggttggctctgccactgcgtcgctcaactcctaaaactgatgttattagttatgtaacatcctactagtttagacatattactatatttgtttaagtattgggctagcctttactaataaaaagagattgaacgtaaagagcatttaataaaatttcataataattatttttttttaccaaacataaatcatagttacaaaatatttaacatccgagatcccaaaacctatttttaaacacatacaaaatataagataacagaagagtccctaaaactatcaaattgagctcatgttgtcgtgaagatccgaacactacaggtctaatcgtccgtatacatacaatctttactaggctctaaactcactgtggttcagctttaatcttgcttttacctacacataaaaatatattagtgagtcaaaaaattcattaaaaaaaagcataaaacataaacatatacccgacttgttatttggcgcccatgcacctaattaatatgagtctgttggaaatattttacnnnnnnnnnnatttactaacaagtatgtttcatcaacatcctaatatgaattcta

SEQ ID NO: 110538 - DNA, 8444 bp, Cannabis sativa
  modified_base (28)..(36): a, c, t, g, unknown or other
cataattaaacataaacaactgctaatnnnnnnnnnaactaagcgggctttacaaaataacttgtaatattttaaaaacaaattttaacggaattctggatatgtaaccttaagttattttggtttaaagtaaaatgtgtgtgttaattgcaagctatttatttaattaagtttattatttatttatttatttcaaatcacttagcttttagaccccgattaacgggattagtagattgtaatcacaacacggggcgttcctctgaataggacgttacacttaacttcttgatatgaaattggaagcaatctcaacaagataatggcttgactttcttcatcaaccttgtgatttatattagtcattcttacaattatctcgttaaacctatcaatattataatctaaagaaataaaaaaatcattttaaaaccgtataatatttctagcaaattaatcttgctaagaattgatggttttaagtataactcttccaacttgttccatactcctttcgtcatcttctttgcgattagttttcttcaaacactgtttgacagatacatgatgatcgtgtaatatgccatctcctccatttctgtttttttttttctggtttctattcagccaataacctctcatctccaagaactttgaagactttttaatgcactaggatcccttttaaactttctctccatagcgcgaagtctcatgttccatcaaatttctccaactcaaatctcgccattgattacattaactgtttcttcaagaattgcagcaaaaagaatcttgattctgcgttcttgatcgattaccaagctctatttgtgggaaaattaacactaatgtgcaaaatcaaatcaattaaaatttcaatcaataaatagttagtaatgacaagattaaccaatcacatatggatcagagaaaaacagggatgaacggagtaataaaaattcagaaacgattaaagcagtaaaataaataaatcaacaccaagatatatactggttcaattcctatagatcgatgtgatctatggctctactccaattctggaacaccactgaaatctcctttattgattgagcaagaacatacaatacagttgagatgattttctgttggattctctcgagtgttttaattctcacactcttactcaagaatcttcttcatctacagaagactcttcatacaaaacaaaaacccaatcactctcttttctctgtacctctcaatctttctttctctcaatctcaagatctcctctttaaaagtcgtttgaactcagcctctctgaaatgataactgtaggtggtatttataggcttaagataaagatcctaaggtcagtggttgtaattgatgggttgttacgttagttacgacataacagacatggtaatctcctcgtaacagaatctccatgtcagcacaatgcaaaatgcttccagatgagacatacgctttcagaacaaaggattgaagcgtatgttgaagggactttccgaacagaaaaggagggaaccagaatcgactatccagaactctcttccaagaggaacatctagccatccaaaactcccttccggaagaggactagctttcttaaagactacacccggagtggacatgatagtcatccgaaagctcccttccagatggtaactatcattccaagagtctttttccagatgtacaagttagctatccgggaacatactttcagaagacaactaactttctattacaagaataatcttatggagatcttttcatttgaataaactataccacaaggcccaacaagtagtttgcctcataatgtaaccctataaataagagtctccccaaatttggaattccatattttttaataatactcatatggtactttgtagcttaaagttttagtactctaaatttaaatttgattaatttgactaaatatttatagatcattaaataatcaaattttaatttgaaagacatgtaattgaaggtatttggttgtatttatataatatgattgatcaaatctaacttgaaggtatcacatacctaaatacctaaatacgtgtgatttcaaaatatatatacatcctatattaattgatatattcatcggttggaatttagagaagtttatggtgaaaatattgtaagtttgtttaattttatttttaattatcatataaataaaaaataaatatagcacaatctttcataaaagaaaaatgatataacataataatataagcacaccaccaaaagtatttgttaatgttaatttgtagttaattattgtttctgtatagtagataaaactgtaaacgtttatatatctcagcatactatcaaattgaatagttttatcatcattattattttatttttcattacataaataaattaaatagaataaacagaacatttaaaactaacttattttaatatgatttaaaatcaattaacttaatttaaaaaaaaaaaaaaattgtgaaattttataaataactaaacatgtaatatataattttttttaggaggatttattagaccacatctaatatttttagatatccaaatccgatcaaattatagattagatattaaattttaccatctgatctgatccaattcattttagtctgttggattgaatcggttctatccattagatgtatttcatgtatatctattggtttaattcaagtttatctaatattttaggcttagtattttttggaccggatcgattcatctaatattttagatcaatatttattggattggatccatctaatctaatccaaaaagaggtaaaatgttaatattgattttcatatatacatatttttttttacgtataacaacataaaattaaattactcatctaaactaaatgaaaatattgattagtttgattggatgttggacgtataagatttttggacactccatccaatatccgatttaatctaattagatatttaaaaataacatccagatctaatcctaattgaacatccaatatatggcgatcaattattattcaatcagtctgttatcattagattaaattgatttatgcacgcataccttttgacccttaaataatcagaatttgaaaaaagtatttcacacaaaattttatgtttataattatcttatcaacaatatgtagtcaatattgaaattagatttttaaacataaagttattacactacgttagtattataaaatttcgtaataaattgaatttgtaactcacaaccacttttttacccttaaattatgtgaatatatatatacacatactattttacaaaaagtataattttttttaattatttttataaaaatatcaaatacactaaatttagactctttaagcaaaaaaaatacgaataaaataatgaaatatcatttatttattttaatataactaagaatatttcattatttcgttaaagttgaataagaaaaagaaatattttaaaataataatttgttttatagccacaattattaaacaaatatatccaaaaaataatctcaaatagatggctttaggctagaaaccaattagtaagataccctatgttttcctcttcccttattattatcactaatttattttattttttgttgtgttgccttaccaatcatttattttttttctacaaagaatatatatatataataatataaatataaatattaaaaaagaatctaaatgactcaaaaaaacgacagcacattatttattattattgtggggataagcattttttttcttctatttatatatgtattaaaaaaaacaaatagcattaaagaatcttgtacttaatttttatatacattgtcatattcctcacttttattttttattttagtttgaaagtatattcttcacctttcaatccctataatatttcaaatgggagttattataaaaattatcgtgccctaatatttgtcacattatgaacatacaccaaattttttattgaaaaaaaaaattaaaaacatatattatcccttttgtaagtgacttttaatttatactttattttatagtatattttctcaattaagtgcgcatggtagtagaagtatatgcttatctaaaccattatcattactataattattattattatcattatcattatcattatcatcatcatttattattattatttcatttgttaatgtttttaatctttatagttatttttcttacaacaaaaaggacaaatctttttccactattatttaccaaacccttgataaagtttagcaaatattgaaattaaaaataaagaagtgggtccactgctcatcaattgctgaagttggagaagtgacccatcatccattgggatcatctttttgaaaaaaaaaatatatatttttataatttttttttacatttttacaaataatatttgtgattttatataaagaaaataacgttatttttatgttgttacattgttatatataaaatttctaagaacgtctaaataataatttttttagaacaacctaaaaataacagtctactataaaaaaattataaatatatatatataaaaaaaaaatctataaaaacgtaaaattttttttattattttggagtattttgaaataatctccctataaatatattattcaaccatattactataaaatctcttatttgtgagaattttttttactaatattggatgttaaatactactgaataagtcttattaattaaaaaaaaatagttaatatgtcatagttaaaaccaagattagaattagctacataaataacacattatgtcacatcaagtagtattagacatattaaagtctctttcttagggaagaaataaaaaataataataataataataaaaaaaaaaaaaagagaatggcaataagagtaataaagaagttttctttccccttgaaattgagaaagaaaaaagtaaaattaaaatttaataattatcacattaaaaagtaatttgttttgatttaaaataaagaataaatatataattgtaagggtaaaattaacctggagaatataaacataatttcatgacatgaatggatataaattaataagcggtgtggtaagaagagacgaaacacgtcgtttcattaaaatggaaagaaagaacgaagatattaggaagaatatagttgagctcggaagaaggaatgaatgggaaaacatgcaaaaaaatgacttataaagaacgcgtgacattgattcatgcatctaaatagaagatcttgacattcaaatgagggatgaattcttaatcacactagtctatcgaaactctactaaattgcttctctgaaaaagttcttatcacaattcaagattactgattgagaagagaacaaccgacgatttaggaggaataaagtaatcaagtagagttgtaatttttgacaaggacaattctagcataaaaatctaagtttaattacaattttgttgttaaactaattttcagcaataacagaaattttctttaatctcctatcatattttctcacttataaaacgtgtattttccttttatttttctactcactttgtttttccaaaatttcttctcttctcagtcaaaaatagtctttatcatttaaaaataaagttatatagtttgaaaaacaatgttttcactgttctaagcatatataattttaatttagaaatccttaccaaaaaaaatgagaaatactgtgattttgttttcaactaaaatcataaataatttattgttggtaaccaaactacttttagtttcatcttcttcttttcttttgagatgatacttattagtagtaagttatcaatagtaatctagcaatgtaatttcattatatcctcaaaattcaagcataaaatttagctaagttagtttatgtgttcaattaatatctactactaaaactattaggaaataatactattttaaaataattaaattaaatactcacaacaatttagttttagttttattcaatatttatatgataaaagcaactaaatctaccaaaaataatgttgatgtttagccacaaaatagtgctgtaaatatgagtcgggctttttgccacgacatgaaactggcacgagcacgactaggtataaaagatacgagtttggtcacgacacgacacgatgctacaaattggcatgatacggcgcgaaaaatatgtccttaagcatgacacggtacgagaagcacgaagggtacaacacttaagcacgaatagactagcccaaaaaacacgacacacaacaagcccaaaaagtacgacacgacctattaaaagagactataatttattaataataatagtaagatatgaatttagaatatcattttagaccttgtgttttgcaaaaattattaattggaccatctgttttattaaatgataaaagggaccttgtattttccaaaatagtacaaataagactctgaactgattttttgtcaaaataaaatttaataataatttgatctaaatgtgttatgacaaaactgtttacattttccgtatctgttcgtgttaggaactgtcttcaagttggttatactaaaaaaaagttatcaaaaattaagctcaggattttatttttaccattttagaaaatacatggtctattttttcatttaacaaaacagagggttcaatcggtaacttttgcaaaacacaaattaagttcaaaatggtatttacccaaaagaataataaaacttaaatataatattaaacattataattctatgattaaaactattaaaatattgaaaattaaaattatataataatttatttataagacgtgatattaagtaaatatttaaattataatgatgttaataatttttttaaatgataatctgcaaaatattatttaaaagttatatgaatatatctaaagcttttaaatatacatataatttagtaattataaacaaaaatatgaaaaagtaaaacaagaattttagtccaaatataaaaatgggctgacatgtttaaaaaatatgagtcgtacgagcaaatcacgacacgaatccaaacacgacacaaaaatatcagacttacgggtcgtgccggacctaccctataaaaatgttggcatgatacgatacaactcatatttttctatgacacaatctatttttttaaaaatacgaataaatacgagtttgatcagcacatcacacacaaacttacatcactaaccacaactgaaaattgtatcctaatagtattttttcaggtggtaggactagggtacaaaatctaaaatctttgtctcaatcctttaaatatttagtctttttgctaaagtttttcttttaaatgctagaaggcctttttctttttctttaataatgttggtcttccaacattaaccacaatttatatgatatatatttttatatttttgtggtaaataaaataccaaaattttttttcttgaaaaattgttctagaaatatatgatattatttttggaaagaaggctttctaaatttacaataaatccaacaaatgagaaaaagtagatatctcatcaaaaccgtccatccaatgatgaattgacaagtgtccatgatgctaaatgggtaggcccaatttagtctctataatagggaaccacaatatagccacccaatttttcatgtcataatacacacaaatgaggtgtgtttagataaatgtccaatttttagtatttgccctatcaccaaaccattagtgaaaatatatgtatatataaggaaaattaattctttttgttggagatttggatttttatttcttggaaaaaaagttgtttttaataaaatattttctttttttcttttggctagaagtaggaatagaaaatgtttgaaaagaaagaaagataaaatccaaagtggagtttttagttgtttggggaatacaatataaaagagaaataaattaaaaattaaatgtgaattttattagagatttttacaaaaaatgtcatttttgtcacaattttaacctttatagaaatactttataatttattttttttttacatacatattcttgctaaacattgagataactatttaaacaaaagatattattattttctaaactttctaggtatgtaatactattgtattgtaaaaagaataaaatatattatttaaataatgtaggcaaaaaaaattaatgtatagtgcaaagtaaatttttttatgaaaaattataattttagtgatttatttttaattttttttttttaaaaaaatagagtatatagataatacaaattaagggtaaatcccattttggaccctctgttttataaaagttactaattggaccatgtgttttgttaaatgacaaaa

SEQ ID NO: 110539 - DNA, 1415 bp, Cannabis sativa
acaatttgattatcctattcagatttccaactataacttgagaaggaaggttgtagtgttgttcattacagatttagaccctgagctcccacttggatttgaatatgcaattttgaagagaatataccatgaaaagtgcaacaacccaaccaagactgagagtcaattcgatttagtttgggtaccaattatggatcattgggctagtgaggatggtaagacttttgaaagccttagagaacacatggaatggtattcagtgcaccatcctttgatggtgcctctcaaagtaataaggtacatcaaagaaaagtggaactttaccaagaagcctctgattgtggtgatggatacacaaggcaaaattgtgcacagaaatcctatccatgcaatgtgtatttggggtacccaagcatttccttttagtaccgatcaagagacattgatgtggaagaatacaaaatggtcaatcgaccttataatggacaaccttgagccagatatgcttaattgggtaagaattttactctatgagcatgaaattaagtacaactacaaacttattattaattatgttttgttttaggtgcaagagaataagcatgtgtgcttgtatggaagtgaagacatagattggatcagaaatttcacaacggtggcaaaaaatgttgcaagagaagctaacattaccttagagttaatttacgttggaaagagcaacccttatgataaggagaaagttaagaatgttatagatataattgtacaagagaacctaagcagaacacttgagtgggacaacatgtggtacttctggatgcgacttgagagcatgtccaaatctatgaaacaacatcttaagcccaagaatatgatgaatgaccctgtaattaaagggatcgatgcaatgcgtggctatggctggggggcagtgatcggcatgggacttagcaagatggttataagcactgatattttaatgctcaatgccttagtctcatatgataagtggaaatcaaggaaggacttaatcgggtttgtgcctgcattagaggagtacctcaattcgccgttcaggagtatcaggagtcttggtgagtcatttcataaatacccaatttttctatataataattcgggaaaatcatatgcaatgcactccactatacctgtagtggaacttactttctttcttttaacatatgtatggtcaaattttttacccatggtacagagacaaatgcaacgcccttcgtaaaaaaatggatctattttcaaatgcaaataaatagcatttgctctatcccctccattcaaagtgttacggtgaactgtccacgtatacacacttgtacacgtggcaaatttttttagtggtacacgtaatattagttttaaaaataattataaatatt

SEQ ID NO: 110540 - DNA, 1920 bp, Cannabis sativa
gcctatgctagatagggtgttacaggtacggtgcggtacgatctagacaaaagatgcttcccagatgggtcagagtggaggttttggaacagaattggataaacccctggtacataggagaagagacattctaaggtagagaaaaagcttcagaaaaggtccaagaaagtatatagactgaggatgcttgaggagagatatcctcgaagggactcagagaaacaatgtggatactgcgtagagtgggacatttgtccaaagagtggtcatttaaaaggcgagattaggatgttggttagagcgggagatttaagatagtgagtccaagttcctatacaccagagagggggttgctctcagaataatgcctattcttggattgcagggtatcgtaagagctctgtcaggagtaggtcacccttgagatctaggaacacatctctcgatactccttgttctgttggtccaggatgaacccggagccctatgacctctaggactaactttgttgcctacagatggccacgtggccacaatctcaaagatgtctacacacagctggaagagccaaaaattcccagaagtgatagtaaaggataaaatgaaacatccaccaatttaacatctgtgaacaaaaatgttactagttacatccgcgaagggtacaagcttcaatggcaacgaacgatatattcgtcaagttccccaagaccagtgtctctctacgtaaacatcagtcaagcttgccctatacctagaaatcattcaacgtggggtagcattcgaagattgcttgaagatttcgagaattggtacacagtgggtaaaagccatcgcggacttgtctacaagttcacggataagcagaagtttctagctaacaaggccattacccggaagaccatacctccagactgagtctttccaagtgtattcgtaaccgagaagaattttggcttgcggtgaagaaggattgtaccgtgcgtgttcagaagtgtgatccatgccaaaagtacgccaaggttctgcaagtactacctactaaaattacgtgatgtttcagacctccactcaggattgtctcaagcaaagggaatcataggaagatcctcatttatgtctcgaacgtgagcgatgacacaaattgaggctacaagtaagatgttgaagatgaagttgatagaacttccagctcgtaaagcccgattgctagaggggcatctacaaagcccattaagcccacaaagttgtgaaaagaactccaacgaggcacacactacgaataatgactgatggactcgaagtggtcatcccaaccagaaaaactattccctcacataaatgagacatttgtgactcaacgaggaatcactcttcgctcatagaactgtagatttagtcgaagaattctgggaaacatcacaagcccaactcaagatgcacccaacccatttctacatgctgggagtaaaatttccaagcattttagttctaaagggaaagtggtatatttggagttggaagttttgtccagaaaagagtcttcccaactttgcaagaaccagaagtgggggtcttaggacttaagtgggaaagatcctgcaaaatacagcaaaaagcaggaaatggagttttccaactcaggtgaatgatctaattagggatcctttgtgcctagaatacagaccttttccaatgctatcaataggctgggggtgtctaaatcataacattcctcagagatgtgtccaatccttggtaaattctctctcttaatgcaagcctccgagtacaatgaaatgaaaacaaaaaagttcacacaaaaatgtgataccttttgttgccggcacaattaatgttttaaataattgaccaacaatttagagacgtccaaacttctcagctcacttgcgggggggg

SEQ ID NO: 110541 - DNA, 3906 bp, Cannabis sativa
  modified_base (48)..(48): a, c, t, g, unknown or other
ttagtatacgtgcctcgcacgtatctttttactagtatatatatatanatatatatatatattttgtgaagtgaacttatattttaggatgctcttgtgtagtgcaattacattgtttaaaagttcgaaacaataagaaaccatagaattagtcaaatatgaacaaagcattggaagtttgtaacagaaacatattttgcatcatcaacctctatatatatatattgaaacaatttataaagctttaacccagaaacataagtacgtagctaaaacttattataaggtcttgttatttcttcgtttattatattataataatatatcaatataaacttatattagacctttttttttgaaagcaacttattatacctgtaattattagcttacaaatagtaataatagattaattagtattattagaagattttaaagagagaagtcttggaggttctctgatttccaagccagtgttgcatatgaataccaatggcatccaagtaaatgctgcttcttccatggaatcccaccacttttccttcagttgtagttgatgtgaagtaagtccctatctcctccccataaggaccgtacttccctcgacttgtgttgaaggttaatgatcttattactttggctttttcatcatctttggtcatgctaccataataccccgatatgcatatcaacacctcatttggatactccaacttaatctgtgtgcatgcatgcatgtcagtagtgtagtatatatagctattaatgtcaaaacaatataataatctcatataattaatgttatttggctatataaatatgtatatatgtatgtatgtatacccgatgtggtgtgtttcctccatttccaccatgtttaacagaccaaacaggttgaccatttcggtcgtactcaatctgtatagagcaaatggcttcaggtgaccttgtcaaatatatctgcttaatcccagaaaagactccatcgtcccatgctctgcctccatccccaccccatggtcctgctccgcatggggctggttctttcatcactccacatgcaatctatatatacatatatatatagtctctcatattcatcatgcatgttcattattataacaataagtaattgtaataatatatatcaataagttacctcttcagcagttgttccacgctttgcaagaactaatttgttacgccactgaggatgatctatctcagatatacctgatttattattatgaaaagggtcatcatcattattatggctttttataacattattaacaactggtggtgggactgggacaattgctttggaattaataagatttgaggtatgatctactgctgctggtgctgctgccactattttcccttctaaaatgtgaaccccaatagcatctaagaacagtcctcttctcccatggaacccaacaattctgccttcccttactttggaggtaaaacaccctcctcctcctgcttgttcttctccatatgggccgtgcttcccttttgtggtgtggaaagtcaaggacttgatcacctgagggcccattatcattgccggcccatatgaacccgaaatgtgggtcaatatttcgtttggatagtccaatattacctgtgcccatcaaaatcaaatcaaacatgtttgttattacaacactcaattaatcatcatgctaccaatattagtaatttcaccttgtcaaatttaaaacctccagttccaccatgtttggtgccccaaacagattcaccttttcgatcatagaggactcttatgtatacaataccaacgtttcgagatatgttgatctgtttgacgcctgtataaccagctccttcgtcaaaggaagacccacccgttccaccccaaggaccacagcttaccacaccttcaatctttgactttgagggtgtcgtattctccttaacaggtgtaatagtcacctaccaatttaattaagtaaaactattatatatcaaagctagtgtacatgtgagaataaataaattaagcccttcattaattaactacgtaccttcttcttctcttttttgtgttctttgcctcctcccacgtcactaagttctcgagaagaatcagagtcagaagaagacaattgcctagtgagcttgttgtttggcaaaggtttagaaccaaagttgttgttgttattattataattgttgttcttattactgttatcatctctctgtctcacggcaacaactatatcatagctttggcctacactaccttgtataacagaaaagccattcatgttttcggaagtggcattaaccatgtagttttgagcagtgtgatgaacctgagtagttctggtgtggacgacgtcgttttgtttaggaagagtcttcaaatgaaccccaatggagtccacaaaccaacccgctttcccatgaaaaccaacaatttttccaccactcgttgggatagaaaaacttgaacctttttctactccgaatgggccgtacaattttttgttgcttttcagtgtcagtgaacgaactatgggcggaccccattcgtttagcttagcatagtaaccgttaatggaggtcaaatattcatgtgggtagtcaagtttgatctgtgaaagaaaaagttttcgtctttgttattttattttttcttcttctgaacaaattaacttacgttatgttatatgttacttacattgtcaactttagggcctccacgaccaccatgcttctctgaccaaacagagctcccgttattgtcgtattcaatctgaatagagtcaatggtggttccatgagctacgaccacctgcttcaccgttgagtagacaccatcgtcccaatcgaggccatcatcacctccccatggcccaagtcttacgggtttcttctccatttcttcaaacgtactctgttttcaaacaacagagcatatcatcaaagttagttcaaactaaacacctatagtacaaattaaattggaaaaaataaatataagcaattaccatattggaacagagaagatgaaggaagctagcgaattaaagagctcagtgaatgaatgttaattgcagtgatgaaaagagtgaagatatgagtatgaatttatgaacatcaaaaggggtgttgagtataggggaaagaacttaaaatattaatataatatacaatacaatgaatttttataactttaatttcgatatggagcactatgaatatttatcattcagagtatagcactatggagggagggcatgggttcaggaaagaagaatcagatcctttcttctatctagtctttcatgatatgtatctgaaaaagtattccatattcacttcaatcagtgattttattatttgccattttgtgtttgtgtttgtttaatacaaagaatcagtaaatgggagcaggtaggctcaatcctttattctaaatttggaatatatggatatggaggagcatgatgagcatctttgcatgggagtgggaggacatagacacgtcgacccaaatattgctcattctttccttttcagctttacaaaaaggaacaacaaagttttaccttcttagtagcgatcatttgttgaccctttttttctttccttcattccttggattctcattcaaggaatcatgtaattagggctatcaatatggttcgtatagcaccacttaaaaatgatagctaagtcgttttggagttttcaacacatttaataatcacgtcgtgtttgtgtttactttaatcgtattgtgtcgtaatcgtgacgtttgatactcatgatagaattgataattgtatcttatcataatcgcgtcgacacaataaaataaattaattatcatagataatttttttaaaagaaaaaaataatgtatct

SEQ ID NO: 110542 - DNA, 4945 bp, Cannabis sativa
gactaaatgaacttccagctcccgtaaacattaccagggttttagtttcaaggtaatggcgacgacggacaacgctgtcggtgaacacgtcgtagagctgaccgtgcgcgagaggttggcatcggaaattgatgaggttgtagcttcggaattggaggagataagccctctcttaactcaggcggagaggcccaaaatcaacattttcacaatttcttatccccgtaaaaaacctaaggtaacaatcataaaattgattcatttattgattgttcttgctgttaattgaatttccaacatgatcatcgaagcttcttttggtaacgcacgtattttgatttggattaattattttggtttatctgaaattgaatttgtaacctgtagataaatgctttgaagagttcaatttcgtttttgaccttaagaactagatgaggataagaaaatagaaggactttgattttctaacttgttttgtattaattgattgggaaattgatgccattggttcatcagatagtgaaaattgggaggttggtttgttttactgatttggggttatcctaatgtaggaaccagtaacgagattagtcgaattggagacttctccggtttcacaatttgttttttgggtatggggtggatctagacactctggtattctgtgtatggctgtgtcgtctaccgtctattttctcatgggagtcgtttctaatgtcttctctggtaagtaatttctgtaccttaattgaaaatccataagattcaggacatattcagatttttggtagcctgatatatgtttcccaaaaccaaaaattgtgagaagctggagaaacaataaaaagtaagcattgcacaaggtcaccaaaaaagctaaaattgtgaaattccctaaagtaagacagtatgaagctttagcatgcttatatagtatgtctagcaatatattgcaagcatcaacaattgacttgatgatttcatcattatcaccttaattaattgctaatttataaaatgaatatagaaatctttttaattattttttattgttgttgtgacagttcagtcaattccattgtttgagactgcattcgtcagatgtacaataatcttgatttgttcatatatgtggttgaataaaactggccaaccaatacggggtctagcaaatgttaggtatcttttgatttcaagagcccttgtgggatttttgtcattgatgagttttatttactggtaagtttttcattgttggtttgttcttgttcgtgatactgtacatgacattgattgatggaccgcagtaggctagtagcaataactaaaacttggctcatttttgtttcagcattcagagactacctttttcccagactatacttttgagctttacaactccgattatggcttcagttatggcaaggatagttttacatgaaaaattgaaaattgcagatattggaggtatctattgtttttgtttaattttttaatttaaaatagttgatctgcctgaaacaatataggggaatgcttgccaatctatatgcaccttcatgtctgttatggtaatatcatacacttttttttgcattgagacaatcagaagtttgtggcctgatgcatattgaaatttgtcataatcatggtcggtccttgagagcaacattttcctatggctgtaaggagcggcgtcttggtggctgctagtttgctcccataatcagaaatttaactatctcttttaggcatgtaatgatgacttttctattgtaattaacctttcaggtctagcttgcagtttctttggggtactcttcatttgccgtggagtgcttacgacacaaggtacggaattgagtttacggaagaacctactttgaattgggtggtaagacttagtcaaattgttgcatttgtgctcttaaaaaaaaaaaagaaaacaaaacaaactagatcaacttatgagaaactattattccgtgcaattatttatcatttacagatgcatgcaggaggtctagttactaatggggaaggcagcaatgcatcatatatttggggaagtaaccatatgtatgccattttagttggtttattctcagctttaacaggtggaatcagctattgccttataagggctggcgcaaaggcatctgatcagccattgtaaggccactgattgtttttcttatcaattattgctgtactgtggacgaccttaatacacaaaaaagaaagaaaacttgggaaattaaacaatgccatttatatgtcaagaaacgagacctgttcttcttgtgatatgtctgacatggaatcttggaaagatagttttacattactcttctcttagaagattctctacttcgttttttcaggtcaacagtttttgcatttggtgtactgtctagtcctgctgcaggaatttgttcttttgttcttgaggtaaattgaatttggccacaatactgtactttataaataaaaacttgatataggctgcatgacaaagaaaataaaaacttgatatggtttggattaataaagatttggttttgactaggaagcttttttaaggaggaaaatgtgatttccaaacttcatgttactacgttttgttgatttatgagactaagtgtagactaagtgtgccaagtccttgtaaatcagttcgctataattctgtttatggtttttgttcatattgcaggattttgtattacccagtttatattcgtttacactcatggttatactcggcattctagccttttttgcagaggtttgatcctgaactactttcattaagattcaagtttctaagcataaccatattactttctatgggcatcatggtgatttctgaacttgttcaatatcaggtatttttagcacgtgcactgcagctcgagaaaaccagcaaagtagcaaatgttcaattctttgaggtactatttatatgttattagttagaaatctcttcccttgtatatgtgctattcagaaacaaataatgtaagaggatagacattacagtacactgcaatatcaacaaacttggcacaataaagcttacaagtttttcattggttgaagattaaaataattaacaaaacaaggtcccaattggcctttgcttgttaaatgtttaaaacattatgtgctcgaaaaacaagaaaagattcagttttgtttgttactgaaggtggttcctcttttaaatttctcctactacctccaaacacttaaaagcttatcaattcaattatggaggtctgtaaatttcgaatcttagagatggcattttcatattgtatctttctttcctctggctggtagcactttttcatttctcttttccggaagatcctatggtattgcactttaaatcttggttacttgcacatccacaaactcatttatctcatatataattttttccctctttcaggcagccctatcacaattgtggggcattggttggttaagcctagctccaactttcggtggacttgttggatgtttgcttattgtaatatcagtgtgttacaccatgtattttggacccgataaagaagtaaactgaaaagatacgtttttcttttcttttggttgcttaaaaagcatatgcacccagtttggtgcactcagctcaattgtctaatcaatacaacctctgaatggtatatctacttctttcattcttagtatgaataggtttatctgatactattacatgcttataactgtaataagatatatacttgtatcgataatctacttattcaaaacatgttcttgaaaatcttcttcattttattcccaagaacactggaccaatattcactgtccatgccaatttgtaatttgtttatatttcaatgatcatggactgcttaatcgatgagtcattttctcattccaacaaatactgaaaaatatcacaattatgttaaaccacgctgcatatgttatactagagggaaacgctttttgtaccatatttattttgctactgaaatgccattcttattttctgaaagaaagctcttaaagttcaatattcgaaacttgaaaagttggattccgctctccctgtatcctcattttctttagggtaaaagaaaggaagaatcttgcaaaaccaagaatgggtttggtccatattgaatggacttattagggcaaagattgatatgtctctgttgatacattaatacatggagggtgacaactcacagctcttgagtgagaaaacattaaatttatggcaaaagagaaaaaatcatctgtatttctcagctgcacatatctagctttattcccattcatagttaattataattatcgtcacaaatatttggcctaacacaacttgttatttgttaatttcttttcccccttttcaaattgaaggcaacagtgcaacacaagtcaattacttttcctattctatttgttaacaaaatttaaaaggttaactctacaaagtcccacgtgtcaccaagcaatttctagccttatattttcttctttatgtacatatatattttttttctgtatcaatgcatagcatttattccaaaagcagggaagggaacaattgctgtacagactacaatggcatagtaaatcaagaggtcattaatgcccccaaatattagaggttattacgtaattgccactaaaggtactaagaaatagattttgttgattaaaagaattgttaatactattttagattttatatttcctaaaaattattaatttgactttttgttatgtagatgataaattagatcttatattttttaaattatacaaaaaaaaaaaatcaataaaagatactattttatattatttaaaatatacaaatctaatttatcatttaaccttcaatcaatatcttttacaaaatatacatttttttgcaaaa

SEQ ID NO: 110543 - DNA, 2505 bp, Cannabis sativa
  modified_base (2327)..(2332): a, c, t, g, unknown or other
gtgagatactacttgattgcgtacacttgcgtaataaacataaaattcgtaacaagtattgtgcctggtctggtcaggctgtgaactaccaaaaatccatcgttcatttttcaaaaggagttgaagcgaggagagccactgatattgctgaaatcttgggcatgagaaagatgaaaaaggatgcaagttatctgggcctaccgttatttagatcactaaatcgcacaaaagatctccattttcttgtggataaagtgctctgaagggtgaatggttggaaaatgaaactattgtcaaaggcctgaaggacttgtcttatgcaatcggtgggttcatcggtggccacctatgttgcagcaattgaagtcatccccagatcgatcgttactaaggtggatagatttctcagaaatttctggtggagattggataaggggaaagtgtggcataaaattgcctggagctcaaagtgtaaatctaaattcagaggtgtattgggatttagaagattggaaaatgtcaacaaagcgttcttaatgaaatgggcgtggaaagctcttatcaatcaggattcgatatggaacacaatcatcaatgcaaagtatattaggaaaaagtttctggatctagatcgaaatccgtctgactcgggtatgtggaaggctatcctaggggtcgatccgttttcctaagggactgtgccgaaggattggtaatggaaatgatacttccatctggttcgatccctgggtcatatcgattaacagatgcccaactccgcttaaggatgctacttctggtgtatctcaggtttgtcagtttctccaaaataatgagtggaatgttgatatggtatacaattggtttagcgatatggatgctgctgctattatcaatatggctcgaccagagagggatattccggacagttggatgtgggctgaggaaccaaatggtcagttctccataagattagcttgcaagctgatcaatggaatgaaagtaaacaggggccccgaaccaccatggaagatggtgtggaactcgaaattacatccgaggttgaagttcttctggtggcagatttacaggtatgctctcccaacaagaggaaaacttggctcctttatccctttagattctgatgcttgtccttgctgtggaaatgcatccaaatcaatttttcatctttctggaagtgttgctttccaaaggctctttggtttgacacgggatgggggataagaattgatgcggccccagttgagaattggcagcagtggacggattggtttcttgatgctgccaacaggccgacgcagatcggttttgaggaattcatggtcaccactttgtgcataacggaggggatctggagagagaggaacttgcagattcattcggataaggccactcctatgctgcaagtgtccattgcaataaaaggaaaaattttagagcactcgttggttgtcaaaaatgatgttcatgatatcgtaaaatggagcccccctcccccccggattgggtgtgctgtaacactgatatttctagaaatggagatacaaccattctcgcggctgtcctcagggatgatcatggcaccttggtgaagattaaaacctggagtactcgaataactgatctaaagatgggtgaggcgctggctgtctgtatggcaactgagtgtggttggtggagagtgaagtcaaaagggttatttttcagtgcgatagtgcagtggttgttaaggcctttgcatctgagagcgactatgaggctgacttcaatctcctatactcgcaccacagattcaggaattggtgcgacaaattcatggaatgggatattgttcatatatccaggaaatgcaattacgcggcacacaacttagcaaagtgagcgatggtgaacgaccgggtgggcaatatcaatccgagtgatttagcacagggggtgatcgatgattttattgagtggaagcctggagattgagctctggagggctgtttctagccatcttatgcattttttgttagtctctatttgtcctattttagtttgatctatctacttttatgtttttttttctttcagttgtttcggtctgtttgtattgttggattgaagtgttggtaatgaagttttggttgggtgctggtttgcacccaccagtgataaaaatatatatatatttaatatatactagcaaaaaactacgtgcgaagcacgtatactaaattttatgctaatttttttctatgttagttgaaagtgatataattaaaaattaaaaaaaataatattacttattaggtgagattatnnnnnngtgtatctaaatattatagtttataattttgtcaattaaaagtgaacaccgaatgcaatatattagtgtttaagaaagcttgaagatttaaatatgttcttttgttaatccaaaaataaattaaaaaattgatgttccaatatttaaagaaacattacttaaatgggtgtaag

SEQ ID NO: 110544 - DNA, 5497 bp, Cannabis sativa
  modified_base (44)..(75): a, c, t, g, unknown or other
gtgtttattttcattgttgtagaattcatattaggttgttaatnnnnnnnnnnnnnnnnnnnnnnnnnnnnnnnntaaaataatttccaacataaggatgtctagaggcttatgtcttttgttttatgcttttattttgcgtactttattttttattcttgtacggcttataggccttttactttaatttgaacaatgtttacgtatgatcgtggggccttttatttttgaacagatgactggccaggtgatcgttaatcctggcttcaacttcttttgttagacatgtagatgttcgaacttacgctttttatgtctaatatgaaatatgccatttgcacttacttagttttcatttttttgcttatcaaagctttaaattttacttaagtttagttgtgcttgtttgatgctgtatggtgtgggtgccctccaagtgatcgaccagacttatggtctcttggtcacttgcgattcactaagtactatagacctttacctgtgtattttcttggcgaaacctatttgtacgcatgtggaactaaaaaataaagattaactttaagaagttatctctttagcaaaagtaagacttttcaagctcacatttacgctggcaaaagtaagattttttccaatgcatatttacgctggaaaaagttagacttttccaaatgaacatttgtgctggcaaaagtttaacttaaacttttgccagcgcattactatgctgagaaaaattatttttgctagcgctttttcattttgtgttggtaaaagtttcaatactaatacggatttgccaacgcaaaaatatgttggcaaaatttaatgttgttttatcagtacaatatctaacttttaccagcacaaaaataaactggcaaaaatctcttttttttaagagtgcatgaaccactttataccgagcggaagaaacacattgcaatgcccgtattactcaaacctcactaaaacccatctttattaacttattaatcttacaaggttgaataatttaggcaaaatttaaatactgcaacaaacaagcaagcaggtatagttaaacgaacaacttaatcacaattatagtttttatatacaaaattcatatctacaaacacatgacgatttttaatagtaagctgaacgttattaattaatttattcatactagtagaacattcttacaaaaaaaaaaaagataaaaataataataaacatactagtagaaatacaatgtgctggttcattcaaggcttcattttcaacttattaattagggaaattaacaaatggatattgtgaagatcattctttttttgaataaagcataaaatttgttttttttttttttttgagagaaagcataaaatttgttggtagacaaaaaaaaagcatatccaaaaaaatcttattatgatacacattattaattttttttgaaagcattattatttctttaatataactgatataataccatttgatgcaatttaggataaaaaaaaggtcatgttatatgagtatgactagatttttcaaaggatttttttccttagattttaaaaggtcataaattaagattattagtactaatggtgtttagtactttctacaagtagtattttacgatgcgatattttttaaaagttattctttttaaaattatatgaaattcaatatttaattacactaataataattcaatagcaaaagaaatactaggcaccaaacatttctcataaattaattacatgaattaagagagtgttttcacttaattacattctccttgatttgaacaccttttttatattgtctacctagggatgtaagaaataagagtgccaaaaataatgtggaatagaaataaaataaaatattatatctttagataatgtgtaaatttttagcatccttaaagaatgctatcattgcatatgctctaatataatatttggtaattgtgcctgtcaacctatagagtctaattagacaacaaatattgtttttttttcttttctttttcttttttttttaaacaaacaaatattcctttttcttacaaaaaaaccctcctatttaggacatataatatttttacaccatatgaagcacaaatatttacaataaatttaaatatataaatttttagataagcacccgactataaaaaggaaaagaaatttgcatatatataaatagatttattatataaaaaaaatgtatatttgttttttttttttttgaaaagaaaaaaatgtatatttttagaaaagaaatttgcatatatgccttcttatagctaattcagacaacaaattataaatgtgtgtgaggcaaagtcatatatgtaacggtttaaaatattctttacgagggtgcgtaacacgcacacgacggattttcgagagaccaatggttatgaagtcaaagtcaacaatataagagaacctaaagtaatattagtcgtaggggtgacgtggagagtaatcattggatgagcacgagcgcacagcgttgatgtgcgaggtagaggatattttgtttgaaaaactcataggccaatgtcttaagtaaaaacaattaattaattatttttttttagtatatatagcgaaccatattatgataaaccatcatcatttgccaattacattactacagtttcactctctgagtactttttttcttctctctcttgattcctcaggttagtgtgactgaattttctttatgggtatccaactttttcttattgtcttttatatgtattgtacacaaatatatctaatatcttatctttgtgatttttttttagggttgtttgtgattccaatctgaaaatgagtgaggcaaatgaagtagttgagatgatggaggaaggtgagacaaagtttttttctgtgtttaaatctaattgtgtgtacattttgttttgttttatttttctctatacatgcttttttacatgaaatctagctccaagttaatttgttttaattttagcacctcaaaatgttctgatgaatcagatgttgcatcacaaaataatataagggtggaattttgaaaaaaaaaaaaaaaatactagattaattcaagcatgaagaaaaaatagaatgatatatagaaattaaacatatcttattagacactaataaacaattatatatttcatttttatgagcaattttttgtgatgataactatattctacaagaaattcattgaaattccttcaattttattgttatttgatttcaattatagtttagatataatatccggttcgatctattatgtacatacaattgagagtataatttgcccattttcgatgatgtaggatggaatgtttttgagtcaagttagatctagccttaggaagtacattttcataaaatttcaattagaactagctagtatattgtgaaaattgattaatatgtcatctacatcaaaaataaattattcttcaacataacaatgataaatttattgttattttctgttttttaagaaaaaaaatattgtatttacgtactatttgacttatttattatacacatgcaacgacttcatttattgttaagaatattgttaagtctactcattatttcggtatatgaaaaatagatttttgacaaaactttaatactcaaattaattaagctattagctagttgattaattttaatgatgactttcgaataaaaaatgcggcgcgcgtgaggtataagagagattttaaaagttttaaactcgcattatttatcaatctatttgaaattgtataaataaattgtaagaaatattacttattacttttcctatttttatagtaattggtattaatagtttttttttatttgggtgaagcataaatttgactccaaaaaaatcatgtttttgataccaatcattaactttgttaattttttgatagtctcactagattttccaaaaaggagtttagccatatagaggagttgtgtacttgccctaactgtcaacctattcaatacatgttcaaatttgacagtatatataccctaatggttaattccctttttgacaacaaaatattcctttaatatagcttgtccaaattaagtagacatatataacaggcacaaatatctatataataataattaaatttaagaatctcttttcgttggaagcaaatgcttttatttgttaacacattatttctcgcggttcatcaaattttgggtccatatttagtactacatttttaatgtgtagaaataaaatattatatataagataaatatgtaatttttctgatagttaattagttttaaaataaaatctcatgcatcttattttaaattttaacataatattagaacctcttctaattctttgtgagcctaaaatgtcgccggtctaaaaaaacagtcttaaaaagaattgtttattgtgatttgttgtgaaaaagacaattccaaactaaaaactttcgctgtctcccctttaaccttcatttagatcctttcgaccaatgtaccaacttctagtgttgggatttttgatctgtttcaaaagctataaatttcttgacttgtacacccacaaatttctcaattatgtcttgttgaattttttcaaatgtcacgtttggttctgtggtcttttaaagatcatttgttatacccacacttttcaagcccaaacgtgaggatagtatatatattagagttagtctcacattgctaatgtatagaaataaaatatcatatataagatgaatgagttactcttcctattaccatttaattttaaaataaaacattatgcatcttatcttaaattctaacaacttaaaaaattatacatatattttttaagtaaaaaatataatatatgttgatactaaatattacccccttttttattaaaaaaagtattaaccccttttagtttatttggtctattatataaatatatctgtgtaggattaattaaatattgtgagatctgtaaataatattgaaataaaaatgatatgtatattagtatgtataattaggatttttcgtctaaaattttatagttttgatcatgaactttttttttttgtttctgaactgtacaaattgttacaaacattcaattttacttacattatgctcatttttaaacgattaatttgctagtgtggttatgcgttacaaatatagttgcagtaccaagttgaactacccaaaatctaatttattaatattaaatgtacaaatattagctctaaaatacatgcattcatatttcataataaataattatatcagattgctattttgattttatcttttgtttggagtactcttaataaactaggcatcgtcacattagtattatatatattagcaaattgtttaaacaaaaatataattgaaactgaaattgaatatttgcaaccattttatagtttaagactttccaaaaaaaaaaaaaaaagttatag

SEQ ID NO: 110545 - DNA, 6220 bp, Cannabis sativa
  modified_base (6154)..(6158): a, c, t, g, unknown or other
gacaatgaaaagtaatctaatatcgatatatattttggcaaatattttctgaagtaaaaattttctatttgtcaaaaatattatatttatgtgaatacaactaaagaatcatgaacgacatctttatttaaattttcaagctaaagactccagatgccctaccaacacaacacacttacatgatcaagtaataacaacaattacaggtacacttcatgttccttcaacttacagcaatttcaatttgctctggaacactctagtttctctctggtccttccagtcccctttgttcatccgcgtgatgttctccgtcccctttctcttccctccttccctccattacccctatctaatcattacaatacatttattgccctctgctctcacctcgggccaacagttgcatttaatggagtattagagaactctaggttctccaccaccatggcctcaaatcttacatttaataaccatcactgtactcaggtgctctcacaagagatcaggaataatcatggttttaggatgctatggatttgggctaggcgaaaataggatcgatttagcatctcccttccttccagaggtcatttcctctaggtattttcttctcctttctttctatataaaggccataactaaggtttatctttatcacacttttacccactatttgccactatcttcttctactttttccatgcaaccagccatgaacaccaaccagaacccagcaaccattctcttcaactcacagccgaagaagccctgatccatgattttgatcatgtttcaatccaccccaaaaaccaacctgattcctactgcctagtggttaagattttgacccccaaaaccccaaaaccggattggattggcaatgctatgaaagatgcttggattgcccgctttcctcttaccttcaccgattatcactctggtctgtttttggttcgttttggctgtgaaggggatgaaagacgtgtcatggaaggccaaccttggcacttcgaccgttccctcatgctttttgccattcttgatggttttgacacctttctcccaaaccaactctgatacatccctctctggctacaagttcatttcatcccttttggcaatagtctcatggcctggctcatttcattgctgataccatcggggatctcattgaagtacaccttgcttctctatatgattccatcacactgttcatgagaattcgtgttcttcttgataccactaaacctttgtttcgtggtatgaacatcaatttcaggaaactttccctcactaaatgggtgaaattccaatgtgaaggtctacaaaactactgctatcactgtggaaagctcgaccataccttcaattggtgtgaaaatttccttcactactgtgatacccatgcccatcccccatcctttagttataaggatgtccttagagcccctgccaaatctttctacaagaaaagtatttttgaactttccaactcaaccccattcgaagaaatctaatcactcaacaatgtcactagccaaagtcttcaagatgccgtggatcaatctttggtccttagtattgctaacactggttaataccacgaccaccatgaacccatcctctccacttccctttaatccctctgaccagctcccctaaacctctccctctcttctagcctcagttttcaactccatcacctgcccaatcaactccagccctataataacttccactgtcctcatctctacctctaaaggtaaagcacccatgtaccctgaatctaccagggtaaactctaaaactcccccagaaccaatccatctcagagcccgtgttgctcatctcaacatttctggttctaaaaggacctacactcgacaaagctctcaagttggtacttcagtgaggaataccctgaagagagcccgatcctcaaactcagacttttttgttgttcaatctgtttttgatactgatgaacagggaaaaatgagtctcttaagttggaatgctcatggattggggattctcgagcattccaaaacctctcccttctggtgcaacaacattgacctcagattctctttgtgatggagactaaactggctgttaatagtagtatcttgtttaaggctaaattgtcttttgataatgtctttgaggtgcctagacaaggcttaggagggggtctgtttcttttttggaatgatgtagtcaatgttcatgttttatctcactctctgtaccacattgactgtaatgttactaatgataataataaaatgtatcatttatcttgctactatggctctccttatgttcacaatcaagaggattcttggatccttttgcatcgtctttttgatgctgccccctcttccccttggattataattggtgattttaatgattaattagctttcaatgataaaagtagccccaatccccctccttcccatgctatgatcaacttacaaaattttatcactaaatttgatttacaccctttccctttgtgggaaatcgtttcacctggaagcatggccaaattcgtaaaagacttgaaggtatagttagtaaagactgggataacctcttcccgatggctaacattgttcaccttcccttctacggctctgatcacagagccatcaaagtggagtgtgatcctaccccttatctatgtcaacatgccaatcgtttttttttaaatcattggcttattgaccctgatttctctcatcttatgacaaagagttggcctaacaatccaaataatagtagccctgagatctccttgcattcttttcttagtctgcataatacttgtcttaacaatcttaaaagttggaaccaatccaaaaataatatccgccaaagaattaagagtatccaaaaccaaatcgaggctattcacagcaactataatttgtcctctgatgacattgccactgccaatcgtctccaatccaccatggatactcttcttttaaaagaggaggttttttggaaacaaaggtccaaggtcaactggctcaattctggggataagaacactaaatactttcataaccccgcttattccagtagaataaacaacaccataaagtctcttaccctggatgatagttcgactattactaccttccctgctatttgtgccacttttgttgacttttacactagtctctttacctctactggggttgacatggcctctatcaacactgtcctgtagggaattactcgatgtattacccctgatcaattttattttcttagcaaggactttgacttctctgaagtcaagtcatctcttttccaactctcgggggataaggcttctggtctcgatggactcaatccccttttttaccaaaagaactggcacattctgggtcactcttttggccatgctgttcttgatgtcctaaacaagggtactagcatttcttccatcaatgagacttaccttgttcttatccctaagaaaagtaatgctaccaaagtccgtgatttcaggcccattagcctttgctcgaccatttacaaggttgtggccaaatcaattgctaataggcttaaaactgtccttacttctctcatttcgcacaacgaaggtgctttccttagcaatcacatcatcgtcgacaatattcttattgctaatgaggttatcaattcaatcaatggtcataagaatggcaaagtgggttgggctgctcttaagctcgatatggagaaagcattcgacaaagttgaatggggtattatcgaacatatccttctccattttggcttcccaagttgttttgtgtctctcattcttaggtgtgttccaccatttcctttaagatctgtatcaactagggtatttcttgccccatcactttttcaaggggaattagacagggggatcccctgtccccttatctttttctcctggttgctgaaggcctatctgctatcattcgctcaaaggagcaggccagtctatttaaagttgtctctatttgtcgttcgaatccttctatctctcacctcctcttcgcggatgatagtctcttatttacccatgttagtcatcgcagtagtcattctatccatgacgttcttaccacctacaataaagccaccggtcaatctatcaattttgctaaatcctctattcttttctcacccaatacctcaccccaggataaaagttcctttctctcctcccttggaatggttgacaaaccttttattgacacctatttaggtgttccacaatatttttctagatccaagaaatcctcttttcattttattctccaaagagccagcagtaaacttagcatctggaattccaagctcttttctaaagcgggcaaagagattctgttaaaagtggtaatccaagcaattccttcatatgtaatgtattattataaaatccttcagtcgatttgtaagcagttggaaaagcttatggctaatctctggtgggggtgctaaaggtcaaaataagtctaaaattcactggaagtcctagcacaatctctggaaatccaaattctttgggggtcttggtctcaggtctataattcatcataatcagactatgcttgccaagcaagcttggagggtctttcagcatccttcttcccttcttgctactctcttaaaggctaaatactttaaacacaatgacttcctccaagcctccttaggtcactctccttccttttcttggagaagtcttatttggggtagaaatcttcttttaaagggccttgtctaaaagattggggatggtaaatccatttctacgcttagcccaaatttgttgccaggttacactaacccctgctataaagatgattcccagcctcctgagaacaatgtctcttattttatcaatgataatggttcttgggatctccacaaactcaactcttattttgataaggatatgattcagtccatcctagccatacctactaatccctcttctaagggctatctcatttggggacatgactcctcgggtattcttacggttaattttgcttaccacctagccaattctcatcattcctccccttcttcctccaaccccaacactctcaaatgctggtggaaatctaactggtcctccaacaccccccctaaaattaaacacttcatttggaaagtattctatcatcttctaccttccaatcttaaccttttctctagaagagcccttgataatccttactgtactctctgtttgaacaaagtggagtccaattctcattctctcctagagtgttccagagcaggtaagttttggaagaacacaagtttttttaacctttacaagaataacaaacactgtgacataaaagaataacttttgagagattttcaaaattttttcaaacatgaactttggactttctatggtattttatgggctatatggaataaccgtaactagacaattttttacagataagaagcctcactatcaagaaatagaaccttttattcattcttatttgcaggaatataatgaagctcaaactaaagttcttccggtcctaaagttttcccaaggcagctcttcaacaaacatcaccattgaatctttccaaccccctctggcttttacaagctcagtgtcgatgcaaccactcaaagcaagaccaacaagcagggttttgaagctgtagtgcaagaccataacgggcaaatcatagcaggtttctactcatccaccgtctcttgtacacaacctatttttgctgaagctgaagctctctcaaaagccttgacctggtgtttagtggtcaagtttccaattgagcttattgttttggattgtcaagtgctcattaacaaaataatccaaaggcagcataacttctctgctcttttcgatagagtttgtcctctttgtctctctttcctaatgcattcatctgtttcattcctgggagcctcaacatcttggcgcataacctcgcacaacaggcattaggaactgatgaagaggtcatctggaacaactgtgtttccttttcttagctcctgctccctctctttgcaacaactttgtattttcaagtatttatgtgaatacaacaaaagaatcattaaaaatgattattattgatgnnnnnttatagtgggttttgaatacccaaaaaagaatgttaagaaaattgcattgaaacattaaagt

SEQ ID NO: 110546 - DNA, 17520 bp, Cannabis sativa
tattttttagaaaaccgtaaaaatgtaaaaaaaacattctttgaatgtaaaaatgtaattattttacaaaaaataataatttatgtaattattcctattttttcgtgttaaattatgcttatatttttaagactcgtgctatttgtgccattttaaaaaacctcaatccatatttactactctaattcttatttatccaatatcctatattaattaaaaaataaaataaaaattaattaacaaacaaaatggagaaattttaaaacaataaaaaaacaaactaaaaagggtcccacaagtcaacaaagaagtaaaccgccaaaaatagccgttggcgccaatttagtcatataacttacaacactaacaactatacactatatatacatattcatatacatatatatatatatataaagcttcgttcttttccggtgaacgacctccgtgatctccaacctctctcgctccttctccaccctccgatcatctccacgatctcggcgctttatcatccaggtttctattccaatcttactctttacagaaaatctaaatttgatatgttttgtttgtaattaggattaggatttgagagaggaatcgtgatttgcgatgattttgtttttttctagggcagaaatgggtgcgatttcaaggcaggtttttcctctttgtgaaagtctctgtttttgttgtcctgaattgcgcgccagatctaggcatcctgttaaacgctataagaagttgatctctgatattttccctcgttctcaggttaattttacctctcttatatcttgtttatctcaagaaaaattgtaattaatgtgtgtgtgtgtatgtatacacatttgagtaattggtgaaaattgatccttttctaatcttactttgcaaaatgattgtttttttttcaattatcttttgtaaaataactattttgataaggtttagggtatacttttgtagtgtgtgtagtgttttaggaatgttatgttgtatattggaaaacattatcccatataagaacacggactactccacgattctcattgtggtatgaagagccatatcctcgatctacacttatctagatagtaatgcttgcacagaatcttcatagtgcaaagtcacttggttttgagatagaacccatagttatagttcttgtcattgtaaataattatttaaagaatgcttattttttacaaaataatattgggaaaatgtttattttgccaaattctcctgtatatttttacttatataattgccaaaaatatttgcaggatgaagaacccaatgaccgtaagattgggaaactatgtgaatatgcctcaaaaaatcctcttcgtattccaaaggtacttaaaagagcaatttaagaaaaggttgtaagttattatatgggttattgatggatttagttaatttgattaaatatttgaactttcagatcacaacttctcttgagcaaaggtgttacagggatttgagaaatgaacaatttcattcagtaaaagtggtcatgtgtatctacaggaagttgttgtatttatgtaaggagcaaatgtgagttcttttgttttatagtataatgtgagtacatacgaatagtgtttttctctttcaccatttgaataacttagaattgaaaaaagaggaatgagttgaggagtggtattagtttgtctatgtattaattattcatttcttataaaatattagttattacattgtggcagatcattgttcgcaagtagcttgcttggtattgtacatattttacttgatcaaacactacatgacgacctacgtattttaggatgcaacacactttttgaatttgtgaataaccaggtgggattagttgtcattatgttctttctttttgagcttgtattgttcattctgaaagttctttttgagtaaatgttgtttttgtgttgtgtagagggatggtacttatatgttcaacttagatggcatgattcctaagctttgtcttttagctcaagaagtggggaaggatgagagggagcaatgtttacgttcggctgggcttcaaaccctttcagcaatggtacttgttagaatttttgcttaatgtaggataggatatgcatgttgcaataagaggtgactattcgtgaggtgactattcgtcatcttcagatcctaataataactttttcgtgcttgcaaattcgatttgtttcttagttttgagactttgacagataaatctattgtaactcaagtacatctcttattgcagctatggttcatgggtgaattctctcacatttcagtagaatttgataatgtaagtgaatttgagtttgttctttttaaacattctaatgcgtacttacattgtcattttgaatagtagctcaaaaattatttttttcactgatctggattataaacatgtcatgtctttccactggaagaactgttcgaaaaatatggaaatgaagagaagaacccttttgtgggttgcatttaatcattgaaatatgtcaatcagtctctctttatcttattaaatatactttcctttttaaatgataatattcatcttgccagagaccttatgtcttttttaactacctcattgcttattttttcataattgtgtcttcttctatgcttctcattaagccttttcttttaatgaaaaactaaaggttgtttcagtagtcttggagaattttggtgatcttcaaaaaaagtcagatgccttaaccagtgataacaaagatttcagcagtgaatgttcagaaggggattcttatacaccagttgccatgacaaggatttcttcctggaggatgatagtgagtgacaaaggcggacttaatgtgtctatgtaattccgctgatcacaacatgtagtatctagttatgcacccctctgcttgagattgtgtatgatatttgtccttgtatttcaataatagggaggatgccaagaatccaagattttggtcaagggtatgcctacataacattgcaaagttagccaaggaagctacaactgtacggcgagttttggactctttgtttcgctactttgacaatggcaatctctggtctccttctagtgggctcgctctttcggtgttactggatatgcagttaataactgaaagtttgggtaagtgatttccttggaagcttagtcagtctcctaatttctcaatttcatagtacagctcatttggcattcttatgaattgcataaacttaacttttgatcaaatttcagggcaaaacacacactttatattgtccatcttgattaaacatcttgatcacaagaatgttcttaaagatcaaaatatccagttggacattgttgatgttgccacctgtcttgctcagcaaacagatgttaaaccctccgtggccataattactgcattaagtgacatgatgagacatctaaggaaaagtatacacttttcactcgatgattctaatttgggtgctgaagttattcaatggaaccaaaaatatcgggcagctgtagacgagtgtcttgtgcagttgatacataaggtgcactctcaccttacaatctttcatgtcttttttaaaatacaatgctgcttgaattgaatcaaaattatacgtagatgacttgccattgttattttggcaggttggagatgtaggtcctgttcttgaccagatggcagtaatgttagaaaacatgtctagtattgttgttatggcaagaaccttggtttctgctgtttaccgaaccgctcagatcgctgcatctattccaaatctttcatatgaagacaaggcatgactaactaactatcaatcccatttgacctctggctgtgtattacatagatttgcaaggttcttcttcctccttttctaactctttttgttttcccaaaattcttttagacatttccggaggcactattccatcaattactagttgctatggtctattcagaccctgagaccagggtgggagcacaccgcatattcgcagttgttcttgtcccgtcttctgtttgccctcgttcttgccctgcaacagcctactccacaaagaaaaatgacattcaaagaacactctcaagaactgtgtctgtgttttcttcttcagcagcacttattaagaaattgaagaaggatcaatgtggcttgcagcaggagaacatgtctcaggagaatagtaaaagcaaaattttcggtgaagatgagaagaagatcaatagttctaccattttcagtagattgaagtcaaggaatccgtcaactagaaccactggagaaaatgaaggcttgaaaacaaatccttcttttctcagcagattaaaatcatcttacagcaaatcttatagcattaaaagacactctgctacaactacaattgacacttcaggaaaagacacggtataaaactatgtatctttgtgtggaaacatctttgatactttcatcattgtcttttctgataatattctcttatgatatgtctgcagacaatgtccttgaaattgagtagtcgccaaatcactctcttgctttcaacaatctgggtgcaatctatctctcctgtaaatacacccgagagctacgaagcaattgctcatactttcactctggtattgctgtatgcccgatcaaaggtatatctttcattcctctatgatgagatttggctgtcaaagactaaacatttgaaaatctttatgatgaataacagaattggaactcaaaattgtctctttattttcttctagttaatgagttatttgcttaaaatccatgtaatacagaattccagctatgagactttaattagaagtttccagcttgcattatccttaaggagcatagctcttgcagaaggaggtaggctacctataaataacatactatgtattttttctgtatttttttacctttaagatttagcatcaaagatatagcaatgctcccatgttctgataaggatttttatgtttccaggtccacggcaaccgtcacgacgcagatccctcttcaccttgtcaacatctatgatcatcttctcatcaaaaatttacaacatcatccctcttgtcccttttgctaaagctgcacttaccgaaaaaacagtatgcaaaacaatactttataaaagtgtttctgcaattcatttcactgtaccattatgtttttctatttgaacttctcatgtgtcaacattggggaatcttcttgagtcatgaatgttactaatcctgctataatactctaacttgaatcaggttgatccatttctaaagttggtagatgattgcaagttacaagctgttcaaggagaatctgaccgagcttacggatcaaagtctgacaatgagtgtgcttcaagctcactttcagtgatagacattacaggaagtcaatcaaaggaatcacttgctaccatgatattgaaagctctggaaaagtcatcagatgtaaccattgcattgtaccctgaacacttgctgtttatcattacaatatggtcagtgattaaacttttaaatttctgatatgcaggaatcatctgcaataaggcagcagttactcagtgactttttgccagacgatatatgcccgctgggatctcagttattcacggagacaccgggacaaatctaccaacgtggattaaaagataacattgttagttactattttacagattttaagtctattgtttttcatcaccattgctatggaaacatttacagagcggtttaatcatgcaggttgagcctcccttgttcacaactgaggaagatgtttcatccaacatgtttggaaatcaaactgactctgaagctaaacaggcctcggaaagtcctaaccttttaagcattgatgagcttttagactcggtgagtaaaattttcatgttcttcatgtttagagttgtatgaacttccaagacttccttaagaaatttcggtatcaaaattagactttcacgaactatctaacacatttctacaatcaaaccctcatcttacatataaagtttatctccaatctggcctatttgattcaaagttgatttttcacatgcaggtattggagacaagacaccaagtagggagagtatcagtctcaaatcctaacgacatgccctacaaggaaattgcaggccaatgcgaagctcttcaaatgggaaagcagaagaagatttccactttcatgactactcaacagaggcaagaaagttcaattagtatttcttatgatttcaacaaggaaagagaagcctcttcttcttctgcttcttcttcttgttccacaatccaatcgggtttgcctatggtactttttccttcacttgttataatcccattaagctcatacactactacacatttgaaactctaactagcaagtaacttactattaactgaaaactgcagggtgggaatccattccttgcctcaaacttgaatgaattatcatactactcatcggttaacaccggtccaacaccatgctcaactgtttaccatcataacttttttcagcttccggcatcaagcccttacgataactttctaaaggctgctggttgttgagacgtggaagccaagttactcattaagctccaataatggaagctctccttcctcctatctttatgaatatcgatatggggaacccgccatttgataccccatacacaccagctctgaccaccattgcagattcatcactcaattcttgtgaggttttcatttgatttgtataatgtaggttagatgtacctcttatcatgctcacctaaggctttatgtgaagttatttgattttgatgtgttgttattattattttatatttgggttttgttttgtatgtattgtattgtattgggttgttaatcccttcaaatgttttggtatatatatacagttgtagagcttaactgtattaacagtttgcttgttaaagctttggtatatatacgactttttctctcgcttcataactcttccctaacttttacttaaactacttcattttgtacttttcttccaatattaattagttttaaataattaaactctctttcaaaatacaatatttgtttaaatgtcaaatagtaattatatatgaatttttattctcatgtttggcaaataaattaataattacatagattaatagcattaactgcattaactgaaaatagtaatattctataattacaaccaattttcataagaaaccataagaattgaagagtgtaattaagatctttcaactacctctaataacttaattacattctttgagagagtagaagaatgaaaatgtacaacagctacaatgtgtcgtttctctctcaaaacgacattattattcttctttcctcactaaaacgacatgtcattttgtactttcctagcccaaaatatcctacattttctccagatattttccttggaagaaagaagaaaaaagaagcaagaatcatcaatacccattatctactaaacttattgaaactataatcaaatcaagttatacaacaattataaccaaatccaaatttttaagatccaataatatacaaagatctcttcacaacccactttccaatttcccatgatcatgggaaagagagtatataagaataaaaaatgctaccataattgtttgggcatggacatgacccaagcaaagtaagcacaaacaatcttttgagaaatataaacataaacagcaaacgacaaactcatcaaagtcaaatctttccaatcacccttttgttttgggctcaaattctctctcaaacactttccaaacttgtcaaacgacatcatcatattcatcttcttctcttctttagcttctttatttgttgttgttgttgttgtaccattgatttgttcttcacgtctattgaggcaacacaccaaaacgacaccactttggtgtagttttgggagttgtcgtttgattggattttgggtgtagaaagatggagtagtcccagctgaaattgcagcaaccatagttactttacttatttattgagaaagaaaattttgattgttttgatgagattaaagttgtggttttttttgtttgacctttgcttatttattgtaatggagaaagttgtggctattggagttgtagtggagtgatttggataaggctttttgtttgtttggttctttgtcgatgtgggacaaatatctagcctactacacaacttatttacttgcacaacttaataaagtatacaaggatttaaaagattttttcttttgagtttagtacttcaaggcaaaatattattattgctataattaaaatttataaattattgttaactaatcacaaatattacctcaagttgatactaaatactaaatactactgatgtctaataactataaaaataaagtgatagctattttaatcaatcatatttatttaaactaaaatatatgatttaaaatataaaagtgttaggatgtagggcaattaaaataaatcatttatttgatgtattcttttaaggctaattagtaatttttccccccgaagtttgacatatacaaaatcatgctccctgaacttttttggccgttaaaaattcctcctaaactattgatattgttaagtttaaggattttttgtctaatttcattcaattttactattttaggtactaaatcatgctccccagactttgatatctaccgaatcatgcccctcagacttttacatgtattaaatcataccccttgaactttcacctatgttggaatttttttactaaaattagataaaaatctttaaatttaacaatcttaatagttcaaggggaatttttaacggccaaaaaagttcaagagacatgattaagtacatgtcaaagttctgagagaaaaattgctaattagccttcttttaatgtcgaaatgtggtggttctacaaatatttcataagtaatatgaatattttttctgcacttaagttttatgtgttcaacatgaatttcattggtatgcatttgatgaaaatgatcaaacttaactctttggtaaatcaaatttaatgagatttgtatctctaagtaaattttattttttaaaattaaaatgatagcattcaaagctatctcgaaacacaaattttactaatgtttaacgaagtaaaagtaggattgtgatgttaaagtaaagttggatagcatgtgtactgcgatggtagcgatgaatcatcttgatatggtggtgtggtttaaacgacatgtttagaattttctgatatgctttatgtggagaagcggttgcctactgcttggctttagaagtagctaaaggcaacagttacaaaatttattattgtggagaacgattctaaggtggttatatgcacttattgggaaggggtctcattgggcgcttgagaactacgcctctttttgtaatagggtctctcccttatttgttagttgtattttctctagtattagtagatcttgtaatttttttggtaaagtgagtgttttacccacaaacattatttatacacatttttcttcaaataaaaaaaatatcactataagatagcgtttcataattgactagcaatcttttatattatttattaaaataaaatatgtgaagttacgtaaggcaacatagttttagaatctctttagtttaagtaagtgcacatttagtttagagcaatttgcggcgaaacccccttatgttttgatttttatacacttaacccccttatctttatttttggtggcaaaacctccttatgttttaatttttatacacttaacccccttatctttttcccattattttctcctcagaatatataccacctaataaaataagaccatttcaaaaatcggaaattagaaggtaggaaaacttaatgacatgtttgaatagctaactaaaatagtgttcaagtcaaattctactggttacatacatacaaacacacacaaaagaaaactagtagttctctcagtcaaagtcaacaacatctagttatattattattagcagaaggaaaaaaaaaacaaacttttcactcctcatcaaagtcttcatcactttcactttcagactcatcaaattcagaatccccagaaggcttctcactttcagagtcactcagcacatatctcatctgcttcctgttagccctcaaaggcctagcttttgcagctgggaatacaacttcagcagaagcagcctcagaagaagaagaagaagatggcttctcaccactcccattggatgcatcctcatactcatcatcaccatcctcttcaacaataccaatattaccaatagtagtccttcccaacaaggaaccactcttcttgttaaatggggattccctcattttcctcactttcttctctggtgaaatccctgaactctcatcagctggcttcaacatatcagtcaacaacttttgtcccagcaactgactactctgtttgctggctgctgctgcaccaccacctctcctctttgctggtgccttggctgctgctttcggttttgctttggctgctgctgcagctcctcctttcttattgccacccttcttattaccaccagatgagcccgaacccgtttccatttcaaagtcatcgtcgtcatcttcatctacctcatcatcaagatcaacaagatcaacatctggaagagctttcttctttgcagcagccctttttggagctgcctttttcggggctggagcaacctctggcgcttctgtaaccaatatgctaagttaggccaaagtatttctatcacaatgctaagcaaagtttaagaagaacatgttacctgctggtttatcaggagatgagtcaagattataggcagcaagtcgatctttcaactcaagtacttcgtcgtcgtcgtcctcactgactaccacctgctcagaagaacacataccatagttagtttgtgtttttctttttcttgttaaggtttgagagaacatgggaaagaaacaagccaagccataccttctttttagcagcagcagccttctttggggctgctctggcttttggtttcgctttctctggaggtttctctgaaatacacaatgataaatattacattagaataacaatgttgaagataaaatggaaattcatgcttgtaactaactaatccagctcaccaatatccattgcagaattaaatgtttcagtgatttgttcaacttcagcattcgtcgccttcttggtgttcttgcgtggggctttcggtgctgctttggaaactttaaaagcagccgctgcccccttctttatttggccttttgcattctttttcagctcctctgctaatgcatcacttttttcaagatcctgaaagtaaacaaaaaaaaaaacagtcagttgaaactccaaatgttggggaatgataacatagtcttgctattttcaagattcatacattcagctcgctctcaagattatcaagatctttagcccacaatgacgttggagttgcttttcgcaattcatcaacctggctgttaagcttatcctgttcggccaacaatgcttgaaccttctctagtgtcaatgttccaattgccatagacagcagatactcataatcaccaatgcgaacttcggtagcagcagcctcagcatcatcctcgttatcatctgttgcatcggttgctccagctacctctggctcaacagccttagttttcttagggaaaggagtaaaacctttctgttgcagctcaatgaagagatcagctctctttcggttgctcacaacaatctcccctttcacaacaccaagaataaaccgaaccttgttctccaatttcaataggtccaactctagattatccaatagaactttctgcattcataaaataaaatgtttatgtaaatagctgcacatcctactaatggataaaaaaactacaggaccagtaaaatacctttctcttcacataaaatgcaagcctaatgtggaaaaattcttcaaggactgcacaagaaacataaaaggaaaacataagtataaaaacattaacggttagccagtgttgacataacatcatcttggaataaatgcttactttgctcaggagtatcatatttctttatcaagccattagcatcaaacaggtgcatgttacttgtgtttaatgaagttgtcaatttaaacttcttcaacaaaccgtcttgcttcgccgccatcatgttctcttcggtcatatgaacaaggatatccacagtactgtgatcactgtgttgtgtaaacccctgaaagcaaacataaaaacaatcagaaactaaagctcttttcaagacatttaaaacagatcataacatgggctaactaacttacttcaataaatggatcctttgccttatcatttccacgagtaacagattccaaaaactccttataatcttgagtccacctacgaactggaagctcagagattctgatagttgtctcattaatttcctctaacaccccactattattgtaacttccatccttggaagacttctcaatagttcccttgaatcctctgtaccatggagccattggaaccatttcctcaccattgatcaagttccttatgtttgcaactatgtctcttgggttataattaggaatgtaagaactccaacctgttccaataccttcacttccattgacaagaacagttggaatgactggcacataccaagtaggctcaatggactgaccatcctcatcaaggtagtcaagaagaatgtcatcgtcctttgggaaaagtgttcttgtgataggagataatttggtaaagatataacgagcactagcatggtcctttcctccctgatagtaaagaaattggcatagtaagtaaaaaataattaaataaagattgaaactttgacaagtgggcagagctcatttaccaagttacgtgtgccaaactgaccatttggttgtaaaagattgatattgttactaccaacataatcctgtgccattccaatgatggtaccggcaagacttgcctcaccatggtggtaggctgaatgttcagatacataaccagaaaactgagcaacctttgcttctttcacaaagttcctcttaaaagaacagaagaggattttcctttgaccaggctttaagccatccaccattgatggaatggacctttgtagatcagccaaagaaaataagataagctccttgtgaacaaagtccctgtacttaatgagcttttccttctggtccaggtgagtaccaggctgaaaatcaacaacaacaataaaaaagattaaaaatttcttcaccatctatggcagccaaagaaaaatatataaagttcccttttcatacctcgaattttctgagccaacattttctctcttctatctttttcttactaaatgcaagctcaattgcctcaccgtctttctcatctacccacatgaaatctttcttgtgcatgtccagattttgaaagtaatcccttccttcctttgatgtgctggttcccaacccctgtaagacataataaagttaagttcataaaaaacgagaaaattatgatggttcataaaattctataattatagaagtgccttactttataagttgaataacacaaaccttatagtattttatggtccacccatttgcatttcccctcaaactttccttccatgcctcgtactcaggcatggtatagaatgctaattcatttccatttttgttagttgcctgtaaaatccaattgcagatcagttagtattcataattccaaaacaggtattccataaactaaacccaaacacagagcactacataaagacaccaaccttcacaataggagtaataaactccaccaagaaagatgggattttcagaagtgatggccagaaagaatggatgaaattaatcaacagacccttgatatgtgaaccatcgtgatcctgttgtaaaaaaacataaaagatcagcaaaaaaaaaatattgaaaagatattatttaaaataagagactcgagaaatctaacctgatcagtcattatcatgagatgaccatatctgagagatttcacgttggcgtattgcttatcttgctgcaacccgagaatccgcttgatgttcttaatttcctcattatcccttacttgggttgcgctagcttcccttacgttgagcaatttacccctcaatggaaaaacaccataatggtctctaccaacaacagagagtccagccatctatttgaacacaagtgagttaaaatgaaatctagttcagttcatattatgaatgaagtaattgatgagaaaaaaattgaacttactgcaagagccttggctgaatctccttcagtcaaaatcaaggtacatttctcagagttccttcctccagcttcattagcatcctccagcttattgatgttgtgaaccctttcggtcttggttccatctgttttcttaagatccttgttctgtttgaagttagcccaggaaagaagactatccacaatgccagactttgccactgaataagaaaagcaaatataaataatatgcacagataaacactggtaacagttactacataaacaaacaaagaacttctcccacaaacctttctttaagaactcaggtggcagttcacatttagacccgaaactacttggacgaatggtaagagtttctttagtttgagagtcaaaagcaggattgtcaataagagcattgacaaaaacccacaaataattcttcacgttgtgggctttcaagttggcattcttgttcttcttatttacaacggtcatgacatggttagtgatctgactcgtgacatgatcaacatgagttccacccttaattgtggcaatcgaatttacaaagctaacctgttttaagaacagaaaaataatcagaatgaaactcactaccttataaaagtacaggacagcatcaaagtactataatttacatagaacttcatatacctgttgaaattgcccatcactgaggctcacacaaacttcccacctatcattcactctctctgtgatcctgtaaaaaaaaggttaagtaaatatcagcatataagaaatcccatgaaaaaaaaaaattgctagttttagtataaatgaaaaagaaccttggaatagtagcatctgatttctgggcagttctcaaatacagatcaacataatctaagaaggatttcacaggaactcggtttccatcaagttccactttgacagaattcccaaggcatccagccatgtcaaaaactctctttttcatcagtgcaaccacatcattttccaaatgagtcatgttaaacttagccaaatctggcttaaatgtcaccttggtccagttatcagtcgccttgcactttgtgattactggatcagatttcttccccatgttgttggtgaaaaccttcaaacaatcacaacaaaaaataccaaattcaaaattaaggaaattagcttaaaactatgctaaacaaaagttcaaaattgaccataaagaaagcttttctgaaactcaaatcatgaaaatgaatttcataaatgacagtttctgctaaaccctaatcaaaaaatgaaatgtaaaagcaaatcatttccaatcttggaaaaccttaaaatcattaacaccaaatcaacatgtatgctaaacactaaattcaaattagctagctcaaaatgaaaacttttgtaaacaaattaatcccaaaccatggtttaactatgctgaacaaaaattcaaaatcaactaaaaactaaagcttttcggaaactcaaatcaataaaatgaatttcagaaatgacaacttctcctaaaccctaatcaagaaatgaaatgtacaagcaaattatttccaaatgaactaaaaatgatgacttttccaaacttcaattcaagaaatagccacaacccatagttaaaagtccatacctgcttgtacttcttctgacgctttccatcagcagtctcaataacaaactcagttgagaaaatattagtgagcttagcaccatacccatttcttccaccagttgttttcttctccttatcatcatagttactactcgtcaacaaatgcccaaatatcatctcaggaacataaacctgctcctcttgatgaatctccacaggaacaccatcaccattgttatacacactaatactgttcatctcaacgtcaatctcaaccttcagactgttcatggaaggatccctctgcttattatcggcagcattaacaagaatctcatcaaagatcttgtacaaaccagggacgtagctaacagatcggctcaccatttcatcattctcgtacacccaaagtgtttgggtgtgcttttcaatggatccgatgtaggtatcgggtcggagaaggatgtgctcgagttgagacttcttctggtacatttcttcgatcgtttttcctcccggcggaggagcaatgttgacattgttgcttgactgaagagggcgtttcttctcgaccaccatggttagggattcgaattgagtcttcaaattactgaaagatccgttcttgagatagagaacgagggtttcagacagagaaaggagatgagagagttgagactttatatagttggagttaacggtcaagtggagatttgaatttgaattttgaacttcaagcgggatgttgtaatcttttgggccttgtttattgggccggcccaactttagacattacagatttgggctataatgtggctgaaaaatttgtggccggccctcaagagtttaatttaggaaaaggaaattttacaaaaatactgaattttaggtaaaagtctacaattttatataataactataaaacaatacaatataacaattaaaataatagtggaacaacaaaaaaacaactgtagaataacagtaaaaacttaacacaatacacagtacaaaacttatatagtatatttgaaggaaaaaatacagtatttttgaaaaaattccgtcccccgtaaaaaagaaaaaagttgcaaatttcagtatgtagtgtaaaaatcccgctaagaaattgaggatatttgtgggtggccctcaaaagttgaatttaggaaaatgaccccttttggttgtgtggtttttttttcaaacttggttgtgtactttttgtttaccaatttaaattttctcagtgtggtttttgcgggtgtaagatctcgtggtatagttacaaattattaaattataaaaatcacatatgtaatttggttttaataaaattttataactcgcaccgcaaacacccttaataataaaactggtaataaaatagtttttttgtagctacagaaaacaactctgtaacttcagaagaaaccagaaaaacaatcactgcagaaaagtaaaaacacacaaggtttttatacgtggtttcaacaatcctttcaga

SEQ ID NO: 110547 - DNA, 921 bp, Cannabis sativa
gggtaaaagtggtggtttggcgctcctttggtctgatactttcaatgtccaggtcaagtcctttacggtttcgcatattgatgctattgtggaaaatgatatggggttcttatggcgtttcactggcttttacgaaagtttggatccaagaggacgaataaaaagtctgaagcttctaaagagactgcaaccgatgtttaatggagcttgggtttgtagaggtgactttaatgaaattactaatcatacagaaaagaagggggcggtcctaaacctgtgtatttgatgcataatttccgtacagtgatctcgaaatgcaagctgcgtgaaatttatactaatggtggggagtttacttgctgcaatgaaagatcaaggaatctggtctttgaaaagctggacacaattctttgcaactcggattggttggataaatttcaagtaaataaagtcactctttcgaatttggtgaaattcagatcatcgtccattattactttcagctcagattgggaatggttgtaaggccatggaaaacagatggggttctcgcttccattttgaataagcttaggccgagaatgaggaatgccaaaagcttataaaagaaatatgggggagtaagttgatgagtagccctttgcgtactctttctcagcttattaacaattgttgtaaggagctccgagtatggagtgttcaacaaaagaagatcttaatgctcgaaccaaggatctcaaggcaaagattgaggtgttgtccaaatcagtttgtcaagatgattggctaacacttcaaaaagtagaacattatcttaattgtgtggaagaaaatagagagatttactaaaaacaaaggagtcttgcactcttgtaacaacacggggatcgaaatgttggaaattattttaccagtatctta

SEQ ID NO: 110548 - DNA, 9056 bp, Cannabis sativa
catatattgaactatataataatagaattcctcaattattcacaattatctaattagggttttgctaatccatttcttaattctagggtattatacttctcatcctgtgataggcatctaggagcatctcacgtggtctgcctccaattgtatctttatcttcatccaaaggtctctattctttccgtgtctcgaatgactagggggcttttgagtcgtggaagagagttatgtcttggaggcaaagctctgagttttcgctgggcttggcctcgtttcaagtctggcttggacttctgcaagtgggaaggcttaagcccattatgggatggtgattaccttccggttacgccacgtgtctcttctctgaaaacacggataacaatggagttttgggatagacaaacataagagtgcggtatttccaaactttgagcaataaaaggcccaatatcaggaattaattccccattcctctgatttccataagtaaagtctagtctaggcaaatctaggtaatttggcccaacatcaattgccacctcattagaattcaaattcccacctttatccacctcagcaacaataccaccttcaacattctatgaattcgtttcccatgatcctcattgtactattgttgttagaattgtccagagtagtggacgcacacccctatcccgtaccaacatccttgctgctcatctcagtagacaccacaccttctttcaccctatttctcttctcttccccaccgttgttcaggtactgatttttctgatcctccaagccttctcttctcctccattttccaatgcgagaagctttgtgattcttccacgaggggatatctgtagagtccactatcagttgggtcacgcctttgcctgccattgagaagcaattactcttccctatatcactcttaatccaagtatcatacatacgaaccacctctctgatcttaggaatcaccatagccatgggagaatggcaaattctatcccagtgagcaaatctaccatagttgaaacacatgttgtagcttcttgtatttaaacctaacccatgaatctggttttttatctgccttaagaaagaaacttgcgaggattgggtgggtcacccacacatcaacccagcatctgatgtaccccccttctcacaagttcttccttcctcttttcctcaaccttaacaaaagagcctactctcttggccacaatgggagcattatcatttgtcaaacatcgagtaggcggtccatggaattgcacccaaaaccttgtgactttgaactcgccaacacgaacttctccctccaccggccacaatttcaggtcaaggagcacaccatttaccagccaagcagaacataagaataatcgtcttcatcatcaaagaaaaaagccatcactccttcaacactttttcattctccaaaagcccaacttgctccaatcacccaagagaatctttttgaccaccgaaggaggcatatctttgcaaccaataaccttcctaacacatgctttgttagccaccacatcctcaagagtgatatcttcaaaaagcttaagcattccatctccatcgcactatctctttgtaggacattgttcatgttttcatatccacatggttatcaacatttttcagggccttgattcgccatagatgagaagcaaaagccacaaggggaacaaaaaaaaactaggggacaccacaagattaccgagaaagataaacaacataaaccaaaaaggcgctaagaaacatgccgaaaaggactatagaaaaatactttaaaacagtccataaaagactagactctactaagagccatatgactttatattagtaataacaaaagttacttgtcaccattgagggagctattaagagagatatagcttaccaaaatggtaagaacatgatgagaggaggacttggctagtgaaactcaagatgaaagaacatactatgtccacttgtacattataattttcactacaatatgtatgattacttatgtcaaaagggaaaaaaattctaattttctatttcggatatcatttcagaaaaaataaacaaacaaataaataaaaatgaaaggataaatttggaatttggcatggcattatcttgccaccaaactccaaactccacacactgttcatattccatactccacagagactgagacaaacaccaatctcaatctgcaaagcaaatcttggaagaaaaagcagcaatggaggtgacactcacaccccaggaactgagccaatacaacggtagggacccctccaagcccatatacgtggctatcaagggtcgcatcttcgacgtcacgacaggaaagtccttctacggccccgaaggttcctactcgatgttcgccgggaaggacgccagcagggctctgggaaagatgagcaagagcgacgaagacatctctccctccatcgacgatctcaccgagaaggagatgggcgttctcaatgattgggagaagaagttcgaagctaagtaccctatcataggtcgtgtcgtgtaattggttcttgaagaaatttcaattccccacaacctatcacctatctatactcccctgtttctaatgctttctttaattaatctctcataaactcataataatatattatgatatcatatgttacctatacatatcatgggattttacttaatctgtttatcttttatcttgataaacatgtatgtgtccaatctgattattgtggatcttgcttctatttctctgcctgacttgataataaatgcatatggtctcatcatgtaaaattatgtttgtttgaatagaatgtgtagttcactcttacttttggggatatgcccatattgatgtgtggaatctctttgaattgaagaacttgaaggggcttaagtttaggctcatccttcttttgcttgcttgttttaactttcgtttatttctagtatattattatatatgtgggataaatatttttcattttcttttctttttcattctttatctcaaggatatgtactacacatgggtatggggtgtatgatttcatttcaaaggtctacaaagtttaaaagctaattttgggaatgtaaaataataaataaaatgcagtgaaaagtgtataaaatataactctccataaaagcaccctttaattattagtagcaactactttcatgattaagtgtgaaataagtaagctgtaccagatgtggaggaaatgctgctgaggacattttaccttgctctttggaattgcaaagctgtaaaagcatatatggaaaaacagaggctttggatggagaagaagtgaagagtttccagcacaatgatgttgtgttgtctctccagagcactcgatagggaagattttgaactgtttggggactgtctcgtcacaaatctggtatgtgcccaagtgcaacaaaactgtgagaaatggtaaaggccctaatgcagttgatttgctgaaatggctctaatggacctgtggagcctaaggagaagtggcaacccccaactaatggctgcaatatgattatatatagatgcaggtgtgtttgctcaaaagaaggctgatgtgggcttgatattacagctagggacagtgggtgcgcgccaaagaggtgtttttgctgaaatcaattaatgctcacttccaaactgtaggcaatttcagaaggactgaagttttctttgattggaattgaatgggagaagagtcactgttgaatcagattgtttcaatgctatgcaaatatgacaatgattggctgctggaacacatcaattctcttctctttagtccttagctcatctagctaaaaatgctttgattttgctattaggaatgggaatccccttgctgcttgtcaagttttggcatttgactagttaagttattttctgtgtaatgacgtttcccccttcggaaaaattaaaaaaaaaagggcacgattattaacctcatcgccttaatgatgtttatcatgtaatttgtaaattcgtagtcacaagtctgctcaaccttcaaagctaaagatttccataaaataaataaatactcattaatattggatatgatatgagattaatcctttatgcttgctaggaacaacctcaactctctagctttcctatggtgctcagcagacatctcagtttctgaatcactcaattctactacatcaacactttgaatacttacattttcttgttgcttcttaagtagtaataatctatgttgcaatctcggcggggaaggacttaataaatcgattatctcattcttgtacttgacatcatcatcaacaacaacactagtagcaggttcaatgtgactttctgattctttatccgaatttgaaatggttggagtaaattcactggagatatgtgttctgttttccaatacatctgtttttgaagcaggaagagaagaaccgatggtgttacttccgaattcattgtccagtaaaagattttggagtttttgatcaatttcagccattgaagaagattcttctccttgtttctttgttcttgctttgcggcgaatttgtttctttctttgagcttttccctctgtaaactctacaatcttctcaggacaagcactatagacaaaccaaaaaaaaaaagagagatttatgtttgattttgaagacaaaagaggagatcatgtcatttcttataatcattaaaaatgttagcaataaatctaatgatgttgaaagttcctaacctctccaagagatctgctggaactacggaagttttaagtccatgttgctcttcccatgaaacctcatagcattcttttccctgaacttttctctgctttatgatcttggacactgggcacttaggtggcagctttaaatggaagaaagatctttagtgacagagccatcaagagggttggctaatatgcagttgatataagaaaagaaatattcaagtgaactcaaatcctatactacactgctacattgtttctaaatttttaccgtaacttaaaaaccagattgtaaggaacatggaatcaaaagacagagaggactgagtttagtaatagtaacaccttatgcaaaggaagtttctctctaagttgcaacgaagctgagcgcaaatcggcataacgccgtaaatctctctctgcaatctttggtaggatatactcatctgaaacaatgatcatgaataagataaaagaaaaataaagagtaaatgactctgtgaaagggaaaaatatctcttgaaaatgttacaaagtataaaccataatttatggtcacaaagaaatttcaagtatgaaacatcaatttccaatttgcaacaccacaacaggttaggaagaattataaaattctctgcaattaaataaaaacccaacctctgtaatctgtatgcatctttctcataactgaagataaactattagcataatgcatgcacgtatttaaggattaaaaaaaaatgtgatatgagaagataaacctgttttctctggaggccacccaaagaactgaccgcatacttgctgaactttgacatgttgaaatggatgttgaacaagaaccctttagaaacaaagtataaatcaagtttacttagatttcatagaataagacaaacagtccataaaattttacattacatacagtgtacttaacaacttaccaaccagccttctgtaatatgctgtagttaaaagaatcttagatgaaatagatgaactatgaaaaggtaaaataacatgcttggggcctttatgttcaaataaaagtcaaaacaccacaaagttcattaatgcagattgatagttaatgataaatctttttaagtaaaaaaacccaaccaacaattacctttgcacggcattagagtctgctgagtggcacttgggatataaataagcgttgatcacctccaaaactgaaaaatcttcaggtgaacaatgcttgcctcctacacaacccaattgagaatgttacccgcaacttcattctcgcaaattataagaaaatctggttattatctcaatggaaaatgacaaacatcctggaaagatacaacagttcatgtgcatatttgcatgtatacataggtacatgtattggtatcagaactaggatctaccattgttattcatctcgttatttaaggagttttcctggttgttcttggaattcttcccttgtttctttgatccttttgccttcttagcaaaggaaagcccttctgatgctattttctggaggacagcattgtctccaatggatttcacaatttgacaagctgattcctaaaaccaagagaaaataatcacaaatttctaattgtatcaactgcagaattagcataggttaaatttaaaagataaaagtaattgaaataaacaggttttgtataacttacacggcccagaccatgtactccatgagaatagtcacttccaagaagtagggccagagaaatctatggatcacaatgaacaaggtcaaggattcccttctacgcttaaaaactccattggggaaaacattttataattcagtacaacacatttagataacaagatgtggagattatacatcataatcagatacgtaataagcatgtatataatgtcatgcgacattaaatattcagatagaaaaatgattggtgtctaatcaaataataatatttgctaaaagaacaagtcacgataggataatcaaatcataattttctaacaagtacagtttctccaaaccaccttcttgtataaagttcatgcagcatttggttaattatatatttaaaattccaacggatcataggatgcatcataatcaagtgaagtaaaataaaatccacacaacccccaaaaacataaaaaagaaaaatccagattggaacatatccacggaaagaaaacaatgctgattagtaaattcacaaggcagctagaagattaccaacgagttccttccaaatccaagttgtctttctatgtctgacatttcgtagcagacaacataaccatctcctatttcaaatgcaaatgattgacacaattattgcacaggcataaacatacactacaagagagcaagttgaggttaaaatactgtttttcgactcaccaaggcagatatctctgtacaccgtccttgcaccaaaaaggaagatatctgaatctaatgtgaaacacccatcctggtggacgcaataattgatttattatatttgtgaacagcattattaaaatgtaatatattacggacgatggttaggatggtatatgtcatatgatggagctctttctaattttgaaatgcagaacttacacataatgattcagagtttaacaacgcacattgtgcttcggcttcctccatcctatatgtaagaacaaaatgatacacgtaataagtatatgtctaagggatccttgaaaagccaacaagaaaataaataagagaaaacaagaaaaggaagaagttcaactttgttcttagtttgttgttaaagaaggtgcatgaaagcaaaatgtcaacaaacttagaaaacatattttgcagaaaatacattttaggagcaaacaacaacaacaactaagaagattaaaattccctcaaaagaaatactaagaagattaaaagttcttctctctttcccattttctccttatttgcaaattgcaaggcggatagaaaaggaaatgagaacttttcttctttctactctaataatataacacgatgccagaaaatattacccatctaagcaagcaatgcctagggccatgcccaagatttttgcctcctttatcatgcatgaaaactcagaacccatattccttcgtagcgaacacactttttctgagtttgtttcattttcatcgatctgcctttaaccaacttgagtcaaaaagaaagaagaaaagcatacaaatatgtccagatgtatctagaatgctaataaaacttgagtttgtgactggattctcacctcagtggttaaatttaagcggcgcctgtaagttgatatcttaatagcaggaatagatccatctatgaaaaaacaaagaacattaccttctaaattgattgagatgacaatataccaaggcaagtaaatctttacaaggacatttgtatcatcaaaattcacaggactatacttactctcttataacatgatattaaagatacttaaggcaacaattccagtagaagtttgcagctttgaaaatccagctgacaaaggtttatgggatatacatggaaacttaatagttcgttcatactcatattttactgaatgccacaacagagtgacacaatcatgataactaacctaatatgcatataattcatcccaatttcgagacctcaaaaaggctaattacaagtggaaaaagaactaaaaaagcatacctgtaacgaatataagggtgcaattcaaagcaatgagagctcgaaggcggtgaaagagtcccttaagataaaccttttccttcaaacaagagtgagatttggtcacattttggagttgaaccatccagcacgagagatctatgcatattgttttgttcctacacaccccaaaatcccggaaaacaaaacatttcaagaaaggaaaaaaaggaaaattacatagatttaaattaaggaaaagagagtgagaaaacccaccttaaatgttggagtgggagagttttcttgcaagaatccaaaacatcccacaggttcttcacgcccatatctatctctgttgcaagttaccacttcgcatttctttctaggagggaaattttatcaagcctataatttaaagaggaaaaagacaaaaatccatttatattttttttttaaaaatccatttataaaattgatataaataaaaaaaatatatattcccctatatattataaggaaatttacatggtatactaacttttgctattttttttataaaaatacagtgaggcgttattttttacttttttactgaatttttttataag

SEQ ID NO: 110549 - DNA, 2370 bp, Cannabis sativa
  modified_base (2330)..(2344): a, c, t, g, unknown or other
tgaaaagacaaagtgttcatcttagattagaaactgagaaaatgggatccacagggggaaatccctcccctttacagcaaggagtgtcgcactcagaacaacaagcacttttagccaaggagtccacaaaagctaaatacgtgcgattaaagtaaaaagtagaaacattagaaaaactgtttaaaagtttagtggcagcagcaaaccacgaaacacacttccaattaggggaaatcccagaagagaaagccttaataaccactattgaatcggagaccaaaacaaaattatcccaaccatttcgcttagcccactgaagcgcacaaagccaagcgaaaactttagtagccacttcatccgtcccagccgaggccttggcttcaaaaaaccaatccgaagtctctcggttctaagccaaaaaaccagcaccgattcgattctccttgaaggaaccatcaacaaaaatcacacagttttccatcgggaccggcttcggataggttgagaactcaaccatatcgacagaggctgagtcaacttcctccgtggcctgactaaactcccaaaatcttttgagtacaagatccatcaaagcttttgagttaacctcctgatcagtatcattgtgccaaatagcattccgcttgcaccaaagggaatctatgataatcgccaagcagagaaggaacctggatctctggtcacggttgaggctggatcccatctcgattacgaaggacttcaaagacatagcagttatcacatgtgttcgaatggaaaccggggatccaaaccaaagcgcagaagcaagagggcattggacaaataaatgcattagagattcctcagactgaaaacaaaagcagcaggtagaagaggacgaaaccatcctgtccccaataggcatagtcctagaaaaagccctccaaaaagcaccatcttcattctcgggtgtaaatcattattccaaatccacttccaaaaaggtacgtggacccaaaccgctcaccctgctgcaccatgtatgcttgtttaacagagaacatgccattattggcctctttccaaacgaggagatcattactaagcttagtcgctaattggatggtactgatcttctttccaacttcgacttcaaagagaaaacagagatagttagaattccatagcctcgttctgtgaattagtaagtctgccaccgtcctcaaacctggagctttgtctcgaatagactccatgagatttctgaactcttcataatttagcaaaggaatccaaggttgataccaaacatcgatcgaagccccggaagctataaccgtacaagatcctttcataatcacatgcctagcattgagaatccctttccacacaaaagaatccgagtttctccttttcacagaccaaaaagattcccgagggaaatattttgctttgaaagcttcagtccaaggtcatgaaatacccgaggcaatacaccaggccagtttggccaaaaaggcatgattggtgtcttccattcttctaaaacccaggcctccagaaaacttaggccgacacagcgagtcccaagatatagtcgccaaaaatctctgtttatccagcctcccactccaccaaaattttctgataatagcatctaactctcgacaagaagtgagagcaagttgataggtggacatcgaatacgaaggaatggctgaagcaatggcttttacagctaccattctccctgcaaaggatagggagcgcattttccacccttccaaacgttgcataagctttgtccttaaaaaatcgaagtccttcttcttctttctcgaaaatacaaaagggttacccaagtatttttcggcttcattgatggtgctaatacccatctccgctttaatattctcccgaagagatttaacacagtttcttgaaaagagaatgtctgatttctgtttactacataattgacccgaccattcctcaaacttcttcaaacatatgccaatgttgctagcttcaaccgtattagctctggcaaaaagtaaagtgtcatcagcaaacattaaatgagaaacagcaggggcatttcttgaaatcttaataccatgaatttctccattttcttgagctctatccaggagtcttgacagaatttcattacaaagcaagaaaagatagggggacatgggatctccttgacgaagacccctctccggcctaatcttcttgagcggtttcccgtttaagagcactgaataagagactgtggttacacactgcataattaagttgacaaagtccacacagaaaccaaaatgtgacagtcagtagtcccnnnnnnnnnnnnnnnaaataccgggtaagctgtgcaatccc

SEQ ID NO: 110550 - DNA, 7195 bp, Cannabis sativa
ttgacatttaaatggttaaattagaaaattagcgtttttaagaaaatgagatgtaaaaatgataaaacagcaaaattacaaaagtggggccaatatcctaagtctaggccgaccacttatgtaggcttttatcatttatttttttattattttaataacacaaaaaataataatttttaatagttaatttctaaataaaaaaattttagtaattaaacagtatcattattaaaaacaattttcgagactatagcaattagagagtaattaaaacttctcaattactttcaattatactactacatacagtgtaattataaaaatatgctaaattatgtaattacttataattattcctaaatccaattacatcataacttttcaagtatacgtgtaaacttaaaaatagttcacttgccttgtaattggcggttcaaataaattgacaagtaaaactaaaactattttaactttagagagtataatataaaatacaagaagaacccatgatttcaccaccaaaagtgagaatatatatatatgtaggaacaataagttatggcctttaccatttacatggttgaaagttcaaagaagacattatgcatagtactccactgtctacaattaggaaatatatatgtctagaaagtaaatactattggtctaaattaattttaaataaaatatgtcaagtttaatacatttatatgcatactccagtgtctacatttatgaataaaaatccataatgcctccaattttgtctttcctctcattatctcagatattgacacgcctactaatattgtaatatagacttataagtaaaaactttactttttctctttatcttttttcactcaaatttaatttttgtaatttcactgtatggaactatggatcatcatgtaatctcattctaatagtattttttttttttttttatttatggaagaaaagtaacattggataacacccaaagatactttcatgaggagcccccaattggagaccagcttgaatatatagtaagtcgcccacaattcctgagcagccagccattgctgcaatcccatttttcaagaaagcatcaattaagaaaatagttgcctctgtatgcactttccatcgtatccaaagagctgatattatcagtctcaggatttctccatgtcggtcataataatattctctaaattaatttgtaaataccacaaaagtatatatttttgtgaaaaaaaaaataataatgagaaatggtaaaagtatgactacataaataaattattttgaaaaataagcttaatgtaactgaatgaaaacatttctagcgatttgaatagtttagactttagagcaatttttgtaataaaaaataatttatagggcaaaactctataaaaattatagttgaggacattgacaaaaattgatatttattgtaaaaaagttaatgtaaagaattaattgagttggaatatacatatgagaagaaagacaaatttggaggagacaagagtagtgaataggcagatatattgttcctgcgtactacattattgccatgaacttagcttcattggatacttcattcattaacattaattatagtattaaatataatgtatgtatgtatgtatatagatccctcatccgaggtacattatgtttctttcatttttataatttttttagaatgtttcatcctcactcactagtcactctagtttcattttcaattatctgtcataatggaattaaacaaatgatgaacttattattcttagaccctttcatgaaaatatcactttccacattggataattatatacaattataataatttaagaacaacttcgtgattacaaggattgattctacaatgtacgtaggaagtcatgatgtttggcggattggtagtcactaataaaactactctacatttgaggaaaaggtatttagaacttctttaatagagtgctagctataaatataatgtatgtgtatatgtatttttttagtttatgtttataaaattgaactctaatattagtgtataatataatctaaatttgatacatgttaaaaattgtattaaatttagcacaaaatgtagtatggacaaaatttacatcacaataaatatcattttttatttactattttgccactcaaacttctaacaaatataaaaaaatatgtgttactaaagaaatttccaatagagagaatgagcttctactactctctgtcttttccctttttttctcctcgtttcaaaatctcccgttcctactttttattgaccgtgctttttgtttcttctttctagtgtggctcttgtgctttttcttctagtttacttattagttctcctgttttcttgttgaggtcctcgttgacatttcctttgttgttgtgtgtttgtacctttgtctttctttgattactatcttttggatctttattccttttgtctggtccatttttggtctgtctttttttgtggggctcggtttgttttgtgatttttgtgcgtgtactggtagctggtacttattatgagtgaagttgttgaactgcctgtaggtaagaggggtagatgcatttcatttaatgtggcatctatttctcttgtccctaatgcctcgactgcccaggttctctctaagttctgtctttttggcaagtttttctcttccagagtctttatggagaagaaagtggaatattttgctctaaactctggaagactcaggtgaaagtcgatgccccattttcttgtcgaacactttctaatatttatagttttggctttaaaaaggtttcagacaatgggtgcttaatcatggaccttggtgcgttaagggagagatgttagtgttgctttcttggtcctctgggttcgatctaaaggatttgtcttttaactcaatccatttttggatccaaatacaccattttctgcatgacttttacttcagggttaatgctaacttactgggtgctcaagcggggaaggttgtgtttattgaactgggtgagtcaaaaccagtttcttgaaacaaatggattagaatccaagttgagattgatgtgaacaatcctttgttctgtgggtgctttatcaaactggttaatggtgagaatagttgggttcaaattaaatatagaagttggaaaatttttgttacctctatggacgcctaggtcaccagagaggggattgttccctggcttctccggtcactattctggatgctcagggtatcccgtttcctctctttggcccttggctcaatatcttatctccgtacccaagatgcatctcaggttgactgtatgtttccaataaagtttcaagagtgacaaatgaaaattggaattgtgagatgtatcgaagggtctgagggtgtcgtctccaacgccggtggaaggtcttcagatctagaatgttgatggtgcttcaggcctttgttctcacagatcaagatttggattggttgaaaacgattgatctttctagttttagggctagaatggtgtggattcctaaggttttgttgaatgagtagggtttctaaaggtggtgttgttttgggtgaatactcgacgaagccatctctgcaagatggaaaggttgcatggattggatttggttgactcggccaaagggttgcatgggttggattttgttgatttggtcaactcgagcccttttatggaattagtaggcttgggaggtgtttgggccatgaggaaatcggtggttttgaattgaatctatctccaaatacatatcttacattcgggtaaggcttgtgggccaactaatggaactttaattcctagaccgaacagtgaaaagagtttaatggagggtagtggcccaacaaaaggaattttaattattgggccaatgaggtgagaagaatttaatgaagggtcaagtaatagtgtagatatgggtctgaatatgtgtggctcgagtaattatttaaagggtcaagatacctctgtgcatctagatgaaaagagaaccctatccaaattttttcaaccctttcaaaaggagagaaagggacaagggtctaggttttgttggctttgagagcatagatttcagtattcacgactcaattccttctcttagtcttaagggcttcaacaacagagtgtggttcaataatgaaggaagtccactaagattggctagtacaaatcttgggtttaaatatgccaactttggcacaagtcaccatggggtgagaaggaaaaggaggtgatggtgagtcctggtgaggaagatgttgcaacatgcaaactaggagaattgctgaaatcaagatcatgtgagttatgaatagatggagatacagggaatgtttccttagtggaggtgttttatggtgagtcaaaatcaggatatgatactctaggagttgtagatgagtctaatggacctaggagacctgtagaattagttgaaacaagtaagtgtaattaggaagtgtgaactggttgttcagggtgatgtattgagaaaagtatgtttgaatgggaattcatgttcattaaaagtgacatattgagagatatacattctcctcgtagagctaaggtatttatagtctttaaaaatatcattgtagcgtaaattgacacatttgagggatctaaaattgaacctctatgattgatatgagagaagatagcgaaaacaagttgtcccaaaagttttcaaattgtagtaatataatttttttatggaatagtacctcaaatggtgactaagactgcagaacagatggaagaaggtgattaacgatatatactaaggtgataaaggcatcgaccaagtattatgatggcatgccaatctacgctaacagcgtgagtcccatatcgattatatgttgatgttcgtgtcagcactctcgctttgtgttgaggaaacgggacacagatgttgaaaaagaattccaaaatcttcgaaaatttttccaaatagaatatactcacccccaatttgatcttaagactttaattaattttagcatcaaatttatttttaacaagatttttaaattaagataaagttgttaaggcttcagacttgtctttaagtgaaaagaactatatgtatctgctataatagtctaagaagtgtatataatatttatagttggtgttagacatgattgggccacaccctaaaggttagtgtgtattaattcaagaagttctgtggctatgctactggaaagagtaaaaggaagagcatgagactttcccatttgacatgcatcacgaaaaggaacttattcattagctagaatttacattggttgaaaccagaacatgttttaggaatctagttgagggtggcctagtcccctatgccgaacctcatttattagattcaaagactcatcgatcacaaattgatttacattattttgtgacattttagactcatgagcataacattaagacacgacattaatagcagcttaaaaagaagatagagaaggtgaggatggtagttgaagttggtagaggccatctctaagagctctttggagtagcactttacctgtggtcttgtccttcacatagcaaaaatcagagtgaaattccatgagtatattattatctgtagtaagctcggatacactaattaagttttcaacaatctaaagtacatgcaatagatcttttaagataagagttttttgagatagagaaggtaaagagaaagttctattataagctattaataacaagttatcatctccaatagtcaatctctccttaccatcgtacggagtggattgagtcaactgattaggatctgcattgtggtggttgttagctcctatctttaaaccaagcctcatgattaataacctatggagtcatgacaaaggtagttggactgttgaatccaaattgaggttaagtatttttcttgtcgcaaggtccacttcccatgaaggattcatcataaaggttatagcacacagctgttgaatggccatagttcccgcaaatttgacaaattgggcgactgccattatttttgattgttctactacccctgccacgagatctattagtacccggataacctccatgacttgcagcatggacattgtaaggttgattctattgttgttttaggggattctactgtgatggagttttttctgcaagattataagatggagctacaacatccttgagcagcttagtgttagcactataagaaatatcacttttaccagcatagttcgttactgcgttgcgtaaaagtaacttttaccagtacatttcgcaaactgcgctggtaaaaaggttaaatttaactagcgcacatttacagtggctaaaatctaacttttaccagcgtatttacacgctggaaaaagttatttttgccggcgctttcattttgtgttggcaatgtaaaagttctaatatcaatattgatttgtcaatctcttttgccaacacatcaaaaataaattttattttaccagcacaaaaatatttctgcttgtaaacattttcatatgcctaacttgttttgctttagctgtttgggcatgtaatatatacttagtgtgatatatctttgaatgaatttttcttaaaaataaaaaataaaagaggatagatcactttcaatacataacaccaaagcatgtggcgagtggcgttggagcacgagcgaatatatgttaatgcgtggtctatttgcagtgcttgtatatactgtatataatactatgtctatatatagaagtggtcataattattgctgttggagttggaccaaatatattctctctatataaaggtgcattattcaaccccaaataatctacattacttttttcaaagtagatctacacttacaatttttaataatcatgcatattgaatattaataaggcattataaattaacaatatatgtaatatttgttaggactggacaacatctaattcaatttaatttgaattattgaattgaacttagattaaatgctaaaaattaaattttaattagattgaatcggttaattattggatgtaaatttcaaaattcaattaaatattgatctaatccaattatattatatatattatatatgttaaaaaattatttatatttatttatataataa

SEQ ID NO: 110551 - DNA, 1664 bp, Cannabis sativa
tatttcgatcatttattcatagtacatatatttgataaattacgcattttataaaggatcatatatgtttcatatcatatctattatatataaaatgtgtctatataacagaattattagttttatgagaaattattgggtgacttttctttttttaatattttctattcaaaagtaacaattttttttggcttggtttaaagtttaatattttttttattaatttatgatattattatatgtatctaaaataaaaagtatgtagatattttaattatatatttaaaaataaaaaatatatatagattaacagattggtcacattatttcacaattataaattattttaaaaaaatactcccaataaataaaattgataacatattgtaacactcacaacagttacgattctacttctttaaaccctaaaactcaaaacaattaggattctttttctcttaatttttctattcttatggagtggtaggtcaattgatcaggtgaaaggtaatggcttaattccttacttcttcatctaattagagctatatgagataattattttgatattttgaatcaatttgataatattatttttaaagcaatcaatttgataatgtttatttttagctattttcagtttgagataataaaatgttgataatattgattagcaaagcaaggagttggatttgtcgttccttctcaataagttcgatgaataacaaaccacaccacccccaatgaataacatcaagatatatttgtacaaggagtgtttgttgactgagtggttgggatttcaaaatgtgatagcgacagttgaggcattggacaatcaataaaagcggttgtggcaccggccgaagatggaggcttagaagtaaacaaaagatttgacacttaaggtgtgtggagaagaagttgaaaaaacaccggcaaattaagaagaataaagtaaaaaagatcattctattactttcacctatacgagttctatatctttgtttttttttatgttggtttgaggagtcacaagtgtactccaattgtcaaaccactaatgaaacaaaatcacggatagaagaaacccaaactttaaaatcaggttagacttttttattattattattgatatgagttttatcactttatttattgttatctaatttgtataaattgtattggtattacaaatatacaatactttaaattgtattggtactacagaaatacattaccttttttttttgaagaaatacattacctaaaacagaaatacattacctaaaataaaaactaaatatacaataccttaaattttattttcacatttatttagtatgagttcttagttcttccaattatactttacaatgttctgcattcgaaaattgatttgttcaaggagaggagatatcaaaatgacgccctattttggtcatatttcgaagcttcaaaacatgaattcaatgttcaagctcaacaatagtcaacaatagtccacaatatgtagcttgttaaactttcttttctagaaaattcaattggctcagtaacaagtgataaagttgtttaggattttaaaaaatttctccacgataaaatatgagcaatgtttagtatcttgcctgttaattctatttttggcatatttaattgac

SEQ ID NO: 110552 - DNA, 7521 bp, Cannabis sativa
ataaaagataacaagcgttaaaatgctccaaacacgatttaaaaccaattaaaaatatactaaatttagtctaaaattaatactaaaaataacctaacaactgttaacctcttctccaatcatgcatatgcaatgaattcagcataattaaatcgatcagggccttttctctatcttttttttttctctctctctcccctctctttctctctctaattgatagttacttagttcctgctgatcgtcattgtcttctccttctgttacttcagtttcatctggaacaacattagttggtgctgtaggagcaaccaactccaacttaatctagaaattctcatttgatacaagatcactgtctttagaagtgattttggttttcatggccatttcatcttacttgaaaataacatctctactaataatgcacttcttgaatccaagttttaagaaccacactctatatcccttaaccctttcagggtagcctagaaacattcatctgaaagctctaggctgcaacttatatcttgtctaacatgcactacatgcacaaatgcagtacatccgaacactttcaagtgatctaagtttgggggtttaccggtccatagctcttgcggggtcttgaagttgtttggcacaaatggtgatctgttgattaggcatattttttttaaggcttcttgttgaaacttattttacaagaatcttaatttactaatcatgtatgttgattatgcaactataatctatcatcctaaatacgaataatcctaaaacaataaataaacatgtaaagtataagaaaccttgtattgattgcaacagaatataatgtctctttccattcagtactctgttgtagagtaacaacaagtactaaacttggattctctttccttaacccgaaaaatgacagttcttcatagtcttccacaaaggtctgagtatcaccttgaatagtgtggactgatactcaactcacctttgaacacattttgaaagagaaatagacatagtgattttcaaaaatagcagaaagagaagaagaagaagagagctttcttgtcagatctagaataattaggttagaataacattaccaaactctctctcatcacttcctttatatagccatcacttagggctaggtttagatgagatgggcttaaaatagaaaacttggccttaaattcactataaggtcgaattccacttaaacgttatagagttatatttttgctactttatttcaattaatgtatgtatataaaattaaatttcccttcctattttacgaattatctcatctaattatttaaatatcaattttaattttttttatcttgaaatatcaacttcatgaagtatagcattccaagtacaaaatagtactaagttcatcaggaacattatgctagaaaatgctacgataagagtactatcaagaattcctagcaataaaatgtgcagctcgatctgttgatcgtcttacaaaagataatctaacattaaacatagaagaaagtaaaatgcgataatgatgaataattaaactaaaattggaactcatcacttaatcactacgaatagcttgaataaagagtaagctatctgattcaataacaaccaattaacaaataaactcttatttctcttttcttctcaaaattgcccaaatttagtaaaaattctcaaataagacctattttcgaattttaattgatttattaaatatatcaattaattgagtctacaaaatgatgttatctcagacaatgtgagaaccgatctagacaatgtaaaggaggccattgctgaaattgtggcggatgaagtgaagcaagccgtcaaaattgacaaacattagatggaagaatgggtgaggaagaattcagaaccgctcaggagcttgaagaccgtttctttgccatctacttaaacatttttttaaacgtacaattttttttcttcttgctttgaatttacttttatttgttttatttattttaatttgttaaagacataaaacaacaataatttattttttctttgtttgaacaaataataatttattttattttgttgttagtcatgtgaaaaaattaataaatgttaaattatttaatattaaaaagtaacaaattcaaaataattgatccaatttgcatttttagggagtggattagattttgagttactatgtgtaattgattggatccaaattatgaaattggcacttaatgcaaatcgaataatgcactataagcaaaataatacaaattaatttgatcagataaacacccttaaaactacacaattattaatatttctcgtcaattattaattataaaaataaagtaggtttagtacagagtcatcgaccaagatacaatctgtactaacataatcatgcatttattattggtgcgactcacttctttttaattattggtgcaaacaatgggttgaaatttagattgatgatgatatatatatatatatttttcttgctgtgtgatgatgatatatatgtatattgaataatagattgatgatgatattattattattattattgaagtgatgacattttctttaaatgcaaatgatattattatgtacatttttttgtttttttgtcctagttagttggaactgtatgcagttgaaaagtgactcgcaacatacatgattatgttagtacatattgtactatcatattcataccttagtacagatgttaaacgtatgccacaaaactaagaagataaataacaataacaatcatatttactgaaaataattagttttcttttatataaattatgaattcttactggaaataatgaaaaaaaaaaaatgtatgggccaggagaactacagctgacatcgttcccttccatgacaaagaaaatgaaaaagaaataaacaaagtgcattatatggcgagtgaagccaaaaaaatatatataatgattaatatgatgatatataatatatatatatatgtattacatgaatgatatttatcaaacttatgaagttgttatatgtaatgattgatgcaaagatcggagaggacaaccttattgtccatcatgtttgtcacttcccagttccaacgactccatcaaacattcaaactcttaatttaacaattcacttgagatttactcataaaatagttttgagacattaaactaagaataaaaataaatgcccaaactcatgtgcagctggcctggcatatttgaccaagtttaggatttggcttataaatcttccaagatccaaaacattatgtactgatgagagtgtcaccctctcacaataaagaccctcttttatccgattcaattcaacagttgcaaagatttcaatttcaatcaccgacttaatagcaaatattggtaagatcaccacacttttatttactttttctattttttttttttaaatgaagctttttgcgattatcaaaataccattgtgaatatcctatgtggggttcttgtttatcctcgtaactgcatattctttggtttgtttcctttgtaccatttcattgcttaattattctttctgactactctgtatgatagatatggatgtctgattttccgtagcccttgagatatttatatatgattccgtgtaatggtgttgaaatgtgatcaattaaatgaataagcttatatttcttatatccctttttaatgggccattcgttgctagagcagggctatgttgtttaacttaatcctcaaggtcggtttgtactacaatctgactatggaaatttttaaaaaagcatatatttgaacaacctgtaaatgatagaaaatgaattggcaaatggtttgaatttgatcatcttctcttctataataacaaaactatccatgaaaaatatcatcatataagtttctttcttatgaaaaatacgagtcatatgactatgacaccactcattgacacaactttgtttcaaggttcctggttttaaagaatcttgtccatcttagcaacacactaatattctgtggtgttgtccttgaagtcttcagatggaagtacaaaatcatccacatgggcagattattgagatcagaggtgatatttcttatggagaggagggtagcagaggaggagggagtactaaaatttgtggggaagtttcctgtggattatctgatgttggatcaaactcgaaagatgctaaagaacgatcagcagcaatgcgaaagctcctaatagcagtggcactttgtctagtgttcatgagtgtggaagttgttggtggcatcaaagcaaacagtttagctatattgactgatgcagctcatttgctctcagatgttgctgcttttgccatctccttattttctctgtgggcttctagctggaacgccaatccccgccagtcttatgggtttttcagggttgaaattcttggtgcactcatttccatccagctcatatggctgcttgcaggtatactggtgtatgaagccattgttaggattgttcataagactggtgaagtagatggttttcttatgtttgttgtggctgcatttggcctattagttaacatagtcatggctgtattgttgggacatgatcatgggcatggacatggtgagcatgatcatggttttggccattctcatactcatgaacatgaacataaacatgaggagcactcaaaacatgatcatgatcatgatcataaagatcatccacacaatcatgattctgaagatcctgctgagtcgctattggataaacccgaaggtggtcatcaaaagaagcagaggaacataaatgtacaaggagcatatctccatgtacttggggattccatccaaagtataggagtaatgattggtggtggaattatatggtataagccccaatgggtgatagttgatttgatttgcacactcatattttcggtcattgttttggggacaacattcaggatgctgcgaaacatactcgaagtcctgatggagagcacaccaagagaaattgatgctactaaacttgaaaaagggctattggagatggaggatgttgtggccatccatgagctacatatatgggccataacagtgggaaaaatccttctggcttgccatgtcaagatcagaccagaagcaaatgcagacatggtgctgagtaatgtagtagaatattttaaaagggagtataacatcactcatgtcaccattcaaattgagcgctagttggttttttaaaggggaagataagaaatgtgaagatgtgactagaaaggtgtgtgaagttgtaatgtacgtattatttttggtcagtagattgctggtactgtttctgtaaagatttgcatattgagtgtactgtactttgatatgaatctatagacacagctttgatctatagctcttcacagatgcctgaactatgtttacaagtgtttttccccactaacaactttcttttttggtactaaatatgacaaagaacaaaagattaaacagttttggctaaattaagggtcttcaaggtggggtaaggagctcaatactttgtaaactcattcttatacttgagactattgttcgtacacccaacaagaggaattttctgaaggtggaattattgggaattctttttgttggtatggtatggagacatctacaggtctgtgaaaagctcagaacagttggcagagattcagtcatggattccataccaccatgtcatgtctctatcgtatgtcataccaattaatatgaaattttttatatataagcatgtcaatggtttaatcatatggggcatctgattctctgcctatgattcaatataaaaacatacaagtaaaacaaaatccagtaattcatactcttctagataattcaaattagtatgcataaaataactagtacccaaagtatgcttggttcccaattagtgactctctttaattgtttgtttcattatgctcattttattctctcatagtaatgtagttaataatattgtgactttaattactttgcctcatcaattaacttatgttgttttttgtattggagactttgctttagctttattcatagttctattacaagcagtactataaagtaaccaatatattctccaatttcctgtgttattgttttgttagtttagcctttttggatgatcatctcaaagttttaggttctgtttgaaacatgatcttcttacttggtgagttgtaaccagtgaattaaggcattgctactttccaagtagggtgctaactcatttaactcttgcataataaacctatttggccccaaaatttagtttgttcatgttatagtacaaatgtttctctctttgcatgttggagaaataacaagatttctcatgtcaactgatatgaattggaattagtactataaatgttgaagaggaagtactaaaatttgtgaggaaatcgcttgtggattgtgtgatattgctaaatcaccctccaaaggtggtgaggaatgatcagattcgatgccaaagctattaatggcagtggcattttgtgtatagtcatcataatcagagccaacagttcagtaatacacactgatgcaactcattgggcctcagagatatctacaccaagaatttcaacatctttgagacccaatgagttgcatcagtgagttatgagtattactgaactgttggctctgattatgataactacacaaaatgccactgccattcataactttgcaatagaatctgaccattccttatatagatatggttggtttgcaggggatcagggatgttggtgaatggagccaacaacctcattcacaagaccagtgaagaaaatggtttctaactgatcaacggccaatattcgacctctaggtctacatgatccaatggttaggaaggaacaatctcaacgttgcgaggatgtcaaatgccaaaaaatatagggatgttggtgcattataaaactttttctataataggcattttaggtccaaattttacatttttattttattaagataaattaaacaaaaaagaaaatacaaaactttttttaaaaaaaatacggacggactaaacaatccgcatatacacgttgcccactacctctaaatgaccccacttaacactaacatatatagactctactgtcacctatttctatccataatataacgtagaaaccagtggtcatcattcctcatatggattcaatagatatgtagctagtatgaaggtccattctcatatttattaatattgtatacattttgttattatttaacgaataattgaaaaaagtttaaaaataactaaacataaatcacaattttttttaaaaaaaaataaaaagttattttcatattgttattaattaagttttttttatgttgtttttgtaataatttatattcaactttaaaatatttgataaaataaaattattaatttctatgttgttgtatagtttattac

SEQ ID NO: 110553 - DNA, 6110 bp, Cannabis sativa
aaaatgaaaaaggagaaacaaagtaatctcattggtcggtaaactgaccgaaactaataaatgaaagtaacaacaataaattgtgactagttaatcatgtaaatgattttaaaaaacacgtcctgagccataattttctctattatcttcgtgaattaatatttggaaatcggtacaataaaatttgcgtaccaaatgagtaataacactacctaaattggtgttgcaagtttaatcttttctgttaaccacaatctattctaattctaatgtcgatttcctaaaaagaattataaaggaaaaaaacaaccatgccaagaccactaccctactaaattttctatgcaacactattgaaagaatcaatgggaggagtaagcatttcaaacaaagtctggggcaaacatatttttgttatacgattttcatgccactgtcgatggatttttaagttatattagtacaatcaatatacaaccgcaggacctatctcacggaaaacctttgagttattctttacaaattggacccaaaagacttaaatagaaaaatatgttatgagtagaaaaaagaattataagaaagccatacaaattctactgaccgcagagccgaagaataaagttctgacatttggtcattctatgagtcaagattttcgtgcgttcctgatttggagaaaataaggataaagaggcatcattagtcatatttacgaataagatgaaatggcatattaaaagaaaaagaaagaatattatttaccatcataagttcaagtgtgaaattaaaaatttacctagcagaaagagagcgggtcatagaaacagcagctctgggagcactactgagccgccttgttcgctgctcgtgttcattgccagtgcgactggctgcgacttctttttccatggcagctacttccctcctcattttcttggcctcaacttcccttgctttgttcaacgtgtcaacttgctttgctaacatctacatgatttcacatcagattaaaaatcaaataaaagggtgtacccctaggctaaaatattatataaaattatgatatctaacctcaattgcatcatctttgtccttgagtgtctgatccttttcattgcatgcctttctcaaagttacaacctctttctgtaacatatcgtataacactcctgaaatgtaatcttcgtgttctgttctcgaattaacaataggcgtggtggtatttgcgctatcgtcttgtctaccattcatctcaatcatttcagtgcgatcactggcattagaaggtgtattatctttcaaagtcatctctggggttagcttgtctctttctagtgacctaccaccatcaaatgaatttgatgaaatcttggcactctttagaagcgcagtagcactactgggacgctgggctcctacttgtgagtttgaaattcttttagagagatatccattggaggaatatctagaaaagttctcagctcctccaagagactggcgtcttgaacgaccattactgacgcttcttgcgtctaaggctgctgagcgagaacctccattagatgctttaagcctctcctccaaaaccttgaagcgcatttggtacttatcctgtgtaatcaaaccacaattagttaaaaacattgcacagaagataacataagccacgaaacacaaccacaaacctcacctttagttgtgcttctgcctttgctgtgcgctctgccactgccaacttatctcgaagctgttgcatttctccctacaaaaggatgatagggggaaccaaaaatgtctcagatgatgcaaacataaatttctataaagttagttacattcttcccctttccaacaaaacagaatattccttgggtcatgggcactgaaagaagtacaagctttgtttagaagttactctgtcaatcactttgctacaaaatttatagtatatatattgcttgtaatagtttgtaagtagcattgcacacactccacgatccaaatattgttttttccttgggaattcgtttcagaagaaaacttagaaaacatattaaagacattttaaaatacctgaaaaaactttctttcttcaagccattgcttaacaggcatcactttgtcgttcccatctttccactcatttgcaactacagtcgccacacgatttgcagaaactttggcacgggccacctctcgttccaaagtttttatctcctcctaaataagtttgtgtcagaagcaagttgcattggtatacacaattggaaataactactaagaaattctgaaatattagaggtttatgtagtagcaaatacattcatctcctgcactttacgttggtaatcacgcacagcattggcagcagctccaccagccaaaacagcctcttcaagctcacgaactgtttgagttagcttttcaacctcagcaaccttttgcctatgcattttgtcaatgattttgttctcttcctatatatgagcaaaacatgccatcataaatatagaaaagtacttttatttatattttaaatgttgacagaaaattgtcattccatagagaaacctggcatatttctatctgcttcataagttcttggtttttgttttgcagatcatcaaccaaggatgcttttgccaaagctatctgaactgttctctcagcctctagcagagcagcctcctttgattttgttagccgatcaagtgctctattgtcatcctgcaactttgttacctggaaatggaagaacattcgatgtgaaaaagcacttgtcttgtgacccaaaaacggttgtaagagaatataaaatcttgagtgcagagaaacgaaaaaaactgggtaggaatggattttgtaatacttgtactttctagaatgttgattattcaggccaattagcaaaaaagcttatcaattgataaatgaataaatataggtttatggaaagaaagaaaaataccaatatatatagaatgaaaaatagtttaagtacaacattatgaacaccagaaacgtaaaccacaatatcctcaagagagaattttacctcctgcctagcaagcttaagctctgcctccagtggagcgataatggcctcaatgggaggcatttcatcatccttctgtgcagcatggactcttcgcagagtggcttctgcagcaaattgagcagctaaagcagctttcttctcgtcattgattttcttaatttcaaggttctgcaatcatgatgcattaatcatatgatttctttctctttatttcttgacatcaatatatttgattaaaaaatgaccaaaaatgataccttgctctccaaaagagcttcagtggcttttagtttttcgtccagtttgtttagctcatctgtcaactgaaagttttaccaacaaactataaggagtcctcatatatgtggacaaaagagcaaagtactataatcatgaagtactatttaacaaattacaattgtatacaacataattaaaactttgtaacaaatatgttgtaacataattacaattgtatacaacataattaaagctttaagtagaatggctacaaacataggaacttttcttatcaaaaactgtaggagcttcgccgtatgtcaagacttctaaaaactaatagcacaactgcacaggtatttgtagatacagaaggtaaatttacagtatcgaaaataaggtcgaaaaagtttacagtgcgtatttttttttataagcgtggaattgactatttcaaactctgctttcattactataaattatttaaaaaaatttcaaaaactggtgggatgcctgctttaactattatctacacagtcatataaaaatataaggttgtaatttttttctaagtactgaaaagaaaacatatgcataggacacttcttttcttcatttcagaacatttggtgtcacttcaacttaatgaagatagcactaggagtgcacttacccttttactaccaataaaagaattgttgctaaaattttagggtgtaaaaactcaagtaattttaaacacttattttggcacttcactctacattcattggcttaaatcagtacactatgcacatagccataaacacactctaaattacgtgaacgaaaaatatgatgtcaaaacataatacctcttcaactgccttttgtttaaggcgttctgagttccttagtgatttgatttccgcaagcgcctctcccaattccctatctttatctgttatctcaaaagaagaaatcatcgtcaaatcccacaactattatatcatccattacaaaaataaagaacaaaaacaattctttcctttgaccagagaggtatcagaaacagttacttcaccataactgttttatttcaggcaaaaaatagtcacctccataatgtaacccaccacagccattcccaaaagacagaaaataaagacagtattactacgagcacacaatgattcatgaataattgctatttctcgaattatcagcattaccacgtaaaagaaaatccaaaggctaccctaaatatgtgcaagaatcagttgtttctaacaacaaactccctaaaaataaacaaattcataatatatagttgatgagtaaagctcattctttgtaaatcaacattagaaaccaaacttctaccataatcaagttagagagaaattttgttgccaaacgcaaaacaccttaaattattatagaacatcaacaaccatcttaatttctcaactctctctctctcacaaaacccagaatccacccgaacccccaacccccacccataaaagaaccgggtgtgcgcgccctttttcagtcagcgtggatactttatgagaattgggtttccaaatttttgctacctcagttgcagatacaatgcaatacacaaactccataatatacttgattatcatataacttttcgttcgcattacccaacagccaatttgtaaatctcaaacaattaccaccaaaaaaaaaatcttcatagattctatacacaaattagaccaatattcaactaaatttaaaaatatatatgcaaaataaaatcaataaatcgaagaatatactaaaaatggataccatagacacggcattgccgctcaagcagcaatcaaaggtcccaaattttacacgagcaacatttttccggataaaaaataaaataaaatgaaaattgacaacagtaaaaggctaagagaaacctaacctcgaacttcattctcgaggcggctaagctcaacccgaagcggatcggagccgtgaaagaaagtgacgaggtcatcggcctcggcgccggccgctcctgctcggctaccggccgcggtggcctgaggcttcttgcgagccttgaaagaagccgatgagctaaaggccggcttggacgtctccggttcgccgttgattatgtgcgtcccggtggccattggagaagatccaatggttcccccaagttcatacaaagttttagagagagaaagagaggaacactttactggaagagagagaaagagtttaaacttgtgtattcatatatatattatatatttatatataagaatttgattaagtgattgagaatggggtttaggcggggggtttaaatgagtgtgtgaggtagattatgattaagtaatctattactacttactaataactataggttaaattacgaaactaccctttattttttatttcattaaataactctgtattcatttttgttatataactattttacctaatactttcttcccaaaaaacaaaatttaagaagaagacaattttgtggctaatattttgtgctccaacacatatttttaagtttcttcatgaataagtacaaccaaatctttttaaagttattaaaaacaccgtacaataatagacaaataggacccttatagacaatgttaattaaataacttcggacacaaacttgtaaggctagaaaatgacaatttcatttatgaaaaaaatgacaatttttagtaactttgaaatttgaatatgtaattttttaatttaaacaataatgagtatataatttgtaaataatatttgcaaatataatttttattctatt

SEQ ID NO: 110554 - DNA, 7090 bp, Cannabis sativa
tgtttttggggttaaatttaacagaatattcttttatttgtaaagcatattctgttaaaccaagaattgtcgttagatagacacttttaatatataaagatacatttctatattagcaaaaaaatattatatatttgtttaactaaattaaataaattaaattaaattatgtatacataaaaatagcaaagttagttttattatgatgtaaaagttaaaagtaaaaaaataaaataaaattaatgatatcttttgaagaataaagtaaaacatgattgcaggtcttctttaaacttgacatataggaagggattagtagtgctagtcaccacaatagtacaaggtattatattgtaagtaatctaattatatattgtgttttacgttgtgaaattttttaactattttatgaagtaacactttatgattatgcaactttatgattatgcaagatatcactggttcctattaatatcgatatttttaagaagaaaaattaagatttattcaattcaaatttcaacatgtattaaattgtgtattcaaaacttttcatgttgttaaaagtttttccaaactatcgaaattgatagatttaaagacttatatataaatttattcaattttactaacaaatgtctaatataatgattatttatgtatcaaaccgtatctcttaaacctccattcatgtcaagctgccgttagtaaaattaaaaaaaagtttagggtgacatatcctaattagcctaaagcaagaatgaggctaaccaatgaccaccatccatcattagaatcattacttaagagcattttcaaaggagttgcgtagtcttgccacatatgtaatgtagtacaatttcaagaataattttatgtgaagtgttgttcaatataaaaaataaatacatgactttttttcttttttttaaaattttttttttattaagaataagttttttttaattgaaaaattattaattcggccaagataaacaatgtgtatattttggcaagtataagtgttctctctattaaacatgctcaaaggagcaacaacaacaagggtatatatgataaaaaaaaaaaaaggtaaagagaaagggcaaataggtaagtaaataaattactgttgtcaaaaaggaaacaattacaattacgaagggctggaatttgggatataataataggattccttggcatatgagagcgttcacacatgagatgagatgatattgataataaagctaataaatttgacacccatttcttccatattttctccctactcgctgtttacttaccttttcctaccccaatccttctctccatcactgcttttcttcctcacttctatgctattcgattccttccttctctcatctcatcatctttctccagtatgattctctcactttccttttctactttgttttaatattctctgaaatttgatcgccatggtcgtcttcatcttttttgttttaataatttaatttttgtggggctttaggttttaggtgcggtctgtgtggaatgaagatcgaggaattggatgacgtggattctgatcggaacgacagcgtttacgaaacgcagattgtgaaggtcgacgccaagagagctcttgtcggagctggggctcggatccttttttacccgacccttttgtataatgtgcttcggaacaagatggagtctgaattcagatggtgggacgaaatagaccaggttttttttttctttcccttttaattattatatgtatggttttgagcctattctatgagcactgcttgatccttttttctgttttggttgctgagaaagttgataccaaaatatcaatcaagtaaacaagattgagttgttgtatggatttaattgttttaagtttaaaccgcaattaagaatgaccctattgactgtttttctgctattgtactcggttctgtgagagcagagaattggggtaatgcaaattacaacttttgattgaaggcctctgttcaatctgttttcttatgttatgtttttgggtaaagattgaagctttttggtttccagtacaccccagtaaccaaattgtgcgtcctatgattagctggcgatcaaatgcgtctttagctgttcttttgggcggttttatcatactctatttttttttatttgtctacggtgtttgtgattttggttcgtgtgtgaatactgaatggttatgttttgtttttcttcagtttcttttgcttggtgccgttccattccctaaagatgttccacggctgaagcggcttggtgttggtggtgtaatcactctcaatgaaccttatgaaacattggttccctcgtcgttatatcttgtgagtcaacactgcatatgatcattattgctatttgtttataattttaaaacttgcttccgcaattggacacctgatggatgatgtaatgggaagtgtcaagaataagtaaacggagaaatgtgatgagtcactttttggtttactgttttctcatcaaaatgtgtccgaatttcttttactcaaattgataaactcaccatttaattattgtttaaaaattatataggtttgattctcacgtgtttttgggtattcatgctcttgtatgtgatatcattgtttgttaatattttgaattggtcaggattggtcccaaatttgaataggcatcttttccattttcttaactgggaaacaaatttatcagaaaaaagaatccaaggattgaactttctgtactatttcatgtaaacaaaagtttgagaacattataatcttagtgtgtttcctattcactatattttgatgattttcacttttcaggcccacgggattgaccatcttttaattcctactagagattacctttttgctccttcgctagttgatattagccgagctgtggagttcattcacagtaagtgattaactatgctctcttagtgtgatgatgtaagttgcttaaacttaatgtttctaagtctatattttggatcagaaaatgcatcttctggtagaactacttatgtccattgtaaagctggtcgtggtaggagcactacaattgttctttgctatttggtaatatgctatcctttgcattgatggttattgatctgctattagactaatgctttgttgggctagacattgttaatggtcttcaccgtacacatttgacttacctctgcaggtggagtacaaaagtatgacaccagctgctgcacttgattatgtacggtctagaaggcctcgtgttcttttagcccccactcagtggaaggtatatctctctaacttattttaattatttcattaacttatcattgacttcataggctatcgtgagtattgctcttagatgtgctatatgtaagaacattaagcttacaaactacataatagtttcatttttgcttcaaataatgtcaataaacaggctgttcaagaatttagcagacgaagaccagctacggctgcatactctccctcaggagatgccgttcttatcacaaaagcagaccttgaagggtatcatggtgctgctgagaatgctagtaagcaacttgatatggttcataaagtggtgaggaccagtccaatgatagcaagattgtcatgcctatttgcttctttgaaagtatctggtagttgcggaacagtttctaggcgcttacctgtaccggagccacgtgcttgctgaaaaaccctcatgccctccaactaatcggttgcttgtacagaagagcattgtgaaaaataaggctacaaaaagctaaggtttcaatgcacattcggtagctttgtgtatgggaagagaaagataagtgaatgaaaaaataaaagaacaaaaagaaaaaaaaaaccaagcggaagtcttgaaggtttgtgtataacaatgttttgaatctttgatgactgagaaatatgaatgaatattctcagttccgctttgtacatgaaacttgcaccaattttccgacaccccataatcatttctttttagtattgaaaatctacaatagggtaggactaatagtatatattatgttttctgttacaatgaggatcttattagatgaagtagttagcgtaatggcaaaggaaagattggtggctatgattcgattctattctattgaatactttatgagtcaatttagtgctgaaaactagcttttcaagtcccgggaagatgttagttcctagaagggttggtcggttggttagttcctaattgggaaggtattaggagtggagtcattaccctttggagaacggtgggtaggtcggtccctaaataaagaagactatttttataggtaaaatgatcaatttgtcattgcatattgtttatttaatgccaattatgatagagatgagtattgaaggttctttattataataatttgttcataatattcaaattttaatgcaaaatgatgaatcggctgcattcagaattaactaatagttaatcattactctaatctctttttttttttaaacaaaaatttcaaattttttgaaaagcaatgaaatacccaagttattagaggatcttatcttttttgttatagaacaaccaatttatgtgtaaaaacaaaatctgaaatctcagctataaatcgcctatcataaagaagaaatctcagctataaatgttgtgtcattcatttaattgatctcagcccccaaccagctataaatgggttacaaatatgacagtatttagatatttagttggccgggagaaataaaatctaaaatatatatataataaaaaattattaaattttttcttattttgaaatgatctcttttaaaatagaattattattttactgaaatggtggaaaaattattctactattttaatatgcaaccaaataaaaattgtttatttttctattttatttcattattttcaatcaaatacctagtgtttgaaattctaatagtatgatttgtgatggaatcattctatttctatgcaatacaaacctcttaaagctttcttgctttgaaattctattcacaaatcacatccttttcactctgattttatacacaataggaaccaagcatgtgacaagacttttccaaatacatgtatttaattatctgccacatttcttagtttagactattctagcattgtttttctatctaatgtcttatccaatcttatcttaagaagaataatcatatattatcatatcaaactttgtatttgaaaatatgttgttttcaagatattatattccatccatttagtcagtattattaattttgtcatgttgatgttgggttaggaaactctctttagggtcaatggccctcaagatccagtacgtacaagtcacttattacaaacttatataagtcatatgactaacaaccttatgtcatattacgaattaattttgataatgtaaaatattcaaaaaagtttaaaaatttataaatggttttagataattactacataaaccactattaagagaaaaaaaaaatagattaaacaattatcctcattgttaaaacagttaaaaagtaaatacagaaacgattcttttgaaaatatactatagaatattacaagtttattaatatctaatatatgaatagtttttcttacaaataaacaaataatatatttttttaaagggacaaattagcttttgcagcttactaggattcgtttgtaacgtcgtattaggtcgtattatattgtattgtattatattgaattggattatacatcatgtttttatataatactatgttaaattttaatttatactaaaatattatatatttaagtgtccatagaaattaatatcacagataattttacataaaaatattatataaaatataatttgatataatactataatacaatacggtgtaatatacaatgtaacaaactaaccctaaatatatgaatactaaattcagccaaataatggatttgtcttgccttctattataaaagaaacttgtctttttcgatgttgcgtattacaacaccttcactataactatttttagccaaaatgaagctatcactgttgaagcagttgtgtttttcaatcacaacatcctataaagtggttgctatttcaaaaaaaataataatatatttacacatttgtctatttatatattattatgattttaagtttgaatctaaaataaatatttttcaaaatatttgaataaattataatattttagctctttgatcattttgtttgatagtttggctatagttgtatcaatacatctttacaggacgatccttattaattaataatattatcttggcactcttatttattttgagatttctctcagtgaatttaatcgtgagcttttcctgaggctaattttttaatatatatttaaaaaattaaattaaaaatatattatatcagatgttctatttttttttattttaaatatcttttaaaatttactctatatttacaaaatattatttattattttaaatatattttagtagttattttaggttttaatattttttaataggtagatagatttatataaatattaatattatatatttaaaatgaataaaatatattagaaattaagtatttgtgatgtactttaaaaattttaatgtatgcaatgtaatttaaaagtttgatataatatagaaatagtaaaactttagtaatatcttaattaggtagagtaaataaactaacgagaatgttttgggaaacttacaaaaatactgtttttttactaaatgttttcaaaaatactgggatacggcaaactttacatttttactgtccaagcccatttttatttcttttatattgtccagacccaatatatttacttttatactgtaaacagtaacaaaacacaaacagcacctctccttcgtggttggggacggacaaatcaacaccagaatcatataaacacctgaaaaaaaaccataaaatctggaaaagagaaaaaattactaaatcaacaacaaattactgttttgtagtgttattttactgttgttttaatat

SEQ ID NO: 110555 - DNA, 10906 bp, Cannabis sativa
  modified_base (157)..(161): a, c, t, g, unknown or other
aaaaaaggtctaacatagatgaaagttcaaggaacatgttttagtacatataaaagttcgaggggtatgatttggtagatatcaaagtttggggagtatagtttagtgcataaacaatcagtaaaatagaatgaaattagataaaagtctttaaatnnnnnaatctcaatagtttaagaaaaatttttaacggctataaaagttcaaggagcatgattaaaatttagaggacaaaaatcataattagcctttacaaattccctatgttggctttcaaatgtcctaaaaaaaagttatgtcttaatgaattttcttcttgaccaagtttgaggattttcatataaaaagtttctcaagaagaaaagagaaaagacttttgcttttcctgcttgagcttggagcgccatccattgatgactcttcaacactaccattactgttcttcaacttcactctactccaggtaaggtaactgactactctgttgctttttttcttctaattacccaaattttatatgttgatcactaatacagccagaaatgattggcatgtggcgtctttaaactgtttgttctttgagaaaatgtgttcaaaatgaaagcaaatatagtggttgttgttgtgatgacaccctttaactaattatttgaaatgataaaatcattttctgggtttgggttgagattttttatagtaaacactgaatttgatcgatcacgaaaaaggacataaagacaaacaggatctacgaagaaaggaagaaaggaaagtaccacggacatggacatcaaggtaaaacactattatattactcttcttgatacttgaaatttaatgggcacagttttccaattaacattcactacagacacacatggtgaaaggctagattcaatagattttttttttttttttgaagatagtaaaaattgactaattttatggggttggttttctcaaagggtagagtttcactgattgaagtgttcatgaaactattactaaggcctttgaaaatatggacttggttcaacttgtgctgattcatagatttaaggcctttgaatagaattgctatttctttgctccatttgttgcttcataattgcttaaggggtattttccaaattcatctcaagacaatattcccaagtttgaccaagatgtaagcaaatggcttgtttaaggtccttggataatgagttaaggagtcataaatctcctaaagcaatggttttctttgccaataaattattcatgttatgctatgtttgttgtacaccatctctgtttaacccagatgtatcttttgggtttctaggttgcttggcacaacgatatgattgaacagataggaagggatatatattttgatcttgtgaattttgacaaagttcttaattttcatgttccaaaacaaatgctcttctaccaatttaaggtactgatctttgtttaagcaattcacattccttccattttgaattttgttgctcattcagtatgtaattactattttgtctcaatgttaactgttttcatggaaattgcctgtacttttacttatctacgtagtttatcgagattcctatttttaagttttaaatgagttggaagaagttacaaaaatcaatttactgtccaaattgttctgctgatttgtccaaccagttactgtaaagtgtaaactatagacaagggtggggtggacaaaataggattactatttgaggatttttctgctagtgtcatttctttattgatgtatgccacatgatctagcagcaacacatgaggtctagaagactgaagaaagaaaaaaacatgtaatttgacttctggtattgctgtctgtgtattctgaattctaatggcatagaatatatacacctatatatttccttttatacaaaacaggtattatgtttataacacaagcatgtgtgtacatgtacacacaaatctcatacatacacgagcagagtgttgatatgcatacaaaccaacacacacaagcatttgttaatttaggtatttgtatacacatccttttatgtgagctctgcatacactaatgtagattacccattgcttacctaagatgaaatttatacttgtttgtcatgaaacttcaagtaatcttttttctttattttctataaaatttaaatgttttgatcactactatcagcattataacaattgagcctttactcaggaaagggtagccaaagagttaagcataccagtgcaatttcaacgattctggttgtgggaaaaccgcataaatcaaacctacagacctgctaggcatttgacattgttggaagaaagtacacctgtaagatcatttaaaaatgctacccattgtattgtttatatgatatatatgtttagattacaagtttcattgtggctattgtggtaattatcgatttggtgcttaaacctcgtcttagaaacctgtctattaaagctctgatcaagaacaaagaagttacaatgacaaactccaatctcacaaccaaaacgagaaatgaacatctttaaaatttctatcattatgcagccacagagcaacttttagccttatattatcccacagtctctccacctcactttcctcgtcttcaaaagttctattatttctttccaaccataaaatccaaaagacagcagctactgcagctccccaaagcttgtttttctcttgtcttcctttaatttgaaatagtgagctggaatgcaccaaaaaatccttcaaaatcctgaaccatatctgcattgaaatgaaaacaatatttctctgcattacctcacgaacattcaccttatcccacatggcctgccatattgaaacatttgactttaggaagttctatgattatccatagagaagaagcctactgaagtgttccaaccccacaaacatttctgagagtattaatttctgattacattaaaacatctttgaactaactcccttccaaaccctctacaatcttccagcaaatcacataaacttatactacccacgttttgtagtaacaggattaaatataaatgtacttgttcttcgaaagtgtgttgacacactaaaagctaacaaatttgcatgatacttgcctttcacaataatttgtggcggatggtttcttgttgctgctattaaatatttgttttcttgttaaaaatacattcaactcctgcaatgacatctttattgcttgctgaaactgatattatttgtcttcttttttaagtgacattaaacattgatggcactaaattcatttgatctatctattagatgttttctcaagcattattaatgtttaaatagaatttaccacttgtactcatcatactacctcaactagttattcgttcctcgagcatcttttaacttttaaagagaattactaattaatctgatcattcattcttataattaagatacaaattcatgagttactttatagttgtcttaactggtggagaagcatgcactcttttgtgtttgttacaagactgactattgcaggttgtaaaattgagagagcattcagacaggacgagcaatagactagtgctaaggctttttctggaagtagaacttgatttggtagtgttttcttaaccactcaatcaaactttaccagctaattttttagttaaattatatatgattttttttttataactgaaaacatgaatcctactcctacattttcctttttctgttttcacaatcactcaggatttgcggcctattgctcctccacaaaagactgaagaggatatccttttattctttaaactatatgacccgtggaaagaagagctgcggtactctcgctctcctcctccttctctttctcttcctctctactagtcttatctttaattttattttttgggaattcaggtatgtaggaaggctttttgtaaaactaggaaggagtcctgatggaatattgagaaaattaagaaaaatggctggtttcaattctaatgaggaaattaaactttttgaggtaacttgggatttcactctgaataaattttcctagttttatcaatagcaaccttgagtgtagcttctttaaatgtgcaggagataaagtttgaaccttgcatcatgtgtattcccatcgacatccaggtcacattcctttgcagtgaggtatatttttttgaggctaatttcctaccataaactactttttgctaacattttttcatttgggtacttaggggttgcataggtatggtatttattttccatttacacattgattatgcatatattattagaagctaattcctattgcagattgtttatagaatgtataattttatttttctcttgatcttcctcccgtgcactttttaaccttttctacagcttaaagatggggacatcatctgctttcagaaatcgcaaggaattgagcaatgccactgtccagatgttccatcattctttgagtatctcctcgaacacaaggtatttgttcatagctaatacttttgtgctaaaacaatgttgttaattgccttgttcggttcattatttgtcaaaacatctggacatgtaagatctctgtgtcctttattatgatttggccaattgagaggaatttagtctggagtggatttctcgaaagtgatgttatgaatctatgattatattttcaagtatttattggagcatataaaagatacagaggaattgtagagtgttggctgtcatgtaaatgtgggtggtttggttggagacaaatgataggaatttaaaagtcgtctactcatgttgcattgggatagaattaggttgtgtaacagcagtttggcaaattcacatttcacttttcctccgattcaatgataatgggaggtttcaaagtaattggcctgaatttttgtgtttagtcttttgttatattaaagatttactttaatttcatctttcaaattatgattgccctaccaaggccaagatttacttgcaaactatgtgaggacaaaatggaagaaatgctttacttaagtctatatttttcttgagataagtgatcaaaattcaaagaaacttacagcaatatatggtttatcacaaatgcttttaaagaaacatattttaaatgttactctcagctaaacatttatgttagtcctggtataatttaccaactattgtcctaacttgtgcagggaggctatgttaagcctagttcgcatactatcaatacagatgctcttgtaactgagctctctccatcacaaagtatcatcactcaagaggaatcaactcaagtagacacttgtactcaggcagtcactcatgttacttcattgactaaatcctcacaactgaatgaacagaatgcagtagaagttaaaatgacgtcaatcccatctacccccgttatagttgatccacaacaagtccatcctcatcaggttgacagacttgacttaacttggtgcttgttttatgcttgttggcagagctctcatttctttttgcaaattttgtttcaggagcgaaatgtggttgaagcagctagttactcttcttctcttgcttcatttgatgccttgtttgctgacattcaaagccttttagaagtaaaggctgttgaggccggtagttcaagccgcctacagcgctctatgcttagcattgatgagatctcaaatgcaaataaaatcgtcaaacaatgcctcgatatgaagcttggaagcttcatctcgtcaggaagaactcgcgaatttaagaattcagtttctattatgcttactgtcaattcttttcctgataacaaagtggatgagataacaaagtttctagatgaattcaaccaaacttgtgaacgatatgtgggagcagagcaggacataagagtagctgaacagaaagtgagctcaataatggagctgaaaaccactctgaaacagttgtcttccaagttcatacctactaggaatcgagttgaggaagtcgatcgggaaatagcagatatggagagacaactagctgaaaggaaggaagagaaggcacaacttcatatcaatcttgaagatttggctggaaaagcaactgcatcaagacaagcattgatcaatgctgaactggatgtgaacccattatggatcaaaaaagaggaagcggagaagacggttgatgacattgacaagtcctgggagtctttgaaggattactgcttacttcttcagtgagtatcatccacatgacacgtgaattattatacattgtttttgcacatgttttggttaaatttgactcagttagttatgataactaattttgcttgaattttgacatcatttacaagttggaattcccttatatagcttgttttgattgtctttagctacatgtatattgtcaaaacatttagcgatacttataaagtccagagcattaacccaaacattgtatcatagcaacagaaaacgacatatcaaatattaaataataataattaaaaaaaaaacacattatatataatgtaaggcgtaggattcaatcccttctggccatggcaacagaaaagatatgtgttattttaaaatttctaaataattctttcattccaatatcgaaaatcaataatcactagtacgaaatccctatccgtagcaaggactaaaatccttgactgtagtgaaaaaaaattcaaccaattatactttttatttaaagtatgattcattatattataattcattgttttatgatattaaacaattcatggtttcctcactccaagtctttgctgtaaattgttcaataatcaattctttgggttgtccttttcctacctacaaaaaaactccaaatattttggcacattcaaaaatgattggtattatcatttatatatctatactatagaaataaaattaaataaaaaaatatacaagaaaatcatcatgaaaatttactttcggtctacattcaaatagaattctaaaatatgatcgttgggattctctattcaactttttttttttgtttgtgtctgtaactttcgttataaatttaaagaaaaagattgagaaagtatacacacatatacatagtgaagcttttgttaaagatcgtatgagttaaggcatttagaaaattaaatgggaaaggagggagttggagaagttgttagcatttattattattattattacacacaagttgtctttccataacattacaataccgactaaaccaatcaactatttgggtcaatgggtggactccatccatcatcaccatcttccctgtaaagtccactcagcccaacccaaagcccaacaacaccctcattaacctaaccaagtaaaaaaaagaatgggattccccttctttaacaaaatttatctagttaaaatgtaaatataaatgtaatgttaaaatatctaagaaaaatatttattcgtaactgctatcaattgaaacttgtagaatatctctgaactaatacaagatatatatttcattattgaagaaacgaaaataaataggcaattaattatgtaaagaaaggtttgtgtagggagattagattacatctttaatggaaacttttctgtcatctaatcatgtcattagtttcataatccaactcaaattacaaaagtcaataccatcattaagttttattatgtaaaaaaaaaaaaaccattgctgactacttgacaaaaaaaacaggattttgtcttactttaataggtttacagttacaccgtacaagtgtctgattttttgttatcagattaacaatatccaaaataatattaagtctttaattgaaaacagtttttttcttttttgagaacaactaaatggactaaaaaaataacaataaaaagtagaaagatgataattttaaaaacaatgtggaattgtcaatagacattataatatagcagctttgaacttttggattaatatcagaatttctctctattaacaacattgatattatatatatatagaaggtgggaagattagtggtgagaataaaattaaaatataattgtaaaacttatttatcaacctaatgattaaaaacccaactcacatctttaaagtcaacactcaaaaatataatctttttcttaagaacatttgtgaaacccaaactaacaataaaaataaataaataaaaaaaaaagacccaaatagatagaataaaaattcattttaacattaacaatatataaaaaaaaaattattaattgcttctaaaatgagatttggtaaactataaattgtaatgaatcattttctcttcaagccaagtaaaatgacccaaacaagttaaatacacaacataacagtataacacaccacaccacaccacaccacaccacacccatttcttatattctttgactctctctctctctctctcttaatttaataagaacattagatataaaatgagcatataacacaatattagtcccaacccaactcacgcatgctcaaacccacactccctcccacataaaaactctcacccactctctctctcaaataagctcacaacaagacaaagcttcttcctttggttttgcaactcgtcggggagagagttagatctctttgttatttacaaacaaggtcaaaaagagggaaaatgccttggactaattgctcgaccaccaccaacaccgtcgtgtacggcgccaaataattcgatacggtccgattaatataaaattactgaaatacccctgctcgtagttgagttaaatgaggtgtaagaaacatatctccgacctcagcagtagcgttggggtctgctccacttgtctccgggaacgattattcgcgttaatcgccgcccaggcccaagctcaagcccatgctcaggcccaacagcaggcccagttgcctcgagctctctcccgcggcgatcaagaccccagaaaatccgactccaatactcttcctcacccgtctactaatacggctccggctttagcttttccacgctcggtatctccttacgtatctcgacgtaaatcagacggagctgccacgtggaatcatctcaacggtccgctagaagatcaccatcatcatcgccaccctcgccaccaccacctccgattctacagtactcctcaggttggaccgaccttcagttctagtaaccctttggcggattcaataccgtacaagaagaaacggagcaagttctccctattcactaacctcttccgttccagatccgagaaattcgaatcggatcctagggttccgtatcgggattcgtacccggtctcatcatcttcgacgacggcttctccttcctggttttcggctatcttctccagccgtaaaagtagcaccaagccttcgccggctcaattcttccccgaagagaccctcggcactcgccgtccgcgaggacgtacggatcggggaatgtcaccggcagatgttcctgattttgactacgattacggtgatgaaggtgatcaatctccctctggcagcggacactcatcggaatcttcgccgagatggaaaagaactccggtagtggcgcccctatcggcaaggcgaacgaagtccggtcccggtcgaaatgtttcgggtttggctttctgtctgagccccttggtcagagctagccctaaccggcactggaaccagaaaagtttgccaccggagattgggaaatccggcgaaggtagggtggccggaaaacctcatttatcaactgcggcatcgttttgtaagaataggtcgagaaagctcgttgatttcggtcgagctaatcccaaccgttgattccgtcgaccgttgacacttgacagtgaccagtgaccaccgtggtgaccccgttgtgtttctactgaaagtacggttttgcccctctatttttcctatttttaccaccacctttttttcttttaatggtccataatttcttccctgaaaaaaaaaatgtcttttgtatattttcattacattttacagcgaaaaaagaaaacagaatttaatatatttattatatctattttttttttaatttgtattttctagtgtaaagatttcgaatctgaatacagtgagctatttttgaaattaccatatcgtcctggtatatgccaactgtttaattttatattatttgtctttaattgtccttttattaattattattacaatttatacacgactgggtcgttggaccggatattaaagaccggatcggtccgagtctttaatcttagaacaacgtaatcgtatgtatattgttattctgagtgagacaccaaaaaacttgttcaattgactatgtgctgtaaatttgatcctaaacggtggagattgatccacgtgcacttgcgtttcgattgtgtcatcaggactgttggttgagttgacaaaataaagtttggtaatggatggttgttcttttagaaagtgtgagtgcctcgattattttgggcggttggcatttataataagcttcttttttattttgatttttctttcaaatttgaaccacatgagcttctcttctacaaaagactttatatttaattagtatttctaaaataaataaaggaaaaagaaaagtatacatacgttctttattttgaattccaaattaaagtgtagttgagtcaagtatatatcactttctcactaatattaaccattttgggaatacaaatttcaccacctttttattgtgtgtagctcccctaaataaaattaaataaaaaagtttttaaatgatttggttagttaactaagtagaaaattaaacatagtggtttaatttaagagtgttcatccgattcaatccgcacttttttggtcaaacaacatccaatccgcactaagtgc

SEQ ID NO: 110556 - DNA, 6618 bp, Cannabis sativa
cggcccaaagtatttttgtaattttttttcctttttttcctttttttgttttttttccctttttttttctacagtgcaattgaatttgaattttatatttggaaaataaatatttagattttaaaaaatacatatatttaaaaaaataataatgaaaactagtaacacctattatttcttcaaatggcaaaaacaaaaacgtttcaacaaaaattacagtaatatgttcccgcaatatatactccctaaattatctcttgttatatatgaaagcatacataatatgtgtttacttgttcttttttttattagaattattctattgaagctatttttctttaaaaggatgaatgcaaaaactttttgtgtatttatgacttgtcacttatcagcattatttaatagaaaaacagatggtaaggcatgtgctttcatacaaataaatatatattaaagtttcaatagataaacatcagctatggtccctccaaaacaataattgaccagcttgtaattaaggaccagtgtaacgtacccttgacatggttgaaatatataaatgatttttagcaacttccataatttgcaaactgtacaatcaatcatccatataagaagagtcccaatgtaaatctgccaagactgccatatgtgtatgtatatttttttggaatgttcaatgttgaacaaaactttcataggggccaataatttaaaacaagtaaagaaaaataaaaataaaacaaagcccatctacccccttttctcacagaagaccctatgaaattctacaaaattgtcatatagaagaagcccctgaaagggaatagatagttaaagaaattgctgtgcactctgcagtacctatgcaccttgagagaagctttctcttgcaatttccaatatttcatttaataaataatggtttggggtaatcaactgtcttgaaaagaattccccaagttcctctacaatataataatttatgcaaagaatgagattgtcaaaagcaggatcagatttcaccggttttgtagtccctcgattgctttcttccattgccacgctctttgtttagcatcctcaaatgataacaccttcttgggctgaaaacatcacacaacacgatataacagaattaacatactaaggagataatgtaggaaatgcagcaataattgaagtgtgtttttccttggaagataatgatgcaaggtagtcataccgtacaaatcttgaaattggaagggcttaatacttggatgttgaggtcattggggttatcagaccatataatatttcccttcactatgagttttgaggggtcaacataaatcaactttggcttgttggtaaggataagctgcaccttcttgcttgatagtttctgcattttctttaccattgatatcataataacagattccccaggttcaaggaattgctgcctgtgaacatgagaaaagttttattagatattcaccgcgggtctaagccacaatagcaactcccaaatcttatatcatacatgtagacacagggatatgctagaaaaaagagagatagaagttgacaatcacttgtatgtaattgataccgactatagagagcagcaagaaagaaatattttcttgtgatgcaaaataggtggagctgtaccatttcgaatcaaatgaatcgatggaagcaagtctagtaatgtgactggatccctcagaggacgacgtggcaccagcatttccctcaatttgtcttgctccgcaatcaccaatgtgtgaagggttccatgaagaatcatggcaatcatcactctcaccagattgagcctaaacaaaaaaaaaattaaaaaatgtaactcgtttgtaagtttattcttggtaggattctgtccctttttcccaagagaaactcaaacaacaataaaagcataatgctacctccaaagcaatttttggaggggtttgctgtcttatatttttccagtcgattcctttaaagaatggatgcctcttgagtgttgcataaccaccaggtccagcacctggtctcctgctaggatctaaatcctgcatttggtaaatgcatttgaagtcaaaaatacagaaatattggaaacctccaaaacaggaaaaataattttgttaagaaggaaaaaaaaaccctcattaaaaccgtagctatttcgaatgaagacaatattaagggtaggaagcagcttaccagcaatcggtcaatgaggtctttagcttcctcagagaaaatatctggaaaccttatatcccgggctataattctttgaaaaataagccattcactggcatctttgaaaggagaagttcctgaaagcatttggtacaaggtgcatccaagtgcccagaggtcattactgtagtggaaaaaaaatatatcatactgctgacacataattgacataaatttggagagcaatagccaactgcttgctcaaacactacaagtattacacaaatattttcgtacccaaaagttgcaggagaagaattcaagacttcgggagggacgtatgcagctgtccccacaaatgtgcaggccttatcatctgaaaatggcgcccaatgagcaaattttccacataattggtaaaacatacactttctgtgttatagcatcatatatgatatatatacagtacctgatgacgcgttaggaaggactgtaattaggctatcttgcataggctttacactcccaaaatcagcaattttgatatgaccatccattgtaagtagcaaattctcaggctgcattcaaagaattttcagaaatggtaaccagaataatctcatgctttacgtactgaaatcaggtgagcattcaggaaaatatacctttatatctcgatgaatcagccccattccatgtatgtattcaagtgcatctacaacttctgctgcataaaatcgggcttcatcttcagacaaacgaactttctgcacatgattaaaaaaagaaattgaaaactgggtggggaacagcaaaaagctaaaatggcacaatgctactgaaaataagtaataagataccaaaaatgattagaaaattcatgaaagtatgtgtaaaatatttagttaaatgatatataaaggaattgaaatgcttctttaactcttcttctttcttcatttttaaatgaaatgaaatgatatttagttaaatgataaacaataccacttgattagaaaatggaaaatgaaatgcgaggaagccgtaaatcaataatgacaaaaaatagcacaaaatatatttgtttctattctcaacttaccctggttatttgatcaaaaagctctccaccttcacaggattcaagtgccatgtctgcagaaaaatcagaggcaaatgctaaatgagaataaaaaaggtaaaccatacaaaatgtgaaacatgactaacacataactagatctagattactaaaatataaaccaagcaatgtactgatacaaagaagtgggaactgaaagacataaacattcaacaaattgccaaaaaaatacctacatagtgaaaaggtatcttgaaaagtaaaaaatagccgtacgatgccaggatgatccaattgatcaagaacaatacgttccaactttacataagcggttttattttcttttgtgatgaattttttatccattatcttcaatgcataaacaattcccgtgtccttcttcttagcccgcacaacctggtaatacattaaccaaaaacaagatgcatatatgaactccaaataatgtaagcaacagtttcaaaaactgcaaaaaatttagcaatgcaaaatttcatgtatcaactagggagtgtgagtgagatattgaaaagaagctaactacatacatagctcaaataagagatgctcccccataaacgtagtcatagaatcatcggttttgaacttttgataaaaatttattccagagaaagtcatatagagaactagtttcttctaacaagctaaatacatgaagaggtttcgataaatcaggtacagaaacagaacacatgtttatttcaaaaactaaaaaaatcaccaaccaatttgctatattcatttaatttctacatataaaaacgaggctaccctaggatatagcagctggtcagttttgagctctcattgaattttacgatcaatagactgatgcccataacactagaaactggaagctcggccataaccctgagtttgtccattcaacgtacaaaatccatacgtttagacaacaacaaactcagcctaacttctaggattctctagttttactgattatatcttatatcagaaagtcttaggaaaccaataaaaaaatttggcaccagagagccaaagataggacaaaaagaagcaattttctcatcaggccttatatgatcgattaaatgatcaaggcataaacgtaaatagtgagcttgactatttacattcccttaaaggaaagaaaataaataaaattaaagctagcattacatgattaatttgataaaagctgaaaaaactcaaaatctcataccttggagtaggaaccaacgccatagatctttcccaattcaaagtcctgaatgctgaaattctcctggggagccctgaatgcaaaacttttggatctctgaacactgccaccaacactaccagcaccacctccattagaagaattcccctgaatcctcaacttagcatcaaaatccttctccatcgccaacatctctcactctaaaacttcttccacattccacaaccaacccacagactctctatctatgtatctgtctatttccacgaaaacccatttcgccttttctcactctctctctaaaaatatacgaaagcagcctcgaaaaccgagcaaagaccaagaaaacggatcagaaagaaagaaagaccctatttctctctctctctctctctctctctccactgtgaaaaagaaaaggtgaaaatgaattggattccttattgtaagtattcttatgagaatatgggtatgtgtgtaatctgagaaggtgaccagctttagctttgggtttgcaatttcaaaaccctaaaaagtagagagtaatatgggattaaggaatgggggaagagagagaaaataaagtgaaaaatggcttctttagcttattaatggttttgtaattaagaaaaaaaagaatagatttttaattatggatggaggagagggaggtatggggattgaagagaagggagagtaaatagcacatgggatggaatcatggagaagaatagttcccataaccaaccaaccattctcattcaaacaattctctctctagattttttagagcctaaaaaaggaaagcagagagagagagagagagagaggttgaattgaatgttgatttgatccttttcttgatgctattgctggttatgattgtgaggaaagcctttagctttggtttggctttggcttttctttgtcttttgtttttgctttgctttgctttcaccacctcatctaattatatttattaaaatttaaattactcaaagaaaagaaaaagaaaaaaagtgataataattaatttaataatggcattggcaacaacatgaagaccaataccactttattgattgcgattgtatgccaagactcctctgttttgtatttgggttttaacagaagcaaattattcgagctttaagctttcattttttggaaattgaaataaaaaatgagtatatgtccatgtatttttttgtttatttgtgtttatatattacacaatgtataatttgacactcgaactcagtatctccattacacattcactctcctgtgacatttgagttagcctaaatgatatgtaatgtatatgattttgaaaaattttacaatctacccaaaacaaaatacagatatatatatatatattataattatttaagacattatataatattgtaataaatttaaataaatttaactcgctaaaagcagattcaaactatttattatatttgtgattcttttattatataagcatatcaaatatattgtttgaatattattttttatattataaatttttttaaattttacaatatatcttaaatgaaaaaaaaataaactaaattttttttaaatgtcaaaatagataaaagtagatctttacacccatggtaagagaatacattatggacactaaatttgttttagcacacactaaaaattatatggattttattttatttcacacaataaaaaacaacctattattattattattattattattatttccttttctttgttggccatgatgcattgtcaagagagagatgagattcacattttcttatgtcatatcatactttagtttaggaccaataaggcatctcccatctcctacacaaaataatgcaatgtgatgcatataatttagtaaaagaagcttgttttggtagttacttgttattactctaaagatctaaactcttaaagcgaagagacaaagtcacgaattaggctctctctttttcaaaaaaaaaaaagatgttcatgtgagaattgttgttcttgattcgaatcctccattgtggggaccctctcccttttggtt

SEQ ID NO: 110557 - DNA, 5163 bp, Cannabis sativa
ggttccccaaaccacgagagttccaacttatgattttcatggctgcttgcggagctgaaattcagtctccgcaaagttgtcacttgcaccaatagaatccatttcgtcaatagaaacatcaaggtgagattcattttcctctgacaaagaagggaagattaattgagtttggttgcctctgcatcttttgagtgtttgcctcagattttggccatcagattgccttttggtaaaacgatttggtgacatattctccttgttccctagctgatcaataccagaagacactattgaccgtgtactgctttgcattgtagagggtaatggggtatgtatttggttaaatttaattgtatgagatgagttggtattggggggataagttgcaaaagcaggtggggcattatgaatgacagaaaatggggtaaagacccctgacagatcagcgattatctcactggtttgaggcttactggtttgaggcttactggtttgaggcttactggtttgaggctcactggtttgaggcttactggtttgaggcttactggtttgaggctgagattttgtagatgcacggttcattaaagaagacattgttagttgagcatcgagcaaaggagtgccaggaacctttgccacattggtggaattagcaaccatgaaggcctgagttgaagcagccttgtccaaaagtggtcctcgggcagaaatattgtaatttaaatggccagtatcagttgtgcgagtactatttggagagttgttgttgaaatgatcaggttcttcactatcataggaggactctcctcgggtcagttgttgaggaaatggtaaagcaccattctttaaacttggaattgcagaaacaaaggagttttttgctaggcgtgtgagcaatggccatgcatttccctttggaaagtcagtgcgataccgatcgtaacttgaaagtggtaaaggggaccctttcattgtaggcttgtattccaggtctggttcgatcccattgtcgagcttttcaagatacagtaaacacttatcaaatggatgtcccaaccgaccacactccatacaatattcgggtaaacgttcataacgaaattcaacccaaaatttttcttctacttgctgcagagtgatcattcttcctctcagtaaaggtttggtgatatcaattttgattcttacacgcaagaaaggcccccacccctcattgagtgagtcctcataaacatcaacatattcaccaataatattgccaagagctttagccagccccttagttttactaaggaatggaagcctgtaaatctgaacccaaaagggagtgtacatgagggtacccgaatgcacattttggccaggcaagggtgaatgcatcacaatgtggtgattctgaaaatgaaaaggctcttttaaaaggacccttgccttatctcctgcgcatccaaaactgagagaaaacatatcagaagattctgtaatagtgacacaggagaaacctcttccccatattccagtgtgttgtgccatttgatttttgaaagtggacaaccaaacttttctgttagtaagaactttggcaaataaaacatggtcttcaatcgcaggagggtctatacatcccatatcagacaaatcaaacacagattcctcttcctcagtcaacttcaatggctctttcatcttatgtgtataaggatccatggttaaaccagtaaaacccagcaaggaagatcaaaaaaccagagggaaaagacagttattgtgtacggttagagtaaaaacagagcaaaaaccagaaaaaaaacaaagtgaaacttcttaactgcaataaactgccacagagcacaacaagtgggcagacgctctcctaaattattcttgttattgaataattatctcataaatgttaaacattttttttttcctctgaatttttacatgtaataaatcgtgtttcctgaatttttttgactgttaaaaatttccctgaactttcatccatgttagaatttaacaatctcaatagttcaggagaacttttaacgataaaaaaagttctgggagcacaatttaatacatctcaaagttcaggacaaaaaaaattactaattagcctatatataaatatagattaagtatataaataaaaatttcccttaaattaaaactataaaaatgttccgcgtagataatgacatgtcatacgggttggtgatcttctgtaatcaagaaccagaacgatgtcgtttaattgacttaaaggaaacgcgagaactggaccgtctcgactctcctcccgttgctctctgaatctcatctcatcccaatcaaacgcccaaaacgctcgtcgtatatgtcacgtccatttctccattaaaactctcttctgcaaagcaatttagagattcatacctatttattcaaattataaaattatattaataatattattaatggagtaacgatggttgaaatttgaagcaaaactccgtgaaaaagcaaattccatttctgcgggatcaaagggtcatacattcttagttcaattgcttgttttggtaacaaatggaggaagagaaacaacaattgaaggatgaagttcaaggtggaagtgaagcagaagctaaacaatctgtagcgccacctcaaaaggatgtcggtggaggaggaggctggggaggctggggtttttctcctctttctgttttctcagatctccagaaagccgctgaagagatttctcgcaatgtaagcatttttgtcctcgttttttttttttttggtggaaccgtggagggttttatcagatctaatttcctgatccgaagtaatattgatatctttctatatttgttttcgagattttttgggggtaattataagtatatttcttgcaatgctaaatctggttgggtcgttgaaggcattaggaaggagttttactttcaaactaacgagtactagtggtttatcttatggttagttgagaaattttcgttacatagaatttgattatgggctaaaaatttacatccaaaggcatggttttgtaatttaagcacctgcctatttcaatgaagatttagatgtttatttagaaaaattccagcttccattgcattcaattttctttttaatacaaaatgtatatttccatacgtaatgggtccaaaccagctcatatcgtatattgtaatttaagtttcaaagtcacgctggttggatgtctcttttgagcagtgttttgtggatgcaggctgctgctgctgcccagacggcggccaagagcctcacagaaatgcaagatgctggtgaggagtcagagtcttctaaagaggaggaaggggccgaagaatctgaagctaaaggtgagagtgaagaatctgaagatgagagtgctaagattcggaagtctgctctggacaaactcgagaaagctagtgaagattcaatctttagtcaggcaagtttacagttattgtttttgggatagcttagtcttacactgtatcatcattagaattgttgttgagatacttctagtgaagattctattctattgagttatttttcccctgaattgctgtacagttgacttgatatctttttcttttcttgttttactgagcatgttatggtttaaatattcatatttgcagagtttgaaggctattgatagttccatggagaatttggcttcgggagcatggcaggcattcggtagtgcattgaaagggggcacaactttggtcaataagtatgttcgaagttgttatatatatatatatgtataaatgtatatgagatggttacttaatgaagctcccctgtttgaagtttgtgaatgcaataatattttggtcaattaagttttttttacttgtttttgaaactcaacgtctggtttgtaactctattgtatagtatactttttgactccgcacctattttttttgttgggagattactacatcatttcatacattttgggcagttaatctggatctctaaatggagtgtttagtttatgtgaattcctttttgtgtatgtaaatctgactttctatatggctggtttttgcacctctttctcttctgcttgttcagtttatgatgataattttttttttgttttttgttgcatccccctaggcttgagcattctgctgcaaaccttgcagaatctattcaacagggtggccctgttgccccatccatattagaggttcacatgactctttatcacctgtctcgttcagtattgttggcacttggcatcagtacttattctctttttgtgatgcagactggaaaagcttttacctcaaagggaattcaagttctcgagcttgttggcaaggaaactatggatttgcttatctcagaggcaggtatagatgttgaaaagaattctaaaggtgctgaccgaaaagctgatgacaatcaattatttgaagaagtgacatttgacagatgcttctacatatatggaggtccagaacagttagaggttgcttccttatctttgaagtttacattgtagccataagattagatttagtaaatattttttaaaccataccttcaggaacttggggcattgtccagccactatgcattgttattcaaccgaagaaaaggcaaattatcatccgaacagaagtctgtttatgatgaaaagcttaaagaggttcaggagattttcagtttaggtactgaaatggatggaagttttgctgagttggacaaaggcaagaaaaaagagactggggctgatggaagtagtgatgagattaaagacttacatgattcaagtgtgagtaaggctgctgacatggctgcagggtaatttatcttgaaacaacatatgctttgatatctgtaaacacacacacacacacacacacatatagatatattatgtttatgtctgtttctactttctattattatctagatagtagtcaggatgtcaatacagagcagagtttaaattacagtaagagcatgattgattgatttaagtactgagtagtttttacttactaagaactattcttgaaaaaacataaatatatgatcatgtgaggcacacatgcatgaagccatacatacgactttcatcgaatacggctttccacagaattctctatg

SEQ ID NO: 110558 - DNA, 1761 bp, Cannabis sativa
ttttattcagggcataaaacccaataattatttcataaaaaaatattacttttatattatataatttaagatacattttagttacctctaaaatttacatgtatccactttaatgatcaattaattatttaggttatattaacacatttgaggtaattttcaagtttatttttgaaaataatgaattgtcatctagtaaactactattttagtaaactttattttaaacaaatatatatcataaatatctaaatcacttatattttttaaatataaattaatatatgtattttgattagttaaataaagaataaaattacaaataaattttaaatcattatatatacgacattttttgggaaccaattagttatgatttcgataagataccaattagttacttttgataaaatcattaattttatataaaaagacgatgatcagaccaaaaatcctataatcagatatgtttatactcatatatgtccaataaacttgtttattttggcatattgaaacaaatttttattgtttgtttatatttttcgtatagcttaccattgtatatgctaacaaatctattagtttattttggtatattaaaataaattttcatttttcttttcgtatattagaacaacaattcatttcatttcatatagtctaccattatatatgtcaataaacctactagtttctgtttattggaccaacattttatttttttcaatacagagtaaactataatcaaacataataattacattaaaaagtaggtcgtaataatattatcttattttatttaacaagtaagcataaataagaaataattttatttattataattcataatttgaatattgtttacttgttagtaaactaaatataaaagaaataatttttaaaatataaaatttgaaagagcatatgctttcaaaataatatgcttttatgcattaaaataatcattttaaagagtagatcataaattcacaatagtgtaattttttagaccaaataattcttagtttagccaaaaaaatctttttgaatatataaaaaaaacttaaggaaagataaaatattttgaatctaaatatttatcagatatatgtagagttgaagaaaaagttaggttcttcaccaaaaaaacataataaataaaattaagcctataggaaaagatgattaatgcacatcacattattgctccctgacgttatcaatttccctcatcaataacttcagcctgtttaatagcccatataatatagtttaaataaaaaagatgttataaaatgacgtttatataaataattagacacatcaccttattattggaattgcatagacatataggtattcaaatataaatttcccaaaaaattatacatccttagtattttaatttttttaaagaataaatagtatttttgtcctatcaattttttatattatcaagttgtgtgttttatagaatatagaatatttctcaaaatataatttttacagtaacataaaattttaatcacattttattgaattttattgtgaaataaataaaatagtagatggtaattaataaatagttacaaattaagggtgactactcaatggttacatttttattgtaactatcatggttatatttttttttacatataatagcatgttactaataggtaaaatttcctttttgagaattaattaattataattaattattttcttaaaatgattaattgaatatttaacaagacc

SEQ ID NO: 110559 - DNA, 2368 bp, Cannabis sativa
  modified_base (1282)..(1285): a, c, t, g, unknown or other
atagttcatgaggaatttttaacagccaaaagttcaaggggcataatttggtacatattaaaatttagaggacaaaaattctaattagctttttcttaatctatttttggtttgcttatagtttgcttatgcggttgttttagagactttagtggcaaaatcacccgaattgtatgttttttaacatttaaccataaaaatcaaaattttggaggcaaaactacttaaacctcacttttgttatgtttttcacccctctgttcaaaaatttcaatttaattgatacagtggacaactaaggtgtatactaaagtacatgtggcaaaatttgagtgttccacataatatcaaaataaaaaaaataatttaaaataataaaaataataaacaaatattattttttttctttctttttttcttttcttctcttctcttgaaaatactaaagaaccaccccaaaactatctccacaactactccaaaaaccaccaccactatcaccatccaccacaaccaccacaccactactaacatttctttaaaataaaatgaaaaagacactgaaaaaaaataattcaaaatccaacaactctttttgtcacttgacatttcagatggctcaattggagctgtggtgcttcaactccggcgaggtccaccacgaagagagagagagaaagagagggcttgtgagagagaagatcgagagagtgagaggttgagatggcagacggctcaattggagtcgtgtgaagcttcgactctgttgaggtcaactacgaagaaaaggggttggaggggttcttcgcacctgctccacgactctagcaaggtccaccacgaagagagggggttggaggggtttgtttggtcgtcatggagtttttgggctaaaaataattaaaattatgttgatgactaaaaatttaccgtgtgtacacgtggacagtccaccttagcacttaactgaagtttttggatggaagtataaaaagcaaaatggaatgcgagtttagtaggttttgtcgtcaaaagattggtttatgtagttaagtgttaaaaaatataaaattcaagtagttttgccgtatgttttatgttttataattatatattgtttatttgaatgttaatataacaagattgttctttaaagagtataacataatcatttgtgcgaacttgttgtggatattattaaaaagagttggttccatgataatataatggcagatatttttaatatcggtaagtcattattctttttttattattattattnnnnttgttgttgttgttattgttattgttatattattattttactttgtaaatgttagtgtatttagttgatataatattaacaaatgttaattttttttatgtagtatgttgatgtgttttttttactattaatttataaaacaaagtgagtattgtgacaacgattgtaaaattcattacaaccagcaaaaaaaatgttaaacttgtagacaaggattgaagtttgtgatattttttgtaaaaggagttgtgattgtgctgtgctaagttgcaactgtgtttttgttgagatcataaagggatttgcaatgcattaattgtaatattctttaggataaagtagattttgtgatttttaccatctgtgttaagaaagaaaagcattggctccttgctatattctttcttaaagatacattgcttcatgtttataatacaatgatatgtgtagatatcgtgctgtattggtagcagtaaagttattttatgcgttgttaccttcttatttttcttgtttatccatgtttggattttatgaacatcgcgatagactttggaagtaattttcgatgatgattgatgacattctaatcgagttgtctgggtgtgttctttatgcattatctaaattgtatatcattttacgtcaaaaaaattgtatttcattttctaataatattttacaattttacgttatgcgttttcctttaacttctttgttttctttttttttttttttctgcgtagagatagtacgatatttatatatgtttcttgtttgttaatatttatctgatgtcgaatatcataggtcttttcgtgcttatttactatatatttatatacaatgactaagtaaacttgtggatataaaagtgagctagagtatcgagttgcctgggtgtgttctctatgcatctatttaaattgtatttcattttacgtcaaaagaaaaattgtatttcattttttagtggtattttacacttttacgttacgtgttttcttttaacttcttcgttttcctttttttttatgcatagagatagtacgattttttttttttttttgaatgtagcgtaat

SEQ ID NO: 110560 - DNA, 6276 bp, Cannabis sativa
  modified_base (34)..(40): a, c, t, g, unknown or other
ctttctctcttcaccttcttcttctttcttctcnnnnnnnttatattattttatattattttatgacaagtattacattgtaatggattacaaaaattaaaagagaaaaacaaacaatctaatggatctattcattaccattataattacagctaccgttaccattataatgaactaaacatgaaattttaaaatagtatttttgaaaaattaaatttataagaatgaaatttataggtcatcaaaatgtaaataaaacatctacgtcaaaaaaaaaattgtaaataaaacatgaaaaaaaaaatttgtatttatggaaaaactccccgaaaataagcgccgtttactcaaggaggggtgaactctgaaccaggcgagctcgcagcaaaccaaaaatggagaagaagcgctgcagtttctggcttcccaaaaagaatcgattttgtgctaacacccttctcaacgagtccttgtgagatattattcactctcttctccattctttgattccttatattccatcttactcaaattctgattatgtgataggttctgcggtaaccacactcccaggtccgaagaccagtggatcccatgccctatagacccttcccagtaagtccttttaatattattgctctttcaatcttgacagctctcttctctatctctgaattgttttttgtaaatctcttgtttgttttcctttacagctccgtactcaaagaaaatcttgaaagccatgtaaaaagatgcccacacatgaaacaagttcagtccttgactgtccaaccgttctaccaaaaaggtataaattctggcacagaaggatccacaggagaggaccgagcaatcacagcttcaaatggaaacttagcattgcctgatgatgataagctagattctggtgttgccgaacatgttacttcagagcttaagaggaatgctgttcatagcttgagcgtatctcaattttgcaaactaattgagaagattgagtgtattcatgagtcggtttgtaaggacatccgggactcgtacaaaatccctgaagcttgtgaaaagtggattaaaagagaatttgatgggtatatatgagttggaaagtttattgtttttgtgagtttgttaaggtcttttagtttgtgaaaaagaaaaattagtttcttcgcaggaaattgccatttcaagaaaagcatgttgcacaacaggcttcgattcttggtaacttggaagaagttggaatattgaagtgttctaatgggagtgagaggtgtgagcttgaagggtctttaggtgatagcagcattgtccctgcagtggttgagtttggagctggtagagggtacttgacacaaatgctggctgattgttacggtattgaaaaggtgtttttggtggagagaaagtcatacaagcttaaggttagttggtttgaatatgaataaaatgcaatcttcatcctatgcttagatttccttgtaataaaagttataagatgttttgtagtttagaccttatttattgttttatttcatgtcaaacgctatttctaggctgatcgatccttgcgacagaaagagaaattaatattagagcgtttgagaatcgacagtaagtttttctttaactctcttcttttcatttttttttccaaaggaaagtcccattatctgtcctaccttcatttaagttttgatattccaaatgttgtgtgtagtcaaaaaaaatatatcagaaatgtttgaatggatgcttgttgagttgttctcaacaataatttacttgtaaaagtacattatctacttctgttattcaaattaagctgttctctcgtttagtcaagtctccttccaaataattttctgttcttgggaaaagtaaggaatttttcactttgctaccttttttttcttcccattttaagtaaaatatcaaactttagtgatgtgaatgatggagaagataacatagctttgaagtgattttggtttctgaaattattcagccaaccgtatttgcctgcttgtagactgtagatggatgctatgcttgtatgtagtcttcatcccacttttcttgtgcagttgaagatttaaacttgagtgctgttgagtctctaagggggtttccatacctggccattggtaaacatctttgtggacctgcaacaggtagtcatgtgcattaacagttacatgtgatgtccacaatagttgtttcagttgtattataaagcaactctattgctgcagatttgacccttagatgttgccttgcggagcactttaaccaagaaaccgtagcagggtctactgtggacccaaaactgagaggcttagctatagctacatgttgccatcatctttgccagtggaaaaactacataagtaaccaactggtcatgtattacaaatatttattgggtagtaatctgaattcttttgctttgaactgactggttgtgagaaatttggctcgctgcagataagatgtacttttcaaatttggggatcacaaaggaagaattccatgcaattacatggtttaccagttgggcagtcgatgctgatcatggttcagatcttgctgatgtaactaactacaatttccagccacaatccatgtatgctttttctaatatgttttgaaccttaatgatgtttctggatggcactgcccatttccctttcatattgtctgaacaatgatttgttttacacatcttattgttccaggggagctaattttagtgggaataagggagtcgaagaaatgactaggaatatgaaagcagttgaaagagcggtactcgggtttaagtgcaagcaaattattgacatgggtaggatgatgtggttgaaggattgcggattagaaactcagtttgtcaaatacgttccatctaccatctctccagaaaatcatctacttgttgcaggatgcatcgatggtatgttgtgagattttttcattgtacccttatcaggggaagattttgaatttgattggagttcaaaaaatttacggaatagtattctacaactgtggagcttgagatagaagaatagagtatggcattttgaggttgtaaaatgttcaaattacatcttaaaatgttcattttgattttgattggagttcattttgatttgagagcttagcttggttttggttcattttcgtattgatgttctgtgggaaaatttaaactaatgtgcagaattaaaactaactcaaattcaaattaagaaacaatatatcagcaaaacacaatctaagaattgaggagaaaacaaagtacaacagagaaatcaaataaagcaagaaaaatgtaaaattaatatcaagaattatattggtttgatataaggttctactccaattttggaaacccaccgtaaacttctttatgattgagcaagaacacaagtacaattttcagccaaaaaaaaaaagaacctaggtacaatacgatcgagagaggattttctgtttgtattctctcaaaatgtttatctctttgttaatgcaaatttttgttaattaataaatgaaccttttttggaagaatttagaactttttggtttagcctagtgctctatatatatgggagagagcttacagaagatctaagaggttaatattccttaaaatgaggagatatcaccaacttttcacatattaaatacacagaaaataactcattaatctttcctaaagaataggtaaatatttgaagttgagcccctactttctcgtgagttgttggagtgaatttgtagctaagagtgaagcattgtctgtccagggtgaaagttacaaagacaccaattgtgtttgccagagaggaagctggcttgcctaccatttgctagaggctcgctggccaatgcttcactatggtcggctaggggtggtctggccagaccctcctggttggccattttgttgtctctttgtcctgcttgatcatttcgactcttcgtcaactggtacgttatgcatgttgacttagtcctcttacttacaggttgtactccatatggcatcaatcttacctatgtggacatgccatgtcatgtggataaaaattgggataacactcatattactctatattttatataatatactttaaataattacaatctaaatttctggaatattatactatgatatccaaacatcaggccctataattgggttaagctccaatacaggtccttactatgtgtgtttttagtctatagcctctcccataaagggtagaaatctctgtctaaagatagaagactatacatctctagagatgtcttatttgatgaatttatttttcttttttcacaagcagcatttatggatcaatccaactcttctctgtccaccaatccaactcctacctctcttaacatctctaccataattcttaccttcagtactagttttcacccttcaaatcccactaatccacccaaccaccacatcccatgctaccaccaccaaatcctcctcaaccacaaactgaacttgttttcatcattggtacttcccaacctgagcctctcccgacttctcccactccacaacaagtgtctcttcctcaaaccacatctaagatacaacttcccaccactactactgctacaataatcactgtagcaactaataatcaccctaactgcacaaggtccaactggtatcactaaccctaaggtccttatggcttctttgcatcaagaatctatcaaatctatgcaagatagcaagtggattgcttctatgaacactaagttttatgcaatagtcaaaaacaaaacttgggtgttagtacctcttcccgatggttaaactcctatagggtgtaaataggtatataggataaaggaaaatgcagatgacacaatcccacaataaaaggctggattgattgccaaagggtatcatcaagagactggaattgattacaataaaacatttagtctagtcataaaaccagttatcgttcagattgttcttacaattgctattccaaaaaggtggtgtataaggcaattggatgttaataatgcatttctaaatgatgatttgtaagataaaatttacatggtgcaaccccctagtttcatagatccagaacatccttagaaattttacaaacttaccaaagccttctatggcttaaaacatgcactaagggcttggtttaaaaaattattcactattctacttaagcttgatttgattttatttcagcaaggtcagactcatttctctttgttaaaacttcatctacattcattctctatgttcttttctatttagataatattctcatcactggcaataatgacagagttgtctccactttcgtaaaagctttgagcaaaacttttgttttaaaggatcttagatccttatcatattttctaggcattcaagctatttcaaatgatatagagactgtactttctgaacaaaaaatatattcaagatattctatgtgtaaagctgaaatgcagggtgtaaagacaaaaaacactcccatgaataatggactaaggctctctcattatggcagtgaccctttggcagacccaactctttaaagatctatagttggtgctctccgttatgcttgcaaaatcagaccagacattgctttcagtgttaacaaggtttgccaatttatgcaaaaaaaaagccactagatagcagtaaaaaagattctgaggtacttggcaggaaccttaaattatgtcctgcaaatgaattttgtgtcttctcttcatcttcaagcctattaagatgctgattgggcagccgatcttgatgatagaagattaacaactgactattgtgtatttttgggagaaaatttagtagcttggctgtcaaagaaacaaagcaccatttctaagtctaccactggatttgaattcaaaagcatggcagcaattgtttttgaaatcacatggatacatctcttctctcagaacttcaattgatgtcctctctctccctcagtttggtgtgacaatctcaattctgttatgttagcagcaaagctggttcttcatgctagagcaaagcatattgagattgacatatactttgttcgtgtcaaagtcctcgacaaagaaatccaaatctctcatgttctagcagaccaccaagttgcatactgcctcaccaaacctatattcaacaattgctttccaaagcttagattggcgtttggttggaggtaatgaaatggaatggaatggaaagga

SEQ ID NO: 110561 - DNA, 2837 bp, Cannabis sativa
  modified_base (1275)..(1275): a, c, t, g, unknown or other
atatatatgaatatatatatattatgtctacctaatttttaatctccgctcatctagacataagattctcttctccatctcttatgacccttactctaatgtaaacattttatttgtctatttatatttatgctcttttgagtagctgtagagttagtctgttgcagggaattgcacgtgaatgtgatcagcatatatcaattattttagttattctgatattttttttctgcaataatagaagtaggcactgccttcatgtacaatattcccatagcataataaccatagtttctggtttattattttgtttacactctcttatatctttctttctctctctttacatagtattaatgaagcttccttaatcaggtatgtggatgttatattaatacatattaagtatatatatttataaaggagatgataataagattaagcatattagaatttatgaataatatatacagatatagaaatgaagaagggtagatgtaaggatgccttgtccctttattgttattatttattattattattgtatgtatctgtgatgtgctgcagcagtgagtgagtgtaatttataaggacttgtccttatcactatcattaatatcacctggcttctataatggtattgcccatctagccatctaaaataatcacatggaggattgggattaattagtactacatatacttattaattcttctacatataaatgtgtatatataggtctctattttggtatatattgtaactacatctttctctttttctctctctctctctctgtctctgtctgtctgtatgtgttgtatagcttgtagagtgcaatgtgcagccaaggatgacttgccgatagcctctttgttattttcactcattagtttgtattatagagtgaatataattggtattagttggcaagttggccttggctacatgtttctttctgctcatcatcatcatcatcatcatctctattcgcttctctacttctcatcattaccaatttacaggtacttctttctaaccattgattattacaatatcaaaattaattaattagttttgttttatctttgagattttttgctattaccatatatgatcagatacagtccttaccaaagggtaatatatataccttcatacttgacatttatggggtatgatatcatttagcatattttctaaaagtggtaaggaacagtttatcatcgcttaactgaattatgaatggtgtgtactctctctctctctctctntatatatatatatattctctctatatatgtatatatatatatgaatatatacatgggatatgatatcgtttactcatttagcatattttccagaagtggtaaggaaaagcttatcatttaactgaattatgaatggtgtgtactctctctctctctaaaactttatctatttttattttattttattttatttgaaaaaaaagagatatatatatatatatatattgggttaattatggggtacttgaagcttaattatcacatacataattaagaattatgattataaaataggcaggctgggttggatgatgagtactagatgattgaatttgcatgcagttcatgattagtcacacgtgtaaatgtaatgtatatatatatttagaaagagaaaatataatagggatttaagctttattaaatctcaatgattagataaatataatatcaaattagtgaattttataatactgaatagttcgttggattcaatgccaacttgttttctttaatcagattttattcgatttgattatcctttttgtagcatatcattcacttaattatataataatgaacaagtacaatccacacacacatatatatatatataattacatacacatgatcataattaattgagttatctataactccaaggctgatcttactaataattttaatgagatagagagatagatatgagttaattataatctgttttatgtttggattaaataggtgtacttaaactaattaaattgacttattagaggagaatttattatataaattatatcatttgtagtccttacaacacttacatgttcatgatcccattattatttttctctcttttgaaaattattgtaaattaaatagggctattgtttttacaggtttgattttgaagttatgtaattagtcacaagttagaatgaaacaattatggttttaataatccctagtctatgcatgtgatgtgataatgtgttattccaaatctatatgataaaaataaattcgatttattgttttgctttcccaaaaattagaatcaattttgaccacattaattctatgaattgtcttttggaaaagaaaaatgttaggtcgtgtttagaaaattacattgtaattagatttgtgtgtaataagaagtaattacacaatttaacatgtttgtttgactataattacactgtgattatgtaatttgagataattgaggagttttaattacactctcccaatgagaatagagtgtaattactgtaaactttccattttaaatataaactactagaaaatattattttactgtgtaattactatctattttgtcaaatatgatattagaaattcatatgtaattatcatttcatatataaatacatcttgtagcataagtattagattgtatacttaccaccttagtaattacactaactagtaattacactgttacctctaaacgcacaaactagccttagtttagggtaatttgagtgatttcgataatatgttcatgtttaaattatttagtttgtttttcttta

SEQ ID NO: 110562 - DNA, 11041 bp, Cannabis sativa
  modified_base (10971)..(11005): a, c, t, g, unknown or other
ataaaatgatttctgatctttattaattagtaaatctaattatattaaaatggcttttatttagggcataaaacccaacacaaggaacatccaaaactagaatttttgttgtggtgtaagcattaaagttctgaaaaatgttgaataatgggggtgtttggttccttgagaacatagtggataagagtaaagaagacatgaagaaaccatctaatatcttagaagtgtgcaagtttatagatgtatttctagatgatctaccggggatggccctagaaagagaaatatagtttgaaatagaactcatcctaggaactgcacctatctcaaaggctccatataaattgcattggtagagccaaaagagttacaactccaacttcaatatcaccttgataagtacatcatcaaactatccttcactgtggagagcccttgttctattcctaaaaaagaaagatggttccatgagaattcacattgaattttaagaattaaataaagttatgatcaagaaccaatatctgttacaaggatcgatgatctatttgattagttgcaaggagcagttgtattctcgaaggtttaatatccctaaggtgacattcagagcatgttatggtcattatgaatttttagttatatcttttgggctcaccaacgtacctatggctttcatggatctcatgcacaggttaattggtgaattccgggataagtgtatgatcttgttcattgatgatatactcatttattaacgcttcaagaagatcatgcagagcatttaaaaaagttctaaaacgctaaagagagaaaaagttttatgctaaattctcaatgtgaattttggctaaatcatgtgagtgttctaggacacgtggtgtcaggggacaaaattttggtagatcctacaataattgaagttgaaaacggtgggaggctctgaagaatacacaagaagtccgtagttttctagggttagtaggttattataggtgcttcatggacggatttgccaagatagcaacgcctatgacttcacttacccgcaagtatgttttgtgtggagacagaaatgtgaaattagtttttaaaagttgaaaaccaggctaacaatagccctagtactagaaattccagaaggtatagaaagatttaccaactatagtaatgcctcgagttagggattaggagttttattgatgcaagatggtaaagtaattggctatgcattgtaacaatttaaaaattatgagaagaactaccctacgcatgacctagagctggccgtcgtggtgtttgcactctaaatttcgaggcattacttttatagagtctattataatatttatattgaccacaagagtgtcaaatattttttaacacggaagcaattaaatatgaggcatagatggtggtaggatttattcaacgattatgattgtgaattcttatacaattagggtaaagctatgatcatgaattatttaatatcaaatcacaagtaaggttatagatagccaagtggagagtgaaccacaaaaagaagagtttctagataaatgtgaagaaaaggttacacaggggatgagaaaacatctgataacattgatttgaattcgtcactagtattaacttatgcaccgcaatagattcataatttttattaataacatccctgcgatattacatcgtctacaagccactaaaggtttcttccaaaactcatcctttagaatcttgtgttgttggtgttaaatgtagaataaacccatatcatgcaatgcttgagggtaatcacaatggtaactttcaagtggtcatgtatgacgcttattatgggcgtcaatttcttgttgatgtgtcataataggactataatgtagcattgtattgggttaaaggtaagttttcttaattttccttttcttttatttaaacatttaggacaatatctaaattatgtttggggagggaaacaaattttatttcatccctcattatagataccttagtttctttttgtgtttattattttatttgagttttaatcattgtatcatttttgtgtgaatcaagttttcaatgttagttgatgatatgtaggaaaatattatgcaagaattttaaaattataattaaataaatctgtgcgctttgtttgattatgttagtagcttatttcaatccacaaaaaaatcgcatgtttttccatgactaaaaaattctttgcaaatgaatttggatgtatgcattgttgaaaaatatcttgtggtttgatgaatgaataaatcttaaacttgcttattaatacttcagatgaaatcctagataagatatgtgtaggaagacgctttaggtgtttttattggaccgtttatgctttcgagccaacctgaaaataactatctattgttacccttattgagcctaaaaaactatcagctttattctatgataccaaatacgagtcaaattgacatcatgttattttcattctcttagcaaattaatatgagaatatgggcaaataaaagagggaatggtttgtaatgggttactatgaattataagtaatttggtgttattgtaattagggggaaaatattgagaattttttttaaaaaaaaaatagtaagctacacacttgttatgcatggaaaaaatcaagtttggggagtgtagcttgaaaaaaataaaagaaagaaaaaaaaaagacaattcgatcaactaaaataagttcttttctcaaactttattttgtttcatattgggttctttttgaaagttgttcaggttgattctagattttttgagttcatatgcttatgggaatttggagcctaaatgacttatacctacccatttcctaagctttgctatgagtctaaagtcctatttattctcgagtatatttttgtctacatgagtggagagtaaagaaaaatgtatcacatatggattaagagttcgatggtaagcttttatatgcatatataaaattcagttgagtaatttttgtgattattattgaataggcatttttggatcgaaatatatttttgatgtagttaattaaaattttggattatctttgctaattggaattttggatttcatatgaaatttttcagaaattgaggctaatttactattgttgacttgattcattagttcatattatttgtattttttagttttctattattgtgaggttagtgtcagtctttactcgatggcaaaaacagattaatttttcggttagtatgtgtttttagtagtttttatgttttattgttcaatcttaagtttattttcttcttgtttaatggtcaagtacatcataagagttgaattgagagaaaacatactaaataatatgaatttaatggattttagagtttgtcagatacaatgtttgaaaatttctatgttttgaatgctcatcatactctgtttgtgatgaaaaattaaatataaaacttcaagttaatttttaactatgattcattcactttaagaaaaatattgtgaataaaagttcttgttcttcttcatccttatttcattttttttcatctatgtttatttattggtcatctttagtcaatatctatatgttttataataaaaaattgaaaagtgtgtttcaaatatgtgtaacgccgtaactcatagggacgctacatgtgtgcttttacaaactaatttacagttaatctattagtttaagaaaagtacggttcaattaaaaactttctgattaaactaaaaatataatttttttatacaaaataccactaagtaagaggatcccctatttataaactttcacaacttgattcaaaatcatatttttaaaatagggttacatttctaaaatataatcaaaaggatggatcttgtccattggcagccgagacaccgcagttgatatgtacatcactgggagacctctaattcatgactaatccactttttccttccctttacctgcaccacgaagcacccgtgagtcacaaaaactcggtaagaaagcaagtaatcacaaacagcgaataatacgagatagtataacaatgcatagcacacaattctaccatctacaaataagcgcttgtacaacacataattaagcattatatcacctggtcatgtagccactatttcaagtggacctcatattgttggaagcactaggaatgcacagaagtggtatctgaatgagttgaataaaggcgaagattcccacttggtggaatcacctaactagcgtccacagataatgaatttgccaatgactttcatagaagatgacgccaggcatgtccacttccctcataattacccttccataatagaagctcgaatagcaaacgaaagagtttccaagatcctcgaagataatggaagctctgtgaacatcattttcaaaggagccatcaatgccattggtctggtagacgccaatatgctaccatgtctgattcaactacaaggctttaatggggatacgttgatctcgatgggaaaaatacaactttcgatgactataaatggggaagttcctagaagcatcacgatatcatccttcaagtacaacacatttatgatagtcgattgtcctactacttataatgttatcttaggaagactatttttaatgaattttggagtggtgacatccatctggcatctatgctcaaaattctccagcaataccggaagcataggaactatcagaggagatcaaagaagtgcgcgaagtttctatagcatttcaacataaattgtacttatggtttgggaaggaaatgactctgatgcctgaacatcttcccagctagcacagggggtgatccaagaatatgagcttgatccacgaattggtgtggaacgtgtcatagaaccaatagagaaagtggaagaagtatgcatagatgatggaaatcccaccaaggttatccaattggggaagaacctacctcctacagtgatggagaagattgtttccacagttaaggaaaatagtgatgtgttagcctggagttattctgatataattgacattagtcctcgtgttattttccatgcatgaaacatagatcctaatgctaaactagtttagcaaaagaggagacctttagatccactgagggtagaagcagtaaaaacaaaagtagacaagttgacaaacattgaattccttgaggaagctcgatatcccatatggcttgccattcggtttcacagatctaaacgaagcttgtcctaaagaattgttttccacttctgtgcattgattagattgttgatgctaccttggggtttcaactcttaaccttcatggatgcatactctggctatagccaaataaaaattcacgtggcagatcaggaacataccagtttcaaaaaaatcaaaggaatctactgctacaaggtcatgccattcagattggaaaatgttggagccagttaccgacaaattatgaacaaaatgttcaagaatgttctagggaagaatatggaggtttatgtcgatgacatgctggtaaagtgaaaaaacatccaagaaccactacaatgatgtagaagaggcatttgccataatttgggagtacaaaatgaagctaaacccaaagaaatgcacttttggagtttcctcagggaagttcctaggttttatagtaagtttacgaggaattgaggcaaacttggagaaaatcaaagctcttataaacatgatttcacccaagaagcactaagatgtccaaaagttgacagggagaatagcagcagttaacaaatttatctccaaatccaaagataagtgcataccgttcttcaacgtactttgaggaaatcacaaatttgaatggacagctgaatgtgaaatagcctttcagcaactaaaatgacatctagtgaaggttctaatactatccaaaccagttgacggagagtcgttgtttctatatctggcagtgtcagatcattccataagcgccactctagtgcaagaagaaggaaaagtatagcttctagtatattatgtaagcaagagactgttggacacagagtccttatatcatatgatcaagaagctttcgtgttgcttactaattacttcacagaagttaagaccatactttcaggctcatgccataaggatactcaccaatcaccctctctgtcaagtattacagaagtccaagtcatcaggaagactcctaaagtgggtaatggaattgagtctattccacatacaatatcagcccagaattttgattgaaggttaagccttagctgacttcattgtggactgcacagggataaatgacgatcttgaaacgttagtcatagagagagaagttcagaaaatatacgtagatggagcatcaaatgaaaaaggttctggagtcaaaatcattttaatatctccacagaacatctagcttcaaagtggacttcaatttgagttcggagcttccaacaacaaagcttaacacgagtgctatgatcgctggtttacaactggcaatagtggttggtgttaaaaacatcgaactctacagtgattcatagcttgtagtcaaccaagtgtctagggagtactaaacaaaaggagaaaaaagtcgctagttacatagtaaaactcgggagctattgcaacattttaaacattattatgtaaagaaaatcccaagggataacaacacttttgtagacatgttggcaaaattagcaacagatccagaaatagaaaaatacggactagtccccatcacatatttgatgactccaagcatgcaaaatactgcgggtatccatcattgaccactcaacttcctggatggttccaatactcaaataattagaaataggtacaatccatgaggataaactttcttcacgaaaggtccagtataaagcctctagatacgtgatcatggagggaaaattctacatgagaggattatcaatgttgtatctgaggtgcatagtgggaacatagataagcactatcatgctcgaactacatgaaaaattttttagagatcacacatccggacccagcctttctgagaaaatcattcgtcaaggttatttctagcctactatgaagaaggattgtacaaaatatgtctaaaaatgtgactaatgccaacactatttgaaagttcgaagggccccaccaaaagagattactttcatgaacaatccttggtctttcactgtttggtaaataaacttagtgggatcacttccaaccagcgaaggaggattcaagttttccattgttgttgttcactactttgctaagtgggtggaagttgaacttccaaccagcaaaggaggattcaagttctccattttcgttgttgactacttcactaagtgggtggaagttgaacccatgaacatagtaacttttaagaaggccatcaactttgtaattaaaaatatagtgtgtagatatggacttcaacacacgatagtgtttgataatggaaagcagtttgatagtgatcaattcactgatttttgtgcaaaacatggaatcattaaaagcttttctgttgtagccagaacttaatcaagtggacaagtggaagctatcaatgaaatttttatgaccactttgaaaaagaatcttgaagatcgtaaagcacacaagcgggaggaacttccaagagttattttggcctacaaagtaaccgaaagaacttctacaggccacactctatactctatgacctatggatgcaaggtcataatccctgttgaatcgatagtgcctacacacaggaggaatacgtacgacacaactcaataacatgctctacttcaagaatccttagatttaattgaggagcttcgagaacagtcacatgtccaactttaaatgtatcaaatttttttgggaatttaaaattcaaagtcaagataagaagattcaaaattgcaaccttgtttttagaagagtgttccttgcctctcaagagcccggagtgagggtcttaggaccaaacggagaaggcccatatgaagttatagatagaattagtgatagaacttaccatttaaagagactagatggaacaagaatcccaagagcatggaatgctatccacttgtgccgatactattaataagctggaggtggtcaggttcttcttttttctttactttttattttagtactaatgtccatgtatgcctcaaggtaggaattatttgaataaaaaagtagttttcatttcatatttggtcttcaaaagttttgccatgtaacaagtgataaaaagactatctattaatcacatagggggtaccatatatgatattgtcataaataattttacctcatttaccagaaatagctaaaataaattctcaaatataagagtagggagtatcgcgtaaaataggaatctcaggaaaccggaagtaagccattaccttactattttagaagttaatttagcatttaacgaagcataagagtagggagtaccgcccaaaaccggaaccttagggaaccggaagtaagccactaccttattatacatggaatcaattctcacatattaaatagttaatccaagttaatttaaaattgaagttcatgcttcatggtacccagttaaacaaaaccagaatattcaggctacttaaactaattgatctagctcaattaaaaagttagtccaaatagccctgaaaataagtgatacttaccaagaaattaggtccaattcctaagtaattatttagctcaggttaattaattatttgaagttttagagaaacctttttgtaaaaatactttcaaatatttttcttcaaaaaaaaaaagaaaaatatttaagtctaagcgcttaatcgaaaacctaaaggtttaaacctttggagccagaacctcacgaggttagaagcattaaaacttagcaaaattttatagtctaaagtgcaaatatataaggaattaattaaacagtactacgtacttaaaaaccctgtgacaagggtataaaatattgtctctgcacacacaacaagtgggacccttatcccccaaaaaagcaaaaaaaaaagtaaatatagagtagataggcgaggacggttaaggctgagctagatcatttgatgattgtgcatccttggttgaaacatcatatgagaccttcgagatcacaacggtagtcaagattggaaccttagaggttggaagcgtagagtaacccacgttctcacctataggaatggtagttccaggattgactacttttgtcttttgagctgcttcgttagctttgtctgcctccaccagtgccaatagcttaggcatcagatcttccctatctttagtatcaatgagatctattacaaatttatcatgctaccagatgatgcacaccgagtagacaaatactttttctagagcattggtgtgctgggcttcttgctcttgtttctccaagatttcctgctgaagacgcctctttaaatctgagttttcaccctctacatcggtgaccttttttggggactcttcatagtctttaacagattattttaatttattcttagcctcctcatccctttaaataacctctacctcagctttttttgccttctgttgcaactctagatgatgcttaacctttctttctagaatgatttcattaatgtatttgtcctatataattttagtctgtttgtcatactcaagagatagggtggtcagatgtttgtttttctcttagacatcaagcttggcctgcttcaagtcagcttccaagtctttgattatagtaagagccacgaaatgcaagtccttgtacttgtctccacggtccctctcactcttagtcgccttccttttgcgagtcaagggcttgtccaaagaattagacaccctttgctttacaatagctttcatcatggcattggcttcagctaaagcattggcagcttcctccctcttcagttcggcattcgcatgctctaccctcaacacctctagctcatagcctagctaaattaccatggagaaatttctctcccccatcaagcctacctatgaaacggaaaatgcaaatgaataaaacagtgtgaggtacaaagtgtttattcaagtcaaaagaaagttaaacttataacattagcttgcgacccctgcctcatagcatcagccacgtacattggatccctactcaccattatggcaaacccgtcagctcttagcctacagcttatagtagcactcatttccaattggtcagcccaaaacagcaacacattagttccaaccttaggacgagcttcttcgtcatctcagttctatttattagaagagggcagggctcatcccatttttcatagtcatcatactcagcattacatctagaggagatgctgctagtcagtttcttcatctcttcgtactcgatgccatgcctcttttgatagagttgattgatggcctctatgcgtgtgttgtccccttctgtcatcgacaaaggcctgacaggaaaatttaaaggtgccaaagacaatggaggaaatttagttatttccctggatagctaggtagaagtggttggaatgaccttagatgttgagggtggtggaggaggatcctagttatcccttgaaattttggtgctttgcctaggcgaccttcttccattaaatgcattagaccccttccaggactaagtttccaaagcttgccttcttgaggctaccaattgtaagacattctccttaatctccacccttgccttctttttggcaccacctttagaagagccagactaacttttattgatcacgatcggcccattgtaatcagagttatctctagagttctctatagaaacatgccttaaaagttccacaactagaacaagttcagtcagatcgatgatggaagtagacactgttggaaatattttaccannnnnnnnnnnnnnnnnnnnnnnnnnnnnnnnnnnatcctaatatgaatttctaaaaaaatgaaataaaca

SEQ ID NO: 110563 - DNA, 7874 bp, Cannabis sativa
  modified_base (780)..(785): a, c, t, g, unknown or other
  modified_base (1437)..(1437): a, c, t, g, unknown or other
ctctttctttaggctagtgattaacaataactatgttaggcatttcgttaaacacatggaaggtgtgcccttatatacatataataaacaaaaaaattcaacttaaagaagaagaaaaaattcacaaaaattgagggtaaatgagtagaatcaataataaacaatcacactacaataatattcttattaaattttcaaatctcaacttttattaatgtaatttgaaaacaaaacaaaaaaaaaaaagaacaagaaaagaacaccttacaaatcaaagcttgaaaaaatagtaatagcaacagaaagaagtttgagagagagggagatagcttgaccaagagggaaataaactcggagtgtgtctctttctccctagaccgcgacatagaaagttgagtagaggttttacatgacatcgaggggttggggacaagagggttgaagacgagagaggttggatgcaagaagtaaaggtggagatggttaccgcttgaggtggatctgtgtgaataggaggaggaagaagaagaaatagtgttagccgtataattttaattatcaaactttataatagtattaaagaaaaatctaaaatgtaaaaatgtaaaaagaatagagggcaagtataaatgttgaatattggtaaaaagagtcacttagtgtaaaaatccctagattttttcaagaattattgacacacattttatttttggccaaaatattgtgacgcaatccaagcaagtttactcacataaaagtgaagtaagacatgtagggtgnnnnnntaaatatttataatgagaaatttgaatatatatttgtacataatgaattattgtacaaagtttacatagacatcagattgattgaaataagacttaaatattgagaaaatataatcataatttgattatagcctagaatatagtttatgaagatttataagtgtcacataaatattgcaattaaagttatttatttgaagctcctaatatattgagaatttaaagtatgccttatctaaatattctggaaaaaaaaaattgatacatgtcttaagtgatataaattcaaagtcgcgcacactatatgacaaagatctttgtatagaattaaagacatgtaagtaaattattagttaaaaaagcatatgattgtttatgcaatataaatttataaattatacattgtgatagactcttgaagagtttttgattagattataaattattgaagaacaaacttttatttctttttgtatagtaagaaatattaaatgtatatagtttgttcattagtagagaagtcctgaagtacttcatatgtatcaataattataaatatatgatcatttgatatggaaattaagattatacaataagaatggaacaaatatatagtctttggagtaccatcattatcgcaaataaaaatttntattatcattaatgtgttatgttcatattacttaaaatttcaaacttatgaacaacatagtatatacacacacatgcataattcaataagttggataaatattgatgttccaaggacccctcatctataatttaaaagtgcacacatacactctgaaagagttatagtaaatatatgatcatagataatataaattgatattttaaaagtgataacaataatcttatgagatatattatcaccaaaataattatagatcatatgtgcatgagggggagatatattcatgttgtactcttttttccttagctcaggttttgtcctactggattttcctggcaaggttttttaatgagacaacttgcaaatagttatgaatatgaaatatatatatatatatattgcactcttttttccatagcttaggttttgtcctactagattttcctgacaatgtttttagcaagacaactttaaatcatgttaacatacttgcactttatgaagcaagtagaaaatttgtgggagtgagatcatgacataacatattcaggaaacatatggattacactctataaagaagtatcaacacaagcaattctctatgaagataatacgacttgcatcgctcaactaaaaagagagtatattgaatgagatagaactaaaatacatttcacaaaattcttcttaatacaattcaagagaatacatattggtatccaacatattcaatcaagtgtcagtcttgcagacttattgacaaagttattaccatcaacatttgagaagatgacatacaagattgaatttcgtcgattagaagatcttcacgaatgcctaaataaagagaagttaattcatactgtactctttttcgtttgaccaagttttttcagcaagatttttaataagaagtttttatggacattcaaagaaaaatattataaaatattattaatagatgtccaaattatcaaattaattatcatcataaatggttaattgtatttctatttatttcattgatttagttttccattatactagttatatttttgtataaacaagagtttaccacattaaaataaactactaagaaaaatatcattcactctctcattctattcttttctttgttttttctcttctctcatttctttgtctattttatattatttataataattttataacaatttttttttctttgtttttttaggaattccatttttttaggaatccccttcttagtagtttttcttagtagatacataaatatttttgcagctatttacacaaatctttatccgataatgattgtatttaaaaataaatattgtggcttctcccgcttctccttttttcttcttccacaattttgatggcaattactacatttccagctcaggactataccaccccatcaccaaactccatggctgtgctctctcttccattctcagtctcaccatatttcccctccaaattcagattaaccacggcgtggttttccctctcttcccacctcacacccttctccccatcgtctccaactcctcctgcccacaaaattcactgcctcgccactccccttaagcccacctgtcctccaaaacccagggttaaggttaaggcctctgaagctgagctcaaagaaaactggttagcctctctatcttgccctttacctcgagatttcggaacctcccatagcgaagcaaaagaagaagaagaagaagggtccgagtccgacccacgtaatgtgggctctgattgggttattggtattgacccagatctttccggtgcattggctgtcttgaaaagcgacgaccctgaatgtcctgctcaggtaattaggatttttggtctgaattttgttacaattacttgtaagagttactttaggtaatgtttttgactctctccgtacgtaattaggttgaaaattaagtttttctcaatttgctcaaactggttaattgttatatgaagattaccaaattatcatacattacttaaatcctccctatgaacgattaatttctaaactatagtttaaaaatttgaacaatttgtgaagatattgaaaattaataatatcataatcttttcttctccccattttacctttaggtgtttgactctccacacttgtcagttatggttggtggaaaggttagaagacgtttagatgctaaatctatcattgagttacttcgaggttttaatgctcccgtaggtacgtttctgttcaattttttttgtatgttttattttttttttcatatataaatataatttatgacaatctaactcaagatggcaaagtgggtttctgtaaatttaaattaatccacttatatctttatactctattgttataccacgagaataatatcaaaattaattagaaggtataataataataatttttctttgaagtatatagttcagttcatatctattttattttctttcacttatctgcattcgaacaatgtccacctaaacaagactgtataggttacacctccaagaaatgtcacgattgttatgtcaatgacagaaaagataaatgttaaaacataaatctatctcacacaataatttacttggaaaactacaaaatttgagaggaatcacaacccattagaaaaattaccatttgaaactttgtacttctctgttttctacacaataacccaatatatccctatacttactctctcactgatacctttatccttttctagtagagagtttagagctccatatttctaagaatacttgtacaatccatatttatgtgatatacattttgtgctcacatttctctcattccctccgccatgttttgctttttactttgcaaattacccagctactaaaatctcatatatctgcaagttcttttgctgtttttgattctggtgatgtaatgtgcacaatgcatttgtttcattcttattccatcaagttatacatgtaatggacacagtattctactattcatttcttgtccatgttggttaatttgctttttcctctttctcttagcttagccatccattaggctatgctctgtgttcttcatttatcctagaattccttctgtaatttgttgtttgtcgtgtttcaggcactacagcatacatagagcaatcaatcccttttccaaaagatggaaagcaggtaaactactatctgtctcaatatactgccattttctataattagtatttgatgtagaaccaggttcttttctcctgctactccagagcattatataattttaggcaaattcatttgcacattgttgtctgtagttcaattactgttattgtttctgggaatttgtattatgggctgtacaggagttccaagtccttgagtgttgaactttaaaaaaaaaatgaagaaaaatgagtcagatattttgtcatagagctgggcaattttatttggtaaaaatagctgaggtattacttaggttttttatctggccattgtccaactatttctaaagaacttttggatgtcatattgatttcgaaggagctaagtaatggtttcattctcttctgtttaaattctgccataactttggaagcttctgattttactcaacttagcaagctgcatctacgatgctactttctcaatgtgactgactttttcaacaatcctcagtattttcccttttgtttttgaagggttggtggagtggaggatttgggtatggcctatggattggaatcctagtcgccttgggattctctgttgtcccagtgccatctttctcatggaaaaagaaatttgaaatcgcgggaagctctttttcaaaggtatgggtgattctacactgtatttttcatgcccatattttatttgtacgatacttgcagcatatacaagtgtgggctttttaattgtctgatgatgtattgaaatctattatgtgtaattaactatcatatatccatattctgtatctcatgggaaactatagcaagcttactgtttaagacattattatttacattgttcagagccatgtctttattaacattaatgttaggtgaagaaaaatgtgctattgcttacatgaaaattcacattgctattgtttttatttttttattttcctaaaaagaatttaattctcagtactgaaatttttcttgataggatgatagcaggagactggcatcaacaatgtttccttctctgagttctctattacaacgaaaaaaagatcacggtacctaactcatatccgaccaattctcttttttttttgtgtgtgtgtggcactattgctggtgttatatgtgatcactgctatgataattaagttaaagtcagacatgaaatatcgacaaaggattcaaagaagttatgatccacaaaaagagaagaaactgaacagttattgttggacggtacatataactactgtaagatgtgggcctttgtctgctgtaaacggtagtaaatgcttaaaaaaaattatagacgtaaatgggaagatgtacattttggccaaccagatcagaaactgaacaactcattaggaacactcaaataactactgtaaaattcggggcactctttttgaacatgtatgtattgtctatttgacgtactctaattttctgttgtataggttttaggcaaaagaaacgtcactctaattatgattgcggtatttccatgggaaaactcccaaaataacttagtttttgtggggttcatcatgaaaacctcatctattaactgatttcttagtttgtcattctctttagagaatttatattttgaaaagtttgaaaaaatggacagatgaataaactgtattctgattccaaggactcaaaatacattgcttcattttatggcattctttcagtgtaattttttgttctaatgtttttaaacattgttagggagagctgaagctttactcattgctgcctatgggagaggcctaaagatagaatcggactcatcattgaccttaaatgaactagtttcttagaatggcacatcaactatcaatcttgtttgttttatctccattccaggatttttcatgctcctgaaatcgattgtttggaagaatcacagaatacattatcactgtaaaaataactgatcctgctaaccaaaatagctgcgattgatgcatctacagcgctactgttgcacgaatactactattatttttacaagagagaagaataggtatttattggatttgaaagtggactctgatgagcaagaagattcaagttgaactaccattcagagaacagagataatgatgaaaggaaaactagcttattagaaattcgaaggtcaatggaagtaattcatggccagaaaaaatgtgttcttgtattacacaagtggtggtggtggtgatatttgtcgataaaaataaaaagtggtcaccaaaaggtgcaaaacttgagtcttatgaagacattggtgctcaaggaatgagttcagtcttccgggttgagctgccacttttattaaacgaagacaattatagatggccaatttggaatggaaatttctgttctcggagagattgtacctttgaattatttcagtggttggtttttttcaacccaactttgtttttgtttgtttggaagctttgtacaattgttttcaattgattaataagccttacaatctacaattatttagtgattacaaactgttcagctttcataagattttatggatatagaccatatgttatgtaaattttgtagaatggacatatatacataaacttaatttatgtaaggtccagtattttttttatgacaaattatgtctagtcatgcccgggttctttagttgttatgtttggagtttattgtttagtctatacattttagtgtttttttaagtcaagtatattacagttgtttgttttctggtattgttcttagttcagttaggtataaatattatgatctttattctgttgtaactaacacctttgatcggagattgagatcacgttttactttttacttttccactctttttgttcttgtgttcttgtaggtcgaagtttggaactttgtcaatggtgatttaaaggttctgaatatggcctatagtcgatgagtgtgaactgaagagagttcaatcatatcttcgcaaacaaatctgaagatgtttagatctaagattttgttgaaggaatttcaacgatcgagaagcaaggggatcttgccaagtttgccaagggatttagcattaaggaattttgcaatttgtacgaattgtttgttgtaaacttgcaaattgtaagaaatcaagctagcaattagttgtaaatttacatttaatgtattttccatttactctagtattactaggtgttcacattgtattatatataccct

SEQ ID NO: 110564 - DNA, 1890 bp, Cannabis sativa
agatgaaaaatcatctatccaaactagtttatcatccaccctgagtgcacgaactgctaattcatgtgtacaataaacatgaatcagagatgcctcaggaaaatcggatagcaaactagcaaaaaaaactaggaaagatcctactttaaaacaaagaagaaggatctcctagaaaataatcaactagcctcaaaagatgtattaggtagcctaatgcaagagatcaatacagtgcaaccactaaagctacataagtttagcttctgctaatctgcgaacttccctacaaaaccaaagaaaaaaaaaataataattagaacatataataataataataataataataatataatagataaaataaaaaaagatagaaacttatctccgactcgaaaatttgaagagagatcttgttcagatgtatgcataaggtccaatattacatagggccggccctgatgaggttattgcaatgattgtcgtcccaactactctattacgacaatttttaaacctagtgcaatgagaaatatcatcagaatagccttttattatttttaagacattttttttagaataataagattgccattagcaagcgttgaatttggctgtaaaatttttgtagatagggtcttacataattacaaagatttttatgctctaatgtaatccaagacataaattactgatgctcctagacaagctaatcactttagcatataagatggctaggaagacctaatgacgagatggagagatggtatggaattgttatctacaagtttctaagttgtaatttgtttctgtataattaatggaaattacaatcttttaaaaaaaacatattgttaagtatcccaatgatgtgggaatcaatgaattgtagtggtggaaatagttgttcttttgatggcttacccatgggggaaaaagaaaaataggctaaaaatgagttttccatatattttgaaaacaaagattttcttttttataatttttaattgagtttttttgcggttaaaccatttcaactattattttataacttgctcttccaagcttaaattttgttaataaaactctctaaactactaaacggttaacaaatttaatgtgtcatttatttttcattgttaacaattaatatggactgtttatgttaattaaaatttataaagattattttaaaatctataatatatttttttataatattatttaattttaaaataaaattttgaaatagtattattaggtgtatcaatataaatgtgtttatatgtacaaaaatgtatacataagcagtccatagtgacagttaaccggataacaatttaaatttgctaacagttcagtagtttaaaggttttaccaccaaaatttaagtctggagggttaagtgcaagtaaaacaatagttgaaagagtttaactgctaaaactttttttaattttcacttgaataaatggtaaacttattgtgttataaatgaagtttgatagtaagaattactttcctaaaggtttttcttttaaccgtatatttgagactaaatgttaaaagtaaatcaatattatagaattgtaaattaatttaaaaaattagagtttttcatttctaaatttatagctgcaggcaatcatcttttttcttcgaccaagctcgccgaccttctctgggcataggtacagcttggttggggttatgttttgctattgtgattcgatttttctattacgattagtcttatttctatgacatagttttaaatattttagtcttgtttgtatgacatgattttgttttgttttgttttgttttatttcgttgttggtttttctttgtttttcgatggctcgtcatcaaatcactgttagtggttgggaa

SEQ ID NO: 110565 - DNA, 1804 bp, Cannabis sativa
ggaaaaatgatctacaacataaattattaatcatctcatttccaacgtcttccacctcaagattgagttctggcttggaagaaatcaacccatttgccatccaaaggtgaactagtagtgtcctttctatttgatgatcctttggaaatatagcacaataagagaagcaacgtctctgctctactgaaagatgaaggtagcttaacttcaaagcaggcaagatcgaaccttcctccgataaattccaaagctcactgtgcataacagaaagccactccttctcatcacttttgaaacacattaagcttcctaaagcttttgctgctaatggaactcctttgcacttcttcactatctcttttccaatttcgacaagcttaggctgctcttctctttggttaccaaatgcacgttgcttgaacaataaccagcagtcatcgtttgataaactagtcaactgatgcattggtaccgttcctatgatggatgcaacccttttcagacgagtagtcacaacaatcgaggcaccttttgatccacattccaatatgcattttaacttgtcccattcctcttgatcttcattccacacatcatccaaaacaatcaagaacctctttgttttaagcatgtcttgaagttgattctgtagaggatccaattccattgcttcacaagcttttctagttccagattctatgattactttgatcaatctacgcacatcaaagtcttcagaaacacaaacccacatcttcgacttaaaatgcgctttgaccctctcatcattgaagacacattgagcaagagttgtctttcccatgccccctaaaccaacaatacagtaaacagaagtatcattacaattgatggcatcattaacaagaaacctaacaactctctccttatcctcatctcttccatacacatgtggttgagtagtaacagaagagtttacattgctaaaaataaaatattgaataaagaaaatatttggaatatgtgttactacatgcatctttataccctaaactaaagactttcatgtttgaagtcatttatggtaaatgtaataccttataagaaagaataatatatataatgtgaatcaagatttcctgttaaaaattagtgtctcatactatgttaaactaattaatctaatttatattaaatatgtgaatcaatataacattgtaactacacaagacaattagtctgagttgtgagtccgtgcataccgtattgacccgacttatattgtacaatctttttaaaatatgaatcgtactgtattatgtcatgtaataaaaaaaatatagattgtatcttgttgtgccaatcttttaaaaggtagacccggcacgacctataggtctggtatatatttgtgtatagtgctggcttgacttatattgtacagtactttttaaaatatagattgtaccatattgtaccatatcataaaaaaaatacgagtcgtatcatgctgtaataatattttgaaaaagtagacccgacacggtctgtaggtccagtatttttgtttagtgttcgaatttgtgtcgtgttttactcctactgatctatttttcttaaaagggatagcccgttttcatatttgggctcgaatttcgtgctttattttttttacatttattgttaaaattaataatataattactaaattatatatatttttcataactttaattatatttatatactttttaataatattttacaaattattatataaattaaaaatttagaattattataatttaaatatttacttataaat

SEQ ID NO: 110566 - DNA, 5115 bp, Cannabis sativa
gaagttcatatttaggttgttagatcaacatacttgtgagtagatctaagttcctggcaaaataacttccaacagttattgcgtgattttttacctcttcttttaatgcttgtgcccgttctttgtctaataatcttctttttgctgaacgcgacggaagtttagatcaatgtttagggcatgtgatattatagaaggatcgataccgaccatgtcctcgtgtgaccaagctaaaatgtctaggtttgctctcagacattttatcaaagctaattttacttcaagcaacaaacctttgccaattttgaatttcctagtcaggacatttggatcaatttctagctcttccaattcttccgtaggcccaatgtttgtatttggttccccaagtctgggatccatatcctcgtccccaccttgggtgacttcctattttgcaatgctttttcccctgtccgaactctggctagaggaatcttcctttatggccttggttagggcaaagttatagcattcccgtgctacttgttgattcccttttaggcaccctaccccattcttttttggaaacttgatacacgaatagaaaattgatgtgatagccttcaggtcatattaggctagtcggctgaacatggcattgaaagctaacggaacatcaattatcagaaattgtgccattacagttatgctctttggagctcaatgaggggtaggcaaatttgcctcaaaggtgcaacactctggccggagaaacaatacaccggttgggtacaagggatcagatctttgagttgaagtcccatcttctcatatggtgtcttgaatagaatattcgcggaagctccattgtctatcatagtccgggccactattttatttgctatctgtactttcatgaccaagggatcgttgtgcgggaagtgaacgtggatagcatcttcttcagtgaaggttattgttggttccccttcccgtggaatttttggctttctttcttctatgaccaaacctacttccttttgttcgtgctataaagttcgggcatacctctcttgagcttttctcgaatctccagcaatgtgtgggcccctaatattgacttataaatgcccgtccacgggtggaggcattagtaggtcttgattattgtctgcttgggtggcccgttgattctgatcggccttgacgtattttgcacgtgcgggttattttttcttatcaagaatttgatttcccgctttacgttgttacactcgttcatgtcatggccataatctccatgaaaatgacaaaatttagacatgtccctcttgcttatgtcctttttcatgggagcaggttttttgtatgggaccatagattaggttgccatgtagattgtctctaggtcatcactcaggatagagaaggcagtgaatttggaggcattttcttaggggtttgtttggctttccctgtaaactttcccttcttcccgttgtctttcctgccattgttattggatctttttctgctcggagttgagctattagggtattgtgggctctgagcaggcgctcctgctaaggggacctgcggctagcctgacctaggttcgacatctactcgctgaatggcctcttcgagcttgataaacccatctgtccggtctaagaactctgccatagatcctataggaccactcttcttaatgtctatccacagttctccaagtacttcaatgcccccagtatggcgaccaacctcccctctttggttaatcttgctactttcgtagtttctgtcatgaacctgcttatgtaagctctgaggggctccccaggtctttatttcacttctaccaggtcatctaaatgtaatgggagttggtgagaagaagagaactacgcatggaactctaaggagaaagctttccatgaattaaaccttcctggtggtaacctaaaataccactattgtgcagcttctgaaagtatggcagggaataccctacacaacacatcacctcataccccttgcaaatccatttgcatctcaaaatatttaagatgtgacaagggatcctccttccctgtgtacatcttctaggtcgatatttgaatttaatggttagcttcaggacaggtgatctgcatgcttggtctagctcgagatcagtgagtttttgatcggccaggccttggaacatattttttagttcatctaactgtgcttgcacagatgggtgaattggttcagcctcttgaccgacctgtgtcacgtcaagttctcttagagttggatcttggatgggaatacctagttgagtggccggttgaacgtactattcatccagaactcttcttctgttcaaatcattcctgagatcatgggctgtacccaatctattgaatactgaagcaccaagtggcctcagtgattaactggtttggccggtaggttggccaggtcgtgtcagtttggatggagttattaagtgaataattagttaggaaagttagggttattaccctaaaacttcatatggtagagtatacgttgaatgttttgtatgtatatacatgtcaagagttatgtgtataagacataattggattagacttgataaacatcatcaggataaaccactgtaagagcatactgtatgtattatgtatatatgagtagagttatgcgggtaaggtataataaggttagactcggtaacaataatcgagccaaacgttagtaaggccttaaatataaaagagaggtgtgagcataacacgtaggattacgctacatagacattattataaggaatagtgtaatttagtgcgatggcacaatatatatgcagtagcatactgtatgaagtgtaattgttattataattattcatgttgtattatttttttgtcttgctggccttggctcacaggtgttctaatgtccaggcattagtaaagtggtgtcagttcaactatgagttcgagggttttgaagatgagttgtacatgttctggccaagctagaccacgagggttgggtccaacaggaattgtatagaaattccattttctcgcttaggtcggcctgtttgaaataacttgtaatattttgaaaaaaaaaattaagggatctcggatatatatctttaaattatttttgtttatagtaaaatgtcgatgtttattgcaaggtatttattcaaccaagttttatatttgttttaaattacctggcttatggaccctaattaacgagattagtagtttgtaatcgcgacacgcgacgtttctctgagtaggacgttatagctagagtgggtgaaaaaacttcaatgataaagtcattggcgcgcagcattgtgacttcatcttttagagcttgtgctcgctctttatctagaaaccttcttttctgctgtacaagtcaaaatttttgatctatttttagggtatgaaaaattactaatgggtcaatccctaccatgtcttcatgtgatcaggcaacgacatcgaggttttcgtttagaaatttgatcaatgcaaattttatttctggcattaaaccttgatcgatctttaacttcctggtcggaaggatggggtcaatttctatatcttttaattcctttatcagtctaaagctctctgtaggatccccaaagcaaggatctacgtctacctccctactttggggtgaacttcattgccctttgccagactcttggttagagctcttgacaggcattttttcaatcgttgctttggacaaagccaagttgtagcagtgtcgggcagatatttgatctccccttaggcatcctaccccataccttgttgggaactttaagcataagtaataaattaacgttactgccttcaagtcgtacaaggctcgtcgggctatcattgtattgaatgctaatggcacattcatcactacgaacagtgccatcaatgtccttgttgtgggacatttacaacttttaggggcagtcggatgtatcctaagggtggaagaccttggccaaagaactcgtacatcacttgtgtacagagtactagatctgacaattggagccccgtcttttcataggattatttgaaaagtatgtaggaggaggctccatggtcaatcatgcacctagaaactgtcatgttcccaatttgtgtagttatgaccagtggtcattgtgagggaacctgacctgggaagcacctccttctgtgaaggggatggaaggctctacaagctcaagctgcatggaatctctttcttctacgaccaggattggccttttttctcatgaaaaagggtccacgcatagcgctccatggcctttatggtttcaattactatatggtgtctgccaatcatgagccctaggtgacctgccactggcggtagtattaggtctccattttgggaaccttgtgcctgtgtctagccatcttgtacataacgacacatattgtgattcttctttctgatcaagaactcaatttccatcttcaagtccttgcatttgttggtatcatggctaaaatcattatgaaatttgaagaatttagaggtgtcccttatcatgggaggaggcttcttgtatgaaactatggactttgtagcagcatatactattttaggatttgttgttaggaaggtgaagcatgtgaagctcctctcattctcttgtgattcttgtgttttgggggaattattgaatttcccccttctacctttttcttgggtagagatgttgttgccacatttgcctccattgttttggcctttaaaaggctggttgcttatgctggtagttatatgggacgaacttgagcgctgtccatcactcaagccttgcccaagacctgcctgtctcccattttggcctaccggacagctttatcaagcttaataaagccttttgccctatcaagtaaattagccatgttatgggttgagtgttggcggatgtccctagacaactcacacaaaggtagtatgtcactcatgatggttttgtatctgctggaatatattttactaggacttagattcaataataagtatgtttttaacatcctaaatatgaacttctacaatgatgaaattaaacacatataa

SEQ ID NO: 110567 - DNA, 1527 bp, Cannabis sativa
tattaggctaagaaggacgacatacaaattgataaatcaaaatacctggggtgggttgcttcagagcattctcttgtacttctaaccaagtcttttctaagacatgaactttatcctccaataaactctacaagaaggataatgtttgtaataagtaaaatgcaagaaaaaaaagaatacatcatataaataaaaattcaaaagaaagcagaccagctccttcttcttgttctctaactcctctatagtggaggactttggggctactgtatcttgtccagcttcaaacgctgaggattcactcactgatacttgtgttccaccagattgactggcactcaattcagtttgtgcattttcaagttctactctcaaattcttctcagtctcctccatctcctaaaatgatcaattgatcaaaagaacttcaaatggcttactcaaacaaatgagaactatcaagtaaactatattcattgtagtatatttataataacagaacagggcatagaaaatttcttctttaggactaaaagagtcccaacaaaaggcaatgtcactaacataaggacattcaatatatatggctaactatacaaaaatatagtaaaaataacatttctcaattgaaagttttcatgctcaccgctaactttctcctaagtaattcggcttcctgccgtttctcctgtatcttattctcacaagttgatatagcattctcaaaagcagcattttcttcttgtagagttacctctctcaattgagcctgaccataatgaatttcattattaacactacaaaggaagcattagcaatatacaaaaactacaatttcattaaaccctaaaaaaaaggggatgaaatcacttgatttgagcaaaaacaatgcacatttgtaacgacccagatgatgaaaaatacacatcaaaatttggttgaaacaaacatttgaataagaagaaaaagaagttaacctgttcgcgagtagcggagtgggaattcaattgcagagcaagatcggcattagaagctaatgagtgggcatggaggtgagggaggcgttgggatatgtcaggaggagggagtctcaagcgtagatcttgaatcgagcggctcaaagaagccgctttctgatccaattcctgaacgtacttttgctgctctgcattgaaaacgattgggatcaaatcagccccaccttctgcgtttccttgtccagtaccaccgcctccgacgacgtctgccgcccatgctagtagacccgccattttcttatcttctttgacttgctccaatggacaatggtggttgagaacttactttacagtttcagacgacgagccggtggaaggaagccagtttgggcttaaccagtaattcggcttctaagcccatttttattgggcctaaattcagctctaagcccgcttctacaatagtagtagcagctcaagtgaaatggacatatgtaaatgagaaaattacactttatactatttttttacggggtaagttgaaaaatac

SEQ ID NO: 110568 - DNA, 6627 bp, Cannabis sativa
ttggattggatttagtaatataaatatacatatataaatgttgtacttcatatactttttggtcattcatttcaaaaaaggagaaataaagcctttgattctgaaaaagagtgtattttttttatcaatctatggatgaacagtgtaattgaatatctgcaagtcctatcctacagttcatcaaacaaggaccaaacatttttcttttccttcaatgcataacatgtgtgtgttatgtatatattggattcatgttttctttatgtttatgcagtttttgcctattgtattggtgaaaagctttttaattgtttggtttggttctttgtttctgtaatgctgtcataataaatggagttatgagcttaactgttgtgttttcagacattcttaattattgtttcataaatgggaaacaaataaattttgaaaatttattatgttacactcctactgtcacgtcactttaagaaaatgtattcttgcttcttaagtactgtgtttattcaggggtctctgtacactttttcataatacatatatgtgtgtgtgtgtaagaaggtctctcttcagttattccaagttaagcagtcgtttgtgtggtttgaatttgttgtgttgacttaagttgctcactcacagagacccttttttgaaacttttcctccctactactcaaatgtcttttaaattcatgttctgcttttgggtttagcatattcatttagagtgaactgtgaacatgcctcaattcgtgactccaattattgtcttatgtcagtataataaatacaaagaggaaacatattctattcttgatctagattatgttgcaatgagcacaaatactgagtacatttagatggtctttacatgtaatacacgactccaacttgtgctgcgttgattgtcttagcttgctcttctcagttgctgaagttggttgtttctgcaggtgtccgaagcttctgtgagcagaaaccgcagtactatcattgttcctgctggaagcaccagagatgaagggtgggcagcatttaggaacatcttggctgagatcaatgaagcatcaaggctttttatactacccaaccaggtagctgtctttcatacgattaacagtttcctttgctttgcctttttatttagaagtgaagagtctcatgagttcattgttattttctcctttggcctggtcttgcatcctgaataacagcaaagtggtgaatcttcagaacgtattgttgggctttcagatgatgttggtgctggtttcatatcagggcacagtagtcagccagccacaaccactgaactgaacatggaccgatctgtagatttgccagcgcaggaagaaattggtaatatgggagtgtcgaaagtgatcagagcggatcagaaaagattcttctttgatcttgggaacaataacagaggtcatttcctaagaatatctgaggtgtgtggcctaaatatatcagattttctctctctttttttttttttgttttattcttttacttaaaaagactgttttgatgtttaaaaagatgatgtgaaaattgcaggttgcgggttctgatcggtcctcaatcattctccctctctctggactcaagcagttccatgaaatagtaggtcactttgtggagatcaccaaagacagaattgaagggatgacaggagcaaatgttcgaacagtggagcccccgcagagataaatgaatgcaaacatgggttttttggtgattaaataaataattcctgtctgccaaaggttgctgatctagaggtagaaatgggattttgattaggggtgggattgtgcgttaagctgtttgttctgtaattttttttttattcttcttcttctttctctcttcgttctattattcaagtctgaaataatccgattcatatatgagcaaccctagaattcggagatgattgtgaagcttgaattgaattagggaataataggaaaaccaaccaagttacttgtaattgccagtttgaatagtgtcccttctcatttacaacatcttaataatgataattgcttaagttaagtgatttattcttgttcagtcttttagctgactaaactctccattgacttcattaataaacagattgttattgcaggttggtttttgtttttgtttcaaatatagcttttacattatgataatcattggtattgtattgtattgtatgtcaaagattattttgatgcaaattctcaaataaagaaacaaaattagcttctccattttctctttaatttcttcccttatttgcaaaagaagtcagtatggtgattctatacttttattaatcatatagtgggtgacattacatactgtagattagaaaagggttgttgctccatcctaacaattttgtttttcttttctctttggttggtgtgatcctgaacttttacataattttgtgtcttgtaacactaattgattgactgaaacgaattgtggcctgctggatgatgagtttagatggtgtatggaggtgggaatggcagtttcttaacgatgccgcagcgcaaggcattgtctgggatgttgtactcgtccctgagtgaccgtgccggcgacaacacgcttatgtagagctgctgccccaggtaccgattctctgtcaactctgatctcaaattccacatcccagcattgtcaaatgtcagtaaaattgcagcatatgactttgggaacacctgaattgtatgcctgcttacggcatcaagaagattgtagtttcttctttgctctgggctccatttccctggtcctatgctgcatcaatagtaaaaacacacacacaaaataaagtaagtttaagtgtaatttactcagttttgaacaagggagtgtctctctacttacgcagctgcaaagaaggagtatccagccaaatgccatgactgcaagctcttctcatgattttcgaagatgatctccacgaagttgcggaaagtttggttgataacattaggagccataatcagtttttgtggggtgtcttcagctgttggctcgtctttaataatgtcgtacttgaagactttgttggctaccctgaaatactcagccagtttcaatggtgtggatgtatcaacatgggagactccattgattgagtaacgaagtttcccattaaccctgctagccgagtttactagcttgatggttcgagtaatgttgatctttccgtagtggtaagagccctgagggtttggcctggctgcactagctgtgagattccacctaaatgaacggaactggttgagtgaccatgcccagtttccaacaggggctgccgggagttgaggcgaaggagggcctcgcttggcgttggtgtaagtgataatggcttttcctgtcaaaactttcttggtgaatcttgtggaagccaccatgtagtaagcctttggctctttatcagctgtaacgagcaccgaaaagcattggccgacatggacatcgagggactcgtagatgttttggactgtgtgagagccttccatctcaacaagcttcattaggtggttttggattctgaaattgagtgaggtcttaagtcccacattacatattctgtacttgtaagtctttccaggcttcatggtgaagagaggctttcccctgcctttcttgtctagagattttccgtttatgagtaccccgtcgggtctggccagagaccgtccactgtccaagaatttcttgagagtggagtggctcttggtgtaccaatcaccgatgaggacggtgtaatcgtcctctggatcggcgtaagggacgggaatgaggagtcggctgttgacacgtaggcctccgaaacctcctgcagctctgtgcatggctgtggtgggatagtagatgtagcttcctatctgatcctttacttggaatcgataggtgtagttttggcctggtggaattgggcagttggttcctggtactccatcttgccatgaattcttcctgtgctgaactcccatcctaaacaacatcataaacatcatcatcatcaacattaagattattttcattcatccataacataacacatataataagaaggtaaaatttagggtggtgtttggttgaaagtaataaaatagaatggaatcaaaagtaaacggtttttattatattcttttgtttgattgcattttaaaatatgaaatgtagttttaatggaatagttttaatgattattctattttgaaatgaaagaaataatcataccaatgcaattattcttatgttttcattcttaggagttttaggtcttaggttaggagcattgttatttggtaccttaaagtgtctaacattacaccgatgtgacactttattattagtcaacagttttctaatatcgtttattaaattaaaatatatgagactcaatattaaaatgcacaaatatcggcgtgtcatttctctaggtcctagctcctaggtacacatgcatgattaagattatttgcatgcataacataacataacataaactctatatatgggtggtggtgaagaagaatcagtatgtaccaagtcaagagaaagggctcatcgagatggttgatgacattgacaataatgttattgttggtggtggagttgatgttgggacctgggaattgtccatttatgagaattccttgctgaggaacccctaatggggagattgtaccataagtgactttccatgtaaagtaaaggtaaggatcttctgcttcaagccttacaaccaaaccccatacccaaatcaccaatgacaacaacaaccccttcctacttataatacccatcatcatatataaatatataataaaatgacagattatatctgtctaattggtccctcttgaaataagataaagaagaagacgagggcagtcttcttctttgagcatatatatgtgtatatatatatgtatagagagagatcagaccggtgttattagagaccttatgtgttgttatataatatataatgttggtaaaaatgaaccacaaaattaattaatgaattattattagaaattaacaatggtaattggagtccttgtttaacgctcttcctctcactctctcttttacttttttttaaccccctttatatagaaattacaaccacaacttatagctcaacctttccttacaactcatcatcaaccttatgttttgtaacaaacttttattaattattactatgcactaatttggtcatatacaattataacattatcacattacattaatgtattctatcttttaatgaatacactctctttttagaactcaataaattacatgttaccatgcagaatatataatattaatatatagtttgtacaacaaatgaaggggtgaaattatgtttggtttagcataatgtaatcgtaatagaattactattgtaattctattgtttggtttggttttgaaaatattgtaatgccccctttacatcattatactattcatatgaatgagaattaattaaccatttatgtaaaaataaaattattcttatacctttgctttatacatttccattaccaaaagaattttttctgaaagggacattaccaaaagaatttaaagtaaaaatatttttattaatacactattaatctatattcctattccaaagataaatcaaacaccattatactattcttaaagttaatactattttgaattttatattttacaaaaattactgattagactttttattttgttaaatgataaattgaactatgtatttatcaaaatagtactaaataatactatgaattgatttttcgtcaaaataaaacttaataataacccgatttattagaagtgttataactgattatgttttttacatttcttcgtgctaaaaattatctttaagttgattgtatatataaatgactgaaaattgagcttagggttctatttgtactattttagaaaatatatgatctattttgtcatttaacaaaaaagatggttcaatcattaacttttacaaaacacatagttcaaaatagtattaactattacaattatcattttatttcactaaatcaaaagcgacctaacttcttataagataccaagccaccattaactacactaaaagatcggaaaattatgtaacaccctaaaatattttatcggtataaatcgctttatattatatagatacatcttattttaaccctaattttgtcataaaaatatttatagaaattataactagtcttctacaaaattttaataaagtttaaatagtttaaaatactattgacattgacattattctttaaaatatttataaactataaatatatatagaaaaatatgtgcgtgcaccctaaactatttatgacttgttaacaaatttacttattatttctcaaaaatttataaaaaagataaatataactataaaatgtttccctttgtaccagcacaacattctccatgaacaaatatatttatataaggctaattagtaatttttcctctcgaactttaacatgtactaaatcatgttccctgaactttttttgccgttaaaaattccccctgaattatt

SEQ ID NO: 110569 - DNA, 6576 bp, Cannabis sativa
tgccaaaaaaagaaagactttacaaaccaacccgaccaactcgactttagatttttttttttaactttttaatttttataatgtataacataattgattaaatatacaataatataaagttatatatttaactgttaattttaaagtcatatatattgtgttgtgctttggtagaatctaatatttttaatttatctttttaatttttattgactttgactctgaaacaaaaaaaaaaaaaaattggtcggtttgggcgggttaactcgatcaaactgcccaaatcattagtcggttaatagattttttttttttttttaaataaattttagcaatccaaactttaaattgaattagaaaatatataggataaatcgtccaaaccgaccgatgtacagccctataaataactgtatgaaagtttgtaatagtggtgtaacattttatccatatttgctagtgtagcatcaaataatccactcccaaaccttaatggcgcacttcctaaaaagaaagagcgaccacactcagagtcaccacttaatttttcttccttgtttgacttaatttatctttattttttaaagaaagtaccaaaatcaataatttattaactttcaagggcagtccaaacctcactccttcttaatcgcattacgtgtctcgctctaagctcccaattagctgacaaatttcccaacctgagcatcttctcctcctcatatactcagataccctctctctctcgtttattgggtttagattccgttgtttccaacctctctcttcctcttgtttacagagcctgatgccccactaacccagtaagctgtagctataaagggctaatttttggtctcttcaagcttcacttatggcttcttgggttcttttaccggcttcatccttcactggaaatcgtttggaagttgctgggttcgcttcctcttctcgttcttttgtcaattcgctgaggtctcctgggtccttctgtgttcgctcttcattggacactaatgtttctgacatgagtgtaaatggtaattcttttctctcttttggggatattgtcttctaagattaatgggtttttattcatttttatttgttatgtcatcctttattagaacgtgcacactgaaatttttgacggtttgcactatgaattgataagttattcttaattttttccgggtttggaagcaattcctttgaataaattttgttgaaaatggctttgtcatacgatccagtttcacatcacttatcaaataatagagtttattatcatttattgattagtgatttaataagtacttgatcatgtagttgtggtgtcaataataaaacagaagtaaagactgcatctttagtttaggacaaacttacttactgttgaaatttctagtttagctttactgattggagttctttaaaaccagctccaaaggggttgtttccacctgaacccgagcactatcgaggccccaagctgaaagtggctatcattggtgctggattggcagggatgtcaacagcagttgagcttttggatcagggccacgaggttcacttccctttttaactcattgcagtgctactttattttaaagtcttttccttttctcttcattacttggatacaatagctctcacagcactatgttatcccccaaattgaaataattggaagtttggacttttgactattccagaatgatttttttttcctgtaatatgattttcttattgcaagtacagtagtaataaatgtagttgggtttcttcaggtggatatatacgattcaaggtcatttataggtggaaaagtaggatcttttgttgataaacatgggaaccacattgaaatgggacttcacgttttcttcgggtgctataacaatcttttccggttaatgaaaaaggtgataaagaagttgcaaggagttacctgtgtgtagtaatcttaaatttaagcatttatggcttctaaaagttttattggatgcccaattaaatttaggttggtgcagagaaaaatctacttgtaaaggatcatactcacacgtttgtgaacaaagggggtgaaataggtggtaagttcaagtgcccgaccttattttatcaagtcttaccttacaattgttaccgactaatttttgtgctcaagattttttgctttttcaaaagaatataaatggtacacttgtatgcactcttaattctaaatgtacatctctcatttcttgataaaacagaacttgattttcggtttccggttggggcaccattacatggtattaatgcatttttgactacaaatcagctaaaggtatttccttatacctgttcaatgccgtcttacttatcagaccattttgagttgctatgaacctattttcttaacattttctatatgtagacatatgacaaagctagaaatgctgtggctcttgccttaagtccagttgttagggcgcttgttgatccagatggagccatgaggaacattcgagatttggataatgtaagaactctattcatcttacttttattccatttgttgtgtgtattcacccacttgatccttagttcattactactgtagttctcacagtttttggctatcatcactttgtgctttaattatgtattttgattctttattatctattttcacagattagcttctctgattggttcttgtccaaaggtggtacgcgtaccagtatacaaagaatgtgggatcctgtggcatatgcacttggatttattgattgtgataacatcagtgcccgttgtatgctcactatattctcattatttgcaactaagacagaggcttccttgttgcgcatgctcaagggctctccagatgtttacctgagtggtccaataaaaaagtatattactgacagagggggcaggtaatattgaacaccagaaaactttaaatggattctaatcatattttcgcctttttggggttattgctgaatttcaatcatgtcttctactggtataggtttcatcttaggtggggatgtagagagatactatatgataaatctgctaatggagaaatctacgttaaaggattagccctatccaaggtatcatgtcattgtgtgtctctttggcattttgtaagatttattgtttggattaagagttgacaactcctactttacaagtgctgtgttggccaagtaacttgaggcaaaataactcttctttctgaagattttatttttcttcccgctaactgttaagccttaataaatgtgttcttttacttatcttaggccactaacaagaaaataatcaaagccgatgcttatgttgcaggtttgtattttactctcttaacccctgctcataatgttgttcatgtcatgtgattatattttctaaatctgtttatttcgttcagcatgtgatgtcccaggaatcaagagattacttccacaacaatggagggaatcagaatttttcaataacatttatgagctagtaggagttccggttgtcacggtgcagcttagatacaatggctgggtcacagagttgcaagatctagaacggtcaaggtgtttttctcatctatatctgattctttcacttcattgagtcctgtgaataagaggacataggatttgtttagtttctttatagccaattacttattgacttttaggcaactaaagaaagctgcgggattggataaccttctttatactccagacgcagatttctcgtgttttgcagacttagcacttgcttctccagctgactactacattgagggacaaggttcacttctccagtaagcaaaacattaatattattttagcagttaaatttcccaaaatttaaagtaattcaacgacatgcttaactttgactgactgatttacctttcagatgtgttctgacgcccggcgatccttacatgcccttaactaatgaacaaatcatagaaagagtggcaaaacaggttattgcccttttaaaaaacttttatttggtctcgtttaggttattacaaatcatcatagtgttatctgtttactgatgattttccttactccaggttttaactttgttcccatcatcccaagggttagaaattatttggtcatcagttgtcaaaattgggcaatctctttaccgagagggccctggtaaagatccattcagacctgatcagaagacccctatacaaaatttcttcctagcaggctcgtatacaaaacaggcaagtttctctttcattgaaaatggttgattgcagcagcatatatttcataacaacaagtaaattggtttaaatgacactctttttaacaaaaaaaaaaaaaaaaaaaaatgcttgcatccatcttatacaggattacatagacagtatggaaggagcaacattgtctggcagacaagcttccgcgtacatatgtaacgctggtgaagaattggtcgcactgcggaagaagctctccattgattttgacgatctccttgaagaagcttccaacactactgacgaacttagtcttgtttaaatcatcatatgagtgattattcattaactttgagcattacgccaaacccacccacctcatattgtcaaagattaggtgtggttatatggcaacagagttacaatacattcgttcatcttgtatgtattattttgtaacatagcaaaaaaatgtaagttttagagtctcattcgagtcatggaaccattctatgatatatccttcttaatcagaagatcaaatatagtacaacaaaatgcacacgcaccagatgttattcaaagacaaataacttgtttattcatccaaaatactcataataacttgtttatttattatacattatacaacatcagcttcatcaaaatactcaaaaaccctttaaagaaacaaactttaaaacccttaaaagaaaccaacttatacttacagacttatagtagcatatttggattgttttatttggacccgttttcagattctttttcaatagctttctttgcagtctcaagatcttcatcgaagaacatgtcccaatggccatcccacttgatgaaaaactcagtctcttcgtgatactggactctatgaacatccccagcaggagtgaacaagtaatccccaatggtcagatcaaacctttccttctttgtcaaattccacacagtcttctttccttcggtcaccaccaaatcgtgcccaaaggtgtggtggtgagcaggctcaacgctcccggctttgaacctcactatcgccgaagtaggagtttctcttaagatcttcatcgacccaccgggtatcatgtcgatcggcccaaggacccgactcttcaccaaattacaaatagagcaagtggaatcttcaattttagggagttcagcaccgatttttggcatctccgtcagggaattttcaaaaaaagttttaatctcctccggccagggctcgttcccggaggcagggcacggcgatgcgaagggagtcttgagccacgtgtcaaggatttcgatagcggattccggagaagtcgacatgccggagacagctaggacattggagttgttgattgatcgggcgttaagagcctctgaaggcgtgaggcaagtggcggcgataacgcctgggaacttgttggcgaagatggcgacgccgacaccggtgccgcatgcgagaaggccacgagtctcgacagctttggaatcatcggaggacgcagtaacggcggaggagatacggcggccgacgtcagcggcgacggagtagtaggaagaagtgccgaggtcctcaacttggatgttgagggattggaggtgggcgaccaagacgtccttgaggtcgcagccgaaggaatcggcaccggtgatgatcttgagggtcttggcggtggaattggccataggagcggcgtcggaggaggttggaaacttggaagtgagggagtgagtagtggtagtggtagtggtagtgagtgagcgaggaatacgaggatcttttatttttttgttgatgctggccgaaatgaatttggacctatgattggcctattgggacattatctccctaagcccctgttaggaccatttaatatctaatactctaccacacaaaattatcaaataatatacagtgtgtgtatttattcctcctaataccatacactagtattttagcaaatctcataacacaattcataaagatttgttctattggttgataaaaattgttccattaaaacctaacgcttatttatacatttatattttggataattgtaatagatacatgtgtaacatttacaaaaaatttatacgtatacttaggttgtccatctaattggcaagacacgtgtcactaccaaatacgtgatacatgggtgacgtggaaaattatagaaggttaatggataatttttccccaacaactttgacattactaaatcgtgcgccctgaatttttttttttatgttaaaaattcctctcgaactattgagattgttgaatttaaagacttttgtctaattttagtaaaaaaagtcta

SEQ ID NO: 110570 - DNA, 4998 bp, Cannabis sativa
  modified_base (4893)..(4896): a, c, t, g, unknown or other
actgccatacaaactaagcatcagcatgcacaccaacatgcgccaccacttgaccaccacttggtcaacttgtgggcatcacctaacttgtaatgtgccatcttggcacgaacgttacacgatgtgttgtaatcgttctgaatttcacacgctgcatcatagcatccaagacatggttaacaacttcctctccttggttggtaaacttaatctctaggagaaactttggatctttagaaagtgtaatggtgtggcccattttgtggttcggtgggcaaatcaaaataaaaaattcagctttatcgatttggccaattttgacgacttcctgcattcttgtgttgcagacggctctcttgtgacccttgttttagattagcttttcttttctccttcggattgttagtttttttcttttttttttttacttctgttgattgtttgttgggctgtgtccctcttgtttttggagtcccctattttctcgtgttcgttagtttgttcttcggttctatttgtggaatcaattatcaaataaataaataaaataaagacgtttatagtactaaaatttaagatcatttactataatttcccattttagaaaagtttaatgttaaccaaatgaagtaagctgaattctcttttagttggtaagcttaagactagtgctatttttcttttacttactgttctcttaacttaagacgaaatgttacaataggacttttaattagtctaagaatgtgttagaaaaagatggatgaaaattaatttaccaaatacttaattcttccaattttaaataaacacataaaatccacccatataaatacaccaatgttgacaaaaaaccatatgggacctttcaacacactaaccatccgaagtccttgtgcctctctttacgaaatccaaatagcacaaattggtgggaattttttttttttctctccctattggcaggctaaattttcaacagaatggggagaacaaaggaaaagtagagctgttgaaccacatatggaagagagtttcatagaaccacgattaattagcagagtttgagtaagcaacattacacaacccttggactggaattggatcaaaacccataaagacaaaaccaaatagcagagtttgagccaatcccattcacagtaacctcagcaacttttgctagtgaccatgattgataaatactacgttacataccaaaggcaactgcctaatgccagtaatcctcgcatacatttcctccattagcttcttagaaaatctttcaaagaaaatgggggaaacccgtcctataaaaccaacaagtgaataataaggagcaaccccactacttgcttgtcatttacagttcatattttgtacttaaataaccaacacatgcgatctcagaaaatttaatagaaagattaatcaataacagagtgcaaattaccttttcagtctcttggcttaagcactgcctgacagcagttgtctgctttatgagcctttccattgcagtatagctaggaagatttgcatgtgctgacaatcatcaggaacagcaaaaaaaggaataaatttaaccgtacaaatatctaaataacaattaatacaaaacagggacccgattaagctaacaaaccaagaattgcctggtttaaagtatctgcgacttcctgtcgataatctgggctgagaaaatgaaacattggagatttttccggttcatcataagcaagcagagcaagaaagtcctgcatcaaccgagaacttgtgttatatatttgatagagcacaagatatctgtagtatgacaaagcataagaatttgaagcatacttcaagcttgtgaacatatttatccatctttccaaaaggggtcaacttggtctgggcaaattccaaagcttctgtgctgccaaaaaagaaagaaattaaaatgggaatgcattcaacaggcttctagaattttcatgtctatactgctcaccattttctagagattacaagattaacaaaatgaagactcaaaagatcaaaatgcaaatcaatattcttctccagtaagtcatgggcaaactgttctgtcagttcaatggccttcagcacatcaccctccattacaaaatttataattcctgagacaaaaaaagcaatcaatacacaaagcaaaccaaatacctcaagttaagatacaatgaaatatgaaaatgaagtgttagataaactatagttcttttggattaaaactgacgcctacttttccttttctccatgtcctcaatgtaattagcagactgcttcatcccagtgcaagcaataaatgactctgcagtttctttgtggcagttatgaacaaggtatgatataacaatgttgtgaatgtcattttcactgattacctgttaacaaaacattataaatccaacttgatttgcagcatattaaaaaaaatttgaaattacatagaaatgggaaagacatccaatctgtgtctcttattaaacatccaagtctcttcatttcaatctctttcttaagcttatatagcctcacacacaaactaacttttatcacaagaaagaaaaacgaaacaacaagataatataaaaaaccagccaaacagaaagaaaataacaactaactagataatcttcccacaacaagtaaactgaacaaatctgagttatcattttacctttttatataaaaccaactaattcttcaaaatatagccgaattatgaccacgagtacaaatcgcattcacgtgtaaacctattttctggcatgttttagttcaatatcaggtcaaccaaacttattccccaatttgacacctgaaattactaagtagtattctctgctaccttaattgaaaataatgggatgcatttcacaaccataattaatgtccagaaaccacaatgaaaatcaaaaccaacaatatttgcaatgaaataaagttaaaaaaaaaaatcataaattgaattagggctgtaaggagtgataataattacatcaaaaatatgaaaagaaaaaagtcaacaagttcatacaatgtgaatactatagttatccctaagatagccttaacctcttagcagcaattgagaaagagaatgatcaaaactcacaacgtgatcgtagtggcgaggatcgacgtccatgattgagcaccactagaaaaagaaaagtagtgaaaaataaattaggagagtggaaagtggaaagattctagggtttgggtttgggtttgggattttaagatttcttacctgtagtcgaaagtggagtgcgggaatttggggatctgtatcgaattgtaaccgcagctgtctctgtgattttcgtacacgtcacctattattgtcttcgttatcccccatatcttgatgagatgagaaaacatggaaacactaatataaaataaattacttttctcctattttgttttacaaaagttaattggtggggtttattttgttaataatataaatttaatttttgtattttaaattgtctaaaacgatttattttttatttaattatcaaatataatttagtcaaattttaataatatttttactattgtgatttattttttaatgtgagggtattaagatgtaggaagtatatgttttttttttttaggaagtatatgtttttttttttttgttattttttttttaaaaaaaaaagaatcatttagttattgatatagtaatgagttagtgttttataatcttaattaactattattttaaaattttgttaattaataactaattagctttcaaaataataaaaaagtatataaaataaagaaaattacctcttatactattttttgaattttttttttaattttacggtttggatttctaaagtagtttctccggtggtttctatgtgagttgctatacgacttttagttgcgatttaagttgctctgttagttgcaataaggatttctaaataaaattccgtaaaaatgtaaaaaaaaaaaaaaaactgctttgaagtataaaaattaaaaagccccataaaataatcggtatataaaatggtagcttattatattacatgacaacttattagttttgaaaatatttttaaaggttacctaaaggtattttaaattatgatctatcataatataacttaaaaaaataactaattagttactaaaatgtatacaaataagtttttaaaaaagtaactaaaatgtatcttaaattatatgatataaaaataaagttttttatataaaggtaattaattagcttcttattaaccctattagtaaccaaaaagttatttttgaaaatgcgcaaaaataaaatgaaaaaaatttagaaaacgtcaaaaaagttagataataataatagtaacgttattattataaattagatgcaaaaatatatattattgtaaacctcatttttttcaaaatagtataaaatggtaccttaacttaatttcgagatttttttttttaatataaccaacttgaagataatttttagcaagaacaaatgtaaaaaatataacctgattgtaatacctctatatcagattattattaagttttattttaacaaaaaaccagttcaaagtattattttgtattattttaaagggaaatttacatggtattttgtattatttttttacaaaaatactgtcaggcggtatttttttacttttttactgtgtatttttataagtttcatattgcagtatactgtgtttattctttagttttttttagtgttgttttacggttattttctataatttatttttttaacgttgatttcactgttcttgctccatcttgttggaattaatgatttttttctgggtttctcgtggtgctatggtggttctnnnngtgggtgtgaagatggaggctataaaatacatttcttcttccttctctatggttattttgtggttatttttttttttattttggttctcttaaaaatacatt

SEQ ID NO: 110571 - DNA, 7206 bp, Cannabis sativa
ttaaaaagtgaaaacagttttatacaatatgtttttaaaaaatattttcactttttcaattttaaaaacaaaaactaattaaaaatatattacaaaacgccatcttattttattatgttttcctaaaaattattgccaaatgataatgtattaaatctaaaaatgtgttgaattaatatggacactaaatttacatcaataaaatgattatatttttaattatagtttttgtaatcaattatacatctgtttttcattcattatatatataatttaaagtcaaaattaattattacagaaatatagtacattatttatatatgtttttattaaagattaaatgaattctttaaacaaataaatgaacattaattcaacacaatttcatgtatatttgttcaatatatatatatataacatttttgtttttgtttttgtttttcataatatacgtgtgtaatctgaatgaattaataatttgatcatgctataaattattataagaacaaaaagaaaatctaagtcaaattccccagaagaagttttggactggttcataccacaatctagttagctgtatgtggacccaaataattagtttttctttaaaaaagagaaaagtttgatggtctcaaagattggaatagtctcaatctctacgtatgactcctcccgagttgtcatattacgaaacttgtggtgattaagttccaattcattattacataagatattttgctgttttaacacaacaacattcattctttagccactggcctatgagcatatatacaataatgtaagtgtacagttaaacttatataataataatactagtaattattaattgcaaatttgcaactaattatgattcatgacattattgattgcataattcatgtaattgcatgctgtcacaggaaagacgtgtagaaatgtttattgtttattatagaacccttggtcaattttaaaatttgtttcattatcaccactcatttcatacttattttaagttcatcattgaattaatttgcagtaacacgttgaacacataaaatgaagtgggaaaaaaaagaaaacttattggacagcgattgattaatcccttgatgttcaagaaaaataaaaataaaaattgaagaaaagagggtgtaaattgtgtttctcaaagacacagctcatcatgatttctcatcataaaaaactaagggaagtaaaataaacacaatcgaagggttgaaactcattgctcactccaacttcatcaccgttggattaacatttatacatttttaattagctataggtacatgaatatgtcagatcatacgttatgggacatgggattttatagtatattatcatctgactacacttctgatattggaagcattctctttctctgggattctgtttgttgggacatgtgacatatatatatgatagtctctgcttctctattttgcttcctataaaaaacgaaaaataaaatggaaaatgtacacaattagccgaccaggtcactttcaaacaaggggttgaagttatcccatcaaataaaatttgaattttttgtggtcagacccaacaaaataaggacaaaaaggaagcaagtcttgtcctccggtaggcattttttgcagttagggcaggcaaagttgccttaaaactggcttacatgtcttctgatcatagaggctgctgctttgtctttctggtaaataaaccaatccatcctccttttaattgggaatttgggagcttcatttttataattttgtgatatttaaaaagaaaataaaaaattaatgtctcgttttttttctaatttattattttttttatttgatattgtgggtgagggaatttaatctttgggacctcttaggaccttgttaaaaaaaaattacacttaaaatattaaaataaatacaaaatacaatttcatctatgccaaattcataatataaaattttaactaatttaagtttaacttattaagattataaaaataatctcttaattaccatctttttatttaaagaaaattcgataatatttaataattgaggtaaaccttaaaaaattggggtgaatatagaattgcagctaaactcgataattttggctaactaagctgcctacataccttctttgtaaatgatcaagctacttagttcagaatatagtattttaggttttgaataaaataactacgatatgtgactatttttcaggaattttatattatttgaaaattggaaaaaaattcctagttgaatgatcttttatggaattttgagattaagcgttttatatcattttgtggtattttatgattgcacttaatcttaaaaaataagttgtctacgtatccttttatagaaatcaagttacatgtagttcaagtctttgcattacaaaaaataactattttttgagataattttttagtcacaacataaatttcttgcatgtgactaaatgttgttagaaaatatcaaatcacaataataaaatgataatacctgaggcgtgcaaacaaaacattgtccttaatcaagaatttacaaaataatcccctaagattcaacagatcttctgattacaatgagaaaaccaaaaaaatagaaatatcaaaaatataataactcaagcaagaacaattatatatatataaataatatgtaatatatatatatatatatattgtatatatttattatgatgtctcttactatttctccaaaaaaacaaaaaatatatcattatcaataatgtaaaaatacattattgaaacccaattagctccatgcaaaagtcagcccattagtttactatctaaattatgagccggcatttctcgtgcccataaactaagcaacatcaaacaaaattaatccaccagcttatttatcatatatatctaccaataaagttgtataaatacttataaaatataaatgtccacataaatacaaatatttagtgaaagatgatgaagtaggcattaatcacatagtacagtagctatattattatcctttatatatataaatatataaatatatatgtttatatttctatatatgccaccaacttagctacatgacatcattttggttgccttggccttgcctagtggagtcatgtatcggttggagaaggccatttgtgaccaaattaaggatatttccaccaaatggtttaatttttctttttttgaacaagagttaggaggttattgtagtgggcatgacatactgaacacaaccgcacatgaataatccgaattgtaaaaatccatttgtcattatttgaataattttattaaactaattatactaatttagcctaattaaaattgattaacaacatataatttcaaaatatatgaaataaattttttattataatatttttaaaattaatttagaaaaacacacttaatttaatgaaattaattttctaataaactaaattgtattttttgaaatttaattaaataataaattattattaaattgatttatttcaagatacttagataatagtttatgtatatttaattaagaaaaaaattatatttaagttaaaaatgtattattttaaaacaacttaaattagagtaattttcatgattttattttttttaatttattataatcattactaattgaaaatatttttcaatattagaattttaaaattattttttgaaaattaattattttttgaaaacaattattattaattttatatgatctaaaattaagtaacttttattaataattaattaaaaataaatagattaaaatagaattaattataaaagaaaaattaatttatgttgaaaaattatatattaattttggatcaacataaactagaataatttttttaatattttattttattttattaattttgaaaatttatatttattttagatatgaattttcaaaattacacttacacattttaacattctaatttttttttttttttaagttgtaaattagtttctaattttagactaactcaaataaatgttatttctagtagtatttatatatgaatatatattgaggatgaaaatatatatattgtcagatctactttaataaatattttataagtaccagaattaaaatttatatttagttaatataaattagtaattttaatgttaatatttattttcagattaccttaataaatatatttataatgttaaaattaaaaattatatttaatccatctaaattagcacttttaataatagattttatatatcaaaataaatagatgaaaataaatatttctaaaagaatatatttttttaaaataataagtcttaatatagtacactcgatcttaattattggttttacatggttattgtttttaatgggatctcgaggtgcttatcatcccctaatgaataatcatccattcgacaatttaacaaagtaaaatcttaaaagataaatattttataaatttttgtttctagtagactcatccctaaagatgactagttagaaacaaatttataaatatgaaataatagtagaagctcataaaatatggatgaccttgactctcgcctaaacgagacaacatcatattcatattttgatcgaataaaaggttgttaaaatgtgtttattttagatgagttcactactctattcaattaatagtatctttgaatctcacctaaatgggacattgtatgtcatttagttgaaaaccttaaattatatttgagatatatatttgtattctttttatgtctttattatttatttaatgtttacaaattttttgaattgtgtatagatttatattatattgaactatgtaattgatttctatttattaatacttgtagtacccattatgtctttatcaaactcaattgtgtcacatctttagagctaacttcctcaaatgggagagagaaacgtcaatattgctctcataggtgaaaattcactgtttgttctaactgaagaacaacctgaggtgccaggtaaaaatgctactaaaatagttagagacagatatgagtgttgggagaaagccaaaaataaagttatattctttatactgtcaagcatgatagataccttgaaaacaaactttgttaataatttcacggaagctgagattatgaattacttgaatgagctgtttagaaagacgtcggatcaagctcgttttgaagtgactataaactttacaaacgcacatatgaagccaaatcagcatgttcatgatcacctatacaagacggcaggttatttctaggaggctgaactccatggagctattattgatcaagagacacaagttagtgtgatccttaacagtttatctctagcttttttgcccttcacatcaaatgatcatatgaacaagttgacttttgactttcacgagttgatcaacaaccttcacatatttgaatgtttgattggaggaccataaaataaaaggtaaggctcctgctactactaccaatagtgtaactcaggctaaagtaaacattgtttctattgccaacaataacaataagaaaaagaagaaagggaacaatcccaatccaaaagctcccaaaggttccaaaatagcaaggaaatggaagaaactttccaaacctaaagcaaaaggaaaggaaaagttttcctcttgcagtgaaaagggacattgaaattttggtgtcctaagtttttggtaaataatcaaggtattcctcactcttttgttcacgagttttagagaatgattattcaattgtatttatcatttttagatctaccaaccatgtgtatgttattatttacagctactgctgcttgagacttgggatacatctctcagtgggttaaaaccgataattgaagacaatgacttgatgttgatccaagctagaagacaaagcttgctatttccaattttagaataaattagttttgttttcaagcattatttattctagttaatttgtttgacttttattttatttccaattaaggttgcaactatcactttgacattttgaagtattaatttaataaattttagttttctcttaatagatttcattgtgtgttgcatgtatggattgagttttgtaatgtgtgttctattattctttgtcttattaactattactttaattttttattttttattttttttgcttttattatatcatgattttgcaataatgactattatctatgacatttaatcttgttatggggttttaacaagatcattctctacaaatagaatcatgtcaaataattacttggataatatatatgtttataagaatattattccacaggtgattatgagtaatttgtcaaattcttagacttttacatagataattgaatcatattagaaattttgattataaataattcatgaattcttaacagtttaatataaagtaattaaggatcttgtgaactgatatgggtggagaaattttgttatgcagttcaaagattatctaaagatcgaaatcacatctcaaacttacctccttagaaatatgtatataaaatgaatatataattagcttataattaaagtattccttaccagaatccttcaaaaaattaaagatgttttctctaggaattataaagtgattagaggtgagctatggttgtcaactctctaaatgttttcttagttagcagacactacaaaacctacatgttccaccatcttaaactattaaataagatgaagaaagtcattgaaattccttgaaagtaagtcatagtactttgaagtagtgggatgatttgtataaacgcatctcactattacttggagaatactagtgatgaaaatcctttagtcagtgaaagcataaaagatattttgaatggatttattcaactaattctagaaggttgtggcctaaacattcacatgattagacctaaaaccctaaaagaatgctagtatctgatgtatggagtatacattagactgagaccgatattgatcttggtaaagatattataatcttactgttgtatcttactaagtcaaaagatattagatcaaaagatcttaatcctgatatagttaggttcgatctcaagagtgttatttatgttctttgagttgttcgttgaagctcgtatgggtgaacacatacattttggg

SEQ ID NO: 110572 - DNA, 1373 bp, Cannabis sativa
aaaaaaaaaaaaaaatctgaaaaggccaatacaattaggtccgaagaagagaaaaaataaataaaaaagcaatttctttcaaaaattagaaagcagaactgaagacactgacaaacaagtagctagtacgaaggaaacccggggcgtcacaacattaaaaacagatgtagtgtcatgttcaaaagtaagaaaaagattagaaattaaaccattctaactcacactcacacatatatagatcataacagcagtacttgtaagttgtaaccctacataatttgaaacaggtggaaattaacacataacggactcactcaacaatatttggcttaattacagcttagctctaaataaaattagcaccctccactcatgtgtagcattgcatcaattaggtcattttcttccattcccaactgtaaaaacatacatagattataaattaattaaattaaacatatgtatgtacaagaacacatatattaacagtagtattatttaatcaatttgaaaggggagaccttttctggagtgttgaaaggtttaacaaggcgaccatcataaaggaatgcaagagatttcatgtccaaactcatttcttcacaataacgcttcataagaacatcaagcggggcagttctcttcatcttaaaagacacctcattgtcaccctttcaccgaaaaaaaaaggaactttgtgaggaaaccctcaaaacattaacaaagaaaatatcacaaacgggtgagaaaaaagaaaaatgtcgtttggcctttcattaactgggaaaaacgaacgaagaaaaatatcattttttaaaccaacaaaaacaagcctaaccacctaacaaacaaagctaaaactaataaaacataagaaattaaacctggcccttcactttaagtgtgatatgctttggttgaacatcatcaaggttcttttcctttccattttctccttcgttggaattggtgtggcttgacatttttccctttcaacaacaaattcactatctgattttcaatgttgaagaaagagctctacttcagtggttttttctttccttttttttttctactgatatcactctctctctttttctctcttttaatttatacaaaattcattactgtttatagtttttcttcgaatgatgtgatcgtgcattcgtccttctctttttcaaaatatttaatgctttttacgagtaccaatattagtaatgcagagatatattattttatttcttttttctttgttcagtgcagtcgcatcatttatttcaaatcagttttattttgtaattgtaaatttttcagaaaaacattataggtaactaataagaaaaaaaataatcttaaaaaaaacaaatagt

SEQ ID NO: 110573 - DNA, 4396 bp, Cannabis sativa
  modified_base (4351)..(4358): a, c, t, g, unknown or other
tatttttataaatatttgtatgtggactgtataaatgtttaatgggccggcccaaagtatttttgtaattttttttccttttttgtatttttttgtttttttcccaataaaaatatccttaattaccgttagctagacttagtaattagtaataacaaaagtgattcacctatagctaatttatattatatcacaaacacatgatacacacattaaatatatttatatacatatatattgtgttataacatttgaagtaacatgtgtgaacctacaaatcaaagtcgtccatagacaagacagagaagacttaaccaataaataaaaaaaacatgtcggattcaaaaggtgaataatttaccaaaccaatttcaaaattctattcaacaataacatatgcatatgcaaatgttactttaatctttttagatttttgtctatttttaagttttatatgcatatatatatatatatatatatatatatttgacacgtctcctctacaagttagtaaaggagacaaaacattgaacttttagagatcatgtagtctggggcggtaaattatatccccagacgagtggtactgatttcaaataagtatttgggtttatatcttttaacttgtatgatgatcagggcaatgcccgaatgattggcattcccatcccaaattggatattctgagatcactgatagagttggactgaccaatcaaattcaaatgggtaggttgtacgaatattacgttgatcccgggacgattgctatcgtctgccaccatttttgatctgtatctagttctgggttgaagggacaagttcttgtcaccgttggaccctggtagtacttgggtttagagattgggcattcgatccaatctaatattttttttttatttttttatatgatctaatccgatcagtaattgatgaatttagaaaattatcatctgatttgatctaatcagagatatcaaaatttggattccaataaaatctaattactaattagatttgatctgattgttagcatctaattcaatcaaattgtacgaaattgaatatctttgattagattgattcgattcaaatggattagattaaatgttgtccactctacttgggcctatcataatcatggatggactagctaatcttcatgggcctccctccggtgcacatgtttttgttttgagtgaaaagactaacaacacaaaccaattcactatataaagaataaaaataaagcaaaattaattagagctcaattaaaaagagttaatattttaaattaacacatcaataattcgtacaaattaatttggtggaaattaatgtataaattatgtcatgtcatgtctggtgtgaattaaaatagaaagtgaagaaatatgatcatatattaataataataataataaatgaatgatggaattattagtgatttttggtacgatcgaacgtacgtatactcttatactgcttacgtagtgcatgcatgacacacacgaatatatataatcaattattattattattattatttaaaaagaaaaaaagaaaaagacaaacaagacactagttatacttaacatactttcatcgtttactgctaggttcgaccaaatttattaatttttatttttaattttttcaaaggaaggttggaccaaatatttacgataaaatataataataattagctgaatgagattgatatttatatataaatttatatatatatatacatatttactaaaaaaatctaataatttcttttagttagaagataattattttttttaactaatgtaagttttaatgaaaacaaaaaaaattagttgtaactaaaacataagaatatttagatataaattgttatcaatatagttttagtcataataagtataaaattgtgatttattttgtgactaattacttttagctactaatttatttaagtgatcacaatataagaataataatttataattagtcacaaatttttttatttttcatctttagttataaattttattgtgattaaaattaaagttattttaataattattagaaaatatattcatatatataacgactgttacttaactttaattgcttattaattggtagctagataggttaatttagttgatgatgccttttagaaaacaaaattacatatataattagactttagtgtataatgatctatgagtaattaggtcatgtattatataaagtgtacgtatgtatactaatatgtatatatagttaatttagctgtggtcattaattaattaatatttatataatagaaataaaaatgatgatgattaatgagatggaaatccattaatattattcaaaagtagagattaattattaaacaatgaacacatgtacactccaaataataattaacgaaaagttacatacacattaattaattacacatacatactactatagataagatgaccatgatcatgacctttgctataataattaatacaaagatatatatgtaattaagtgtatatatatggtaggtatattaattaatctagactatatatatatatatagctagggtctctccaccaagagtggcacaatcatttgtttgagagattttagatttgatgtttgagaaagattatatatatgtacatcgatctactatatatataatcaccatggctaacctacctagctagccacttctctctctctctctctctccaattatatatatataaccaaatttgcacaagaacaaaaacactaccatcagctgcatctacctaattacaattacatcacaagttatatatatgtaaaaataaaaaaatgctatatatatattcatcccgatagatttgatttgaaactattattattattattattattttaatggatgagtaaaaaaaaaatgtatctaaaaagtgtcccaatggcggagggagagtttgcaagtagggggcaaattgtgacaaaaattatttcgggagctaattgttaataattattatatatatttaatttttttacatatttaatatatacaaaaatagataattttttttgggagggctataaactatagtctcccactctccctaactcaataacagcctccgtcaatggtgtgtcccaataaatttgaactttgacctaatttctaattactaattaatactaatactagttgtaaatgtaataattaaggaggggtaaatttggtatactacactttccattaaggtactcttattggtgtaatttaatattaaattttaagtattttgatttaataataatttagaaaatgcctaactgtgtcttcaggtgcttaataaaaatgttataattaagggataattttaaaaaaatatattaaaataacaaaaaaaaattataaaaatataatatgtacagaatttttaatatttttacagttttttaaattttatttacataaaatatgattttttggtatttttttttactatatatacttgttgttaattttttgttatttatattttttatattattttgatgatatttttttattatttttatattatatcttttatattttaaaaaaatactgtaaaaaataaaaaaaaaaattgaacttaaaaatgtaaaaattttaaaaaaattattattttttattatccttataattaatttattgatcatataataatatatatttgctgtccaactaggaattaataattaattatacattattagtagtaggagtgggagtgagagtgggagccacgtgtcaaattcctaactgaatgtcaaactgataaataaacgacaactactacttcatatcgcacccacacattatataatttattaattaaatattacaaaagatcatataataggatgattataattaattacatagcacccatatcaattattatattgattaattgtcattagattagattagaggatatgattaattagattagtctatgaatttcactctaattaaacaaaaatatcttttacatgacttatacgcacgccactctactctatactacttatactttttttttcattcttttgggtgtatatatgtaataattaattatatataacacattgttttgaatcacttagtgcctattgtaaagagcaattaatgtatgttttcttcattttaatcaaaaattaaaatttatatatttttaagaaaaattacatgtacaaaagttggatcgacactcataatattttttatcaaatttttttcacgagagtagtgttcgttatgcttacaacatcatccctgtaaatttttgaannnnnnnnaatagtttacagtgccgaaaataagtttgaaatttttt

SEQ ID NO: 110574 - DNA, 7711 bp, Cannabis sativa
aacataaatgacttctaatctttaattgataacaaatcagattgtattgaagtaggttttatttagggtataaaatcccaacaacttattatccccactctaccaaaatcgggcacacatactaagaattttattcataatactaatggataactgaaatagatttatagcataagtcaggataacttgtatctcatacttcaaaagcacttcatgaccacctgacaaaaagagattagacttacaaccaaaaaatttatcccaaattttatctttaattgattgaaatagcccactcttactcttactcgcaaagcaatgtaaacccaaatatttatcatggcaatgaactaaggggactcccaaagtacaggcgaagagtatcaaaaagtgacccaaacatatgaggtgaaaaaaagcacaagttggcccgaggagttttgtaaagtaaaagaaattccttgaaattagatttccaaagtagtttccaataaaaagaaattatcattagcgaagaggagaatgaaaatcataggacaatgccgaccgtataccacactggagatgctattcaatcagatttattgctttataattgaagtaaacccctccatacaaataagaaaaaggaaaggggaaagtgtttccccttacataagaccacaagaaggaatagtgttgcgaatgatgtccctattaacattgacaacatatgacaccttggtaatacatctcataatcaaaatagcccaacccgaatggaatcccattctctccatcattccactgagaaaagcctaatcaactctatcatagactttagtcatgtcagtcttataagctaataaacctttttgacatttcttatgcctcctaatagaatttagacatttaaaaccaatcatagcattatcataaataaggtgaccatgaataaaagcactttgttcttccaaaatactattattcatcacttcatggagcatatttgtaatcatcttagcaataatcttataaagcacataacatagaataatgggcctgaaatcattagctcgagtaggattcttcaccttgggaatcaaagtaataatagtttcattaatataattaaatgtacaagttcatcaatcaagccaagacaagcttgacacacatcatgaccaataatatttcagaattattgataaaatccagttcctataccatcttttcccatacatttgctcaggtgcatttggaataaaacaacatgcacatcagcttcagtaaaaggccgcatcaacattattcaactcatttgtgacctggataggaaccgatttcaacacatgattcatagtatccatagaaggccatcgagacataaaaaaaatctcaaaataccgtaaaaaagtagcaatacctcaaagttcctctatccattgcatattatcatcaaagatgcatgcaataagattcttctttttgcaatgagaagcactttgatgaaataaagaagattttttgccaccatacttaagccatgaattcttagctctcaaggcccaatacttctcatccttatacatcaaaacatcaattctttttcgtttgttaatgattcggccatgagtgaatatcaagatttttatttaagcaaggcaactctttttttttctttaattgtaccatgtattcgcttatacaccttaccattccacccttaaacacactggacacttctttaattaattttctcttaaatgccaccaatactaccacccgttaaggaattccagtgagaagtgaaaatatcacaacatttatcttcatccacccaagtcgtttcaaaataaaatcgaaccttgaattgtggcttctcacaagtttcattagcaagcataaaaagcgggctatgatctgaacaccaaagttttaaatgagaaataaaggaattagaaaacaaagattgccaattggagttgcaaatcattctatccaacctctcttaagtgaaagtaccatccttgtgcttattacaccatgtaaaccaagcaccctcaaaccctatatcaataagaccagttttagagagggccctatgaaaaccatctataagacctcgagcccacagaggacccccacacttctcatgcaaatagagaattcattcaaatcatcacctctcattcatggtgctgaaaaaccacagtcaatctctccatcaaaaaccaaaattgagaatgcaaacaaacagtcggttgcccatacaaaccaatatatacccaccaaacatcaccatgagaccgcaccataacatcaatgtgaattttagaataaccctttaagacaactttaagattatcaatctaaaacaaacataaatcccatctatgacccaccttctcaaccctaactttcttacaaaacccatacaaacacgcattaattctaaagatgagtgagagatgtgagtttcaaaaagaaaaacaatattaagaaaaagctatttaacgtaggattttaaaattttgaacgttcgatcattccccaatccatgaacattccaagataagaaatttataatgtgcggtggcccagctccacaagaccaccaaccctacaccatcatcaaattcagtcgagtacaagtcaccacacccactggaacctcatgtgaacattcaggagccattgtaagagctaaataggattaagtagctccttagccttttagcttttggacttcacctgtaaagcaccacttttgtcattgaaagaaaccttgagtttaccttttttattagccattttagaagagtcacgcctaagagatccaacatcagactgtaaagacatattcggtccataatgcttagccaacctcaaaccattagcaccaaaaggaccatcttgcgtgggagatacgtgaatagtaacttattacacctaggccccattcaaaataccaacatcggaatgtagaggactagaaggcaccatatgagagaccccaccattaaccccatcaacgggcacctcatcaatcatcttagaagtagagccttccccattactatctatcctaatatttgatacacaaggtctatctaaattcttattatcaaatactaaattatttgaattaaaagtttactcaaatcttgggattgaacagttattttggaatttgatacattacaagataactttatattagaatattccaagcgattctctttttccatattttctttgttaaagattcgagagattgggtgccatttcgatagcgcattgatgtcaatacactttcctttattagaagatacccccatcacagttgcagcagaagaagaatcgcgccctctaaatccctttctgaccacacccctctcgaccacatcaccagagatcgacgaagaaccacccatatccttacctcgagattcttaaaaaccagcctggtgattttatccaaaaatagagcatgaatccaatcaccatactttaattgttcctctccaccaacatcctttggcttaaataatccttctttcatggggcgccctagagtatcacagaaatattatagtttcgacaacctctcataacgtaaaggaaagaagataattgttttatccagtgccaaacgtcgttcgatcacacatggcaaagggtttttgcctaattcaaatctatatactttggacatggacctgtaccaagaaatcatccagatcaaacaccatcgtttttttatatgaatactcatctggttcctttagatccaacaaacaattctgaaaaatccaaggccttccttccaaaacacgtttctgattcgtaaccaggtcaaattgaaaaaatgttttcttaccacgagactctactgtaaatacctaatatcttcaaaaaaaatcttcacaccataagctaaattgtcttaacccatcgaaggagtagtacttacccattaagaaaattgataactctaggaggattatccgagatcaccatatcaaccaacacccttacaaactttaccattaacctctcaacaatattaaccataattggtttttctaattgtactaactaaagcactaaggcatttataaacctaatattggagacccaaattatgtaatctaatccaaataaatattgaataaattagtttaagagaatatgaatcaatagaccaaggcctcaaaatcattggtttgcgatcaaaatgcactacttcagattctaaaacattcctagtagtctcatctctgaaattaaaaattgtaaaattagaattcataagcacaatcttctcaatactaagatgcccccatattctttttaacaaagccctcaaatacaacaaaagttgggttagcccttaacacaacacaaacaataacaatctacctatatgatgtttcctcatctacctcatctgaatcaatttgggcaataggcttaccttctctaactaaaagctttccatagtgcaactttctcctcgtattgacaccctagttctctctcaattttgcctaggtcccctgagaccattcttggaacccatctcgttcactcatgagacatttatatacatacgtatattaggggtgttcacgatgtgggtggtgtgtgatttttgactattttttcaaatcaatccacacatgcggtttttttaattttctaaactacacccacatcgcaaaactaaaaaattgcacaaattgcactgcaaaaaatgatgcagtgtggtgcgatttttacagtttctgtagtttggactaccacaaataattaaactatcacaaataccacaaagcttgagcaacacttatcaaaaataccataagacttaaaaaataaatatgaaaaaaatttaagttttaacaatacaataattagtgagttttgggctggaccttcacatattggacctaaataaatataaaaattggaatttttataatgtgcagtgtggtgtaatttaaaccgcatattaacaattcaaactcgcaaattgcaccgcactgcgcggtttaagaaaaattcaaactgcgacagcactgcaaataatttcaaaccatatttttttttacagtgcgggcagtttgagcagtttgatgaacaacccaaaaattatatatatataaatatatatttatactcttgtacccatgaatcggtatagaaaaatttaagttcttatgcttaattttgttatttaattaaaaaaaaaatctcatttttacattatgcgggctaaggttgttttgtcggctgagaaaaattttaaaaaaagttattcagccgaaaaagagataaaaaaaaatatatgggatttcttcatttttatatttaaaagtattttttttgtatttatacagaaatacacagagcaacctaagtcgtgaccaaaatccacattgcaacccacggaacaaccacaagagcaatctaaattgtaaaaataataataaaaaaaatgttaataaatatagtatataggatgattctccaaaatatattgaatttgagttagatatattttatatatatatatatatattgatataatgttaaaaataaatattttttagtattttttatttaagtaactaaatttagtatagatatttaaaatttccttttattatttatcattaaatcaaaatctaatagtttaagatttttaaaattaatatatatacttcatttttgaatctgtgaattattgagttgaagacagaaattttaattaatataaaatcaattgaagtactcctactcttattcattccttaattaataactcactttcatgtgaacttttaccttttttttttttatctatattcaataacaatcaagtcttattgaacttgccttgaaattgaaaacctcatggctcgattctggtggaaaacttcttctagtaaaggacggggcattatctggatgtcatgggaccggatggcagttcacaagcttgatggaggcatgggtttccaaaatcttcatgactttaacattgctatgtcgcgaaacaaggttggagattaatgtgcagcaccgacacacttgctggtaaaggttttaaagccaagtattttcagaaatcagactttctctctgctgagttgggtgtaacccaaattttgtttagcgaagtatctggagttctcaaagcttagtccgtttgggggctagaagaacagttagtacaagtgacagtgtgagtattttacaacattcttggttgcctagttcgcagaacccttatgtgtcaactaatcatcctggcttagaagatcagctcactctttcacgttgacagccgagcttgggatacaaatcttgtccttgacttgttcaacaaccatgaagctgccttaattttgggaattcccctcagtccaaatgctaccagtgacacatggtcctgggtaggagaaaggtcaagtgtgttctctgttaaaagtgcttataatcttcttcaagatcagaagaatacacatgtgaataagagcacatctaatttctggcattgtatatggcatatgcaaatccctccaaaggctaggaattttctatggagagcttcctctaattgtcttcctacatgtctaaacctcactacgaagcacgtggagatctctattctgtgtcatgtgtgtcgtttcaagctgaatccacaagtcacgattttatttcttgtccaattgcccttgcttgttggcgtagactcggggttacttttgtttttgatcctggtgggagttttcgcagctggttggaactgctcttccaatcactttcagaggagattgtgtgtagtgtttccatgacttgttgggcaatatggaaggcaagaaataaaattatttggaagaagaaaagctcatctgttacggaaataattgcatatgtaaacaaaactcttaatcaatggaaaaaagctcaagataaaatcactttcaattccttgtgtcttgaaaacaagggtgatggcgctgagctatggtctaaacctgaagaaaactcaatcaagataaatgtcgatgcaacgaccttcgaacaagagaacaagtgtggctttgacattgttattcgtaatcatcttggcaatcttataacagctctctctggctgttatggaggtaattttacagctgaagtcattgaagtcatggcaatcaaagaggccctcagttgagttaaaggcaaacatttggaacgggtagtaattgagaccgatagcttggtatcggtacaagctttacgcagtcagcaaacaatgttctcaacatttggcttgctagttggggattgcaaagctctactttctacattacataatgtccaattactttttattaaacgatcagcaaattgggtggcacactacattgttaggaactctcgttttaacactagttgtagcatagcatttctatttttcatggttcagaagacttagaaaatcttatgtattcagaatgttaattatttcaatgaaattaatatttcatttcaaaaaaaaaaaaatttaatgaactattaaactataataaatatttctcaatttcatatcttcctttatttacttactagggaactaagccgcgcttcgcgcgggttcgacccaactttaataatattttaaaattttaatttatttttgtaccaattgagttatataatttataatata

SEQ ID NO: 110575 - DNA, 6304 bp, Cannabis sativa
  modified_base (1658)..(1678): a, c, t, g, unknown or other
tttcattgttttggagatattcatatttacaatgttaattcaacatacttgttagtaagtctaaatcttggtaaaatattcccaacactaacacgttggaagatagtatattcagggcagtcattacagcgtccattctggtcatcttgctgagtagtaactcgttgaattgatcttgtcaagttaaccttcttttgtccagctgcagttgtcttgccatgatgtccacggggtctgactcatcaggctggctcttctttccaacattatcattagtgactttgtcctaagggtcatcttcatgcatatcctctggtattttgttggtattacattcagcatcttcagaactactttctctaaattttgcatcctcaatgatgggattgtctcgattctaatcttcatccaaacgacttttctgacaactagtcacctctttggggtcactaaaatctctagctctggcactagggacattgaaacgaagattagacttggttcgagtgagggccatgattatttgaacgtaatctgcaagtggtctcactactttctttagttctcaatgaaagcatcaaaatatttatcgagatttttgaaaacagaatataaataataagaactggagaacaaaaatcaatagagaaagagtaaaaagagacaaacagttttttacgtggttagggcgttaactagccttagtgcacgagtcagtattatttagcaagtctttctcttgtaaatgccttagggaataaaaagaatgtatgttatcaagttcttgagcaaagttttcaagagagttcaacccctaatccataggattcgtatggtatttatagtagtttgagaattacattaagttttccatttctctctattggagagtttacagtaaataatacccttaggctttctcatgaagtctaacccataaagaagacgatctgctgattaggcggatcgaatttgaattgatctggtcaacaccatctgcactgattgtgggcaattaatctgaattgatttcataatatttgttataagaggtttccacattaatcttgatacaatactctgttgtgatatgaaaataggaatttccttatttgttcgcaggaataaaaagggaaacaggaagggtcttccgggcgcacattgtctcgtccttttggtctcgcggtaccggacatgcttctgggtacggcttgctgaaggcaaaaggctctgcaagtgcaaaacccaaatacgttccttgaaggacatatctaggtgggctcgacccactttacctttattaagggtcccactggtgggtcttgggtgttgacctggaatccacgtctccaatgctggaaacacgcataacatttagcaatgacaagattaattaaacgcaaacagtaatcagagaaaaataaggatgaacagagttatctaaaatcagaaactattaaaagcaataaaacgataaaatcaataccatgatatgtactggttcaaattcgatagctcaatcaatgatgtaaatctatgtatgactctactccagttttggaacaccaccgaatcctctttattgattgagtaagaacaggtataaaaatacagtcgagaaatgttggatctcttcaaagtgtttcaactctcacacnnnnnnnnnnnnnnnnnnnnnatctacagaagattcttcatacaaaatccaaacccaaactctctcttttctctgtacatttcaatctctttctcactcaaactcaaagtctcctcttaaaactcgtcaatccattgtacttcaaaagataagtgttggtggtatttgtaggctcaagatgaagatcctaagtcgatggctggacatgctaagttgttaagttagttatgacttaaataacttaacaaactctttgtaacataatctccacgtcagtacaacacaagctgctcccggatgatacatacgcttcttggacaacggactgaagcaaatgctgaaggagctttcggataagaaaagagctagctagagtcgactatttgaaacacccttccaaaaggaacaactagccatcgagaactcttttctagaggaaggttagatttcttgaagactacacatgtagtggacataatagttatctgagaacgccctttcggatggcaactattattctacaagactctttccggatgcacaagttagctatccgggaacatactttcgagagatgactaacttttcattattgggacagtcttataaagattttttaatctggagaaactgtaccacatgttacaattctgttatgttagcccacattgaaagggacataataataatatagtagagctcaagttggatgggtataagatttcttatagctaacctaccgtaaaaaaataactctcccaattttgaaatttactatggatgtgtacgcacctaaatacaaaactgtaaaattactcctagtttacagttacacaataaattcacattttaattctacagttataaatagtggcatagtgtgtgagtgaattgggagtcgggtaacatgacttgaatagaaaaattatataagtataataataagggtaggcggggcattgttgtcaatccacattacggtgggtgcatgagcttgtatctggggccctctgttttgtgcagagtggcctttaatctgacgcccgtacagaatagttcttgctgctgttgtgttgataccacaccccagtatctattctgtctgctcaatcgtcgaaaacagaccctaagacgtcactctcagcttcttcttctctcttcctcaattccataattccatagcctcttcttctatatgctgttggttcaagctgactctttgatcctcacgaggcttataccatttggccatcatgccatgctgctgccaatgacaaagccatttctcataacaatcagttctctttccttttttaataaagtgttttactaaaccccaaaaacctgtatatggcttccttataaagctttgtcattctcctttttctttggtcttatatccttatccttctttattgtctggtgggattcgttctctgtctttttaagcatattggtagaaacgacacttctttctctctgaagtaacttctcttcaccctgaattctcctggtacatcaatctggtatttcagtagagaatagtaagactcatggctcaacaggtagtaatatccatctctatttttctcattaatcaaacactaaaacggtgtaaatgatttgtgctattatggaaaaccaatcaatgattttccactgaagttttgttgtgtgcaggaagaagggtggccactcggactcagaccacttaatgccaggcttgggttgataagtaccctcgatatttctggatcagcatcattcaacacttctctaactgcttctcccacctcctccaccatatcttcctcagatcttgatacagaggttagcgtttctctaagccaacaccatttacttcactgaagaaggaaactatatttctattttcgtttgtttgtgaagatttacatgaataaaagggtaccatttctacagcctaaaatccactttgaaactaccattttctttcacacatcatatttttcatggcactggttgtattgttctttatcatatacatgtgtattgtattatgtatatggaggttctcataccctttcaaagcccctggtgctctcattctttaattggtcgataacattaacgaataaccaatccattgtgtctttggcattaaatgaatagtttgcatcacatgaaaaacataatgcgaaaagacatgaatgtatcactttaaaaaaaaatagacaagacttgtatgcagttgtagtcttttatttttgaaagatgttttaagaagtcacaaagttatgagatgctattcaaatttaaataatcaatgtggccagtggccttctgaacattgtgatctgagacgccaatccacgctcaattactaaaaatcaaatgccataactgatcataagagcacctcacatttgaatcacattgttgtgagaagagggtatcggcagggagctcacctttgggtctatctcaactgttattgtttgtagcagtaatttgtgtcctaaaatgttttgcagctctcttttcttaattaaatcattttttgtataatattttgttttcagtccactggatctttcttccatgacaagagcaaaacactggggaatctaattggcgtctctagtatttttcaactgtcccgaagatccactagaggaagaacaccagaaaattttagtggtggaaagatcctcaaatccaagccttggctcttctcatcactttgctcaaagctaaccactgatgctgtgactgactccaacagcactccttctcttggccactttctagagacagataggactagaagtagaactagtggtagtaacattcacaagaggaggagtcaaagtccactctattatggacctaatgattactccccagttcccactatttcgaacgtgaattcgctgtttgttgacggcttagttgccccatgtccatccactccttctggctctatcagtagagttagaccgcaaactgagttattagaaggtggtaataataatggctttggagtttccttagtaatcccatgtttgtgtggacaagtcataaattgatgagttttcaaaatagaacagcttttgaatgtggtgtcagttatgtgttggaacatagtttaaggaggctgtctctcttattttgactctatgagttggttttgaggcaaaatgtttactgttaatagtcagtcttttgaggtatagcctagtatattatattgtacctgttctctaatttaagggtgtctttcgaaagattctttaacactactttcgtgcatctttctgtacgctaatttttgttttaggctcactttttacaataaataaactagcataaggtttggggatacacaattcaagttacatttttttttttttgaaaaaaaaaaaatcacagtatgctaacttaatctttccttgtttacatgaagatggaagaacaaaacttaaaataaaggttcatcaagtaaagcctacacagttcaatgtaattaaagaaataagtacaaacaagcaaaagcatggctcttattattttccaaagccattttcgggttcctttttagtttgatgacaaacaaacccatctgtttatacataatatttagaaatctatgccaaacgtctacaacttgtcgatatgtccgagtggttaaggagacagactcgaaatctgttgggctttgcctgcgcaggttcgaatcctgctgtcgacgtttttccttcttttgttatttgaaatcaaatagaaacttcattatgcatttttttttttatttatttgttaaatctattaaagtaaactttgactcttcaactccaagtcattccaatatcaatgtcttccgaatacagaatccttgcttccctctctccaagtttccttctcattccctagacacaaatgaagttgcccatttcctttctaccttataactattctccaaactcacaaacactttctttcttcctttcagcaattagcagaagcagcaaatatgataccaaacttagatctcttccttcttgcattcatccatggctccttcatagtggccatccttctttttgccgtgtctgttgttttcaccattttccttttcacttttatttttgggctcttctctatcgttgtcgtggacttacttgatttatcaccaaatatttcttcgcgcttacaatcggccaaggcagatgttcatttaggttcggttgtggttctttgtacatttctgaatcgtcttgtttctattattatttcgatacaaccttcttttgatcgttttgtttcacacttcaaatcaaatacgcatcgtttaattatggaatatgtcgatgcattaaaacatacctaagatttaattttagttgattttttctttttcttttttttttgtaatttgttcttcctctgcgattgagctattcatcttattaagaataaaattctgctgtgatatatgtagctaggaaatcgaactggtaaattataggcatgctttgatcatgtttcctttttcgtgaagagtgtaaaggtgtgttggatcatttatctatctatctaatcattatattaaaagtgactatgtaacggtttaacgattcttttttttatttagccttacacgattaa

SEQ ID NO: 110576 - DNA, 4680 bp, Cannabis sativa
  modified_base (4644)..(4655): a, c, t, g, unknown or other
ttttttttttttttttttcatgtagcagatacattttacccattttcttcaaattgatcttagatggaaaagatctcggaaatataataatgtgtgttatactacatttacttagtttatgtatcatttatgcaacaaatacgcacctaggcacctgcaagtctatgaccaagtataagggctatgtcttggtggtactagtttatactgactccacgctcacacttctttatgctttttaatccttttggtgtatctgtcttattcgttcttcccacaattctgaactcattattgatgctctattaatgtgttcaaataatttgcagggaatgttgacgagtgtaaaatgtttttcgagtcactatacaaatttgtttatcttcaggggacatatttaaagccacatgtgagtatctaccttttatctatggctaactatgatagtgatataagctagatatagtatatttcattatggtatttatccttacgttttgtcaatttcttagttaaaacacatctaaaatgcagataaaagacatcaagtttagaaatctaatatgtaattatttcacatatcttctcagccatgtaaaagtttaggttataactagtaataatttatatattgatttttttattagctagaaagtctcaattggctcttttaatggttatttgaatattacgtactgcaggttgctatcttgaatggtattactatgggagctggagctggaatttcattcccaggaatgttccgtttggtgactaataaaactgtatgtgacttgtgtcatttcttaacttatttgaggtcatcatattcttcttttcattctcaatttaaacattaataacatgctattggaatcaaataactcgacctatcatgtgggttggcatacttcgacatgacagttattttgcattatctttagatataatcaatatgatagaccccaggtaaggatcctcaaaccaaaagcaatgataacaggcaaaaaagaaggaaactgaaggaagaagacaatggaaatacagaactaggtagattttagaattgttattgaatgatcaatgcgataagagcacactagaacaatggggtatgtgataggccttgactctccttagagcaaagctctatatatactatccaatacctctcaccacaatgatccatgtatacccttttacgtatattctactaattgtgaagtctattacaatatttgattgcaaagagttttcatgaaatacctctactaactaggcttattgtcacatgtctttttttttttgttgaaaaagaaacagatgccatatgtcttagactgacctcctcccaaatatattagggagcctcacttattgcggagaaaagccgtggcaacacaaaaccaaaacaatagttttttttttcctggcatatcttgttgggagcgtggctttcttttgtgttaaattatgcttacttaagtatattcttttatctgtgaaaaattatgtaggtcttttctcatcctgaagctcaaatgggctttcatcctgatgccggggcttcattttatctctctcgcctgcctggctacttaggtacataatattcatcttctatggctgtacttccatggcaacatttattccacttatcttatcgtgtttcttttctttcttcaggagaatacttggctcttacaggagacaaacttaatggcgaagagatgattgcctgtcgccttgctacacactacacgttagatgaggtttgattttttgcaccttggtttctttgctattatttctttgtttctaaaataaagtaatagtgacaactcttcttacagaggctaagttggatcgaagaacgcctgagtaaattgattacagatgatccctctgctatagaaacatctctggcacaatatggtgacattgtatatccaaacaagaggagcattctctttaagtacgttcccctgaaaactgtgtttgatggtgccgcccccctttctttcaattatcattgtgtaaatatttggagataaaaaaatcaataactaaatctatatctgagacttgcttatttttcttgctcatgttgatctagaattgacaccatcgatagatgttttggccatgactcagtagaggaaattatcgacgctttggtaagtttataagaaatattttatagagtttatttacggatataaaagttgtgcaacaagctgttagatatttgagtaagcactttaaaatccagtctctcatttttggtatttgtttcttccaaataattatttgttatctttgtacttattgttaaaaacaaataaacaattcaaacggtcaggagaacgaagcttctgttgccaacgatgaatggtgcaaaatggttctcaagaaaatgagagtagcttctcctctgtccttgaaagttacgcttaaatctgtgagttacccctctcgtgccagtaagaaattttatttttttgcttttgctctcatattgcctttgacctttctctattgcatattagattcgcgaaggtcggtttcaaagtcttgctcaatgtttggttcgcgagtaccgaatatctcttgctaagatttccaaagaggtctccaatgatttctgtgaggtatgagtttcttccaagtgaagtttgtacttgagagaattcttggaactgcactctctttgaattctcagcttatttatttggaatgtttctacagggtgttcgggcaaggttagtggataaggactttgctccaaaggtatggccacctaacataaattgttttaactgaatgagaattgttttctggagctcagaacaatcatctgactgatcgatttcgaaaaaatccagtgggagcatccaagtttaaaagatgtgtcagaagacatggtggaccgtcatttctcaccacttcctgaagttgagtctgaacttgagctacccactgcattgcgagaaccatacatgtgagaccgacgagaaccaaagattattgaacttggaaacgcaaagcagaagcgcggttactaagccggacccaggtaagatcaaaaggattgagtgcatttttgctatgcaaaggccaactgttggcgaaattagaagtcattagtttctctttcaagtgatctttaacaacttttttcaatatacaagttcaatttcttgacaatttataacttttatatgtaacaatttacatttaatataaagatataataaaattttgctggggaaaagacatcttttatgttggttttagttttatttgacactaacttagaagaaagaacttgtttataagatgaaaatcttacacatgtaggcttacataattaaactacacttaggtatatttagcggttactgtttatatattttttataatttttttttcctgtgcccttttatacatttacaaaatttcgtcatgctccatattttgtctttcctattttatttcatatgtaaatatccaaaatatttaccatttgttatttttgttggattacataatttaagtttagcaaataattaatataaatcacagtgattttgatagaagtgtgatctatattatactattaacactttttttacttgctctttttctcaaataacaatctttacttgaggctttgtcaaaaggcaaccttggttatgttattttttttaacaacttttttttgcttaacatgttagtgaaaaagaattttaagttcatcttgtatttttgatggggagtatcagataattcctgaccatctttgaattgaactttagattttttttttgtaggtgtaccctccctccttttctggtcattggttttgtttatttgagaatatttagtaattgcttggcttagaccaaaaaatcgcatttaaggtagacaaaacataggatttgaattttgaattgaaaatggagaattcatagtacttttcactttttttttttttgaaagaacatcaagttagtactttttacttggtaatcatctaatcattactaataccatcaacttaattattttatggctgcatcataagatccctaaatcacttgaaaaaagcttcactagaggggtacaactaactactttagtacataccaaatttgtcatttggaaaatttgtgctgattctctcccaatcatcaatttatatttttattggtgcatagatcaaacttgtcccttatgcaattctccaagtgtgattttgtcatgagcctttgatttagcttatgaattgggctcagctacactcttctaatgtagtaaaataggaaaatgagtagaaaagacaaacgaatggattagatgatgtgctatgaaattggaaatgtgtgcacaaagaaaatacattggagttgtagttgttggaccacgtattggcatggcagctaatgctgagagtgatgtcaaatgtggcccaagatgcctaatgtatggagtacctatttcattcgaaagtgcatgttcaaataggttcaaatttgaatattgacataagaatgagacctttcgatttaaaaaaaaaatgaaagcccaatagttgcagaaaggggttagaaaaataataaggggaaattacactctataccnnnnnnnnnnnntcctcttttatttttaccctctttt

SEQ ID NO: 110577 - DNA, 2399 bp, Cannabis sativa
gtctttatataggcaaatgtacaaaatgacatgtgctacaattacacaacttggcaagaattaaacagaaaaataactaactccaaaaaatagttggagtggcctagtaacaacttctaatagctatagacaagaatcaaatggtaaagtactgaatgaaaggaaacattattccgctactacaacgagatctcatattcatagttttgcatgttataggaaataattattaatattaaagaattatttacgtgaaataatatgatgctgtaaattattttccaacactagcaaccataactagaatgagatcttgttaataataacacatataacagaaaaaaattcaaataaaaatatttatctcttgtagcatagtacttcagatccaatcctttgaacaccacgagcggtatcacaaatcctccttcgaatatgaatagcttctatgactacttgtctccttgactatttttacacagatcaaagaggacgagtggtctccttttttaattggtaaaattataatcacactttagaatctcaactcgtgaaagtgagaactttttgtgaaattgaggaacacaattgttgtgctcttcaagaaggggcgacactcagggaagagaagagaagagagagtttttagttcacaaatcgacagagttttagaatagaattcaagattacccgaaataaatctaccatagatactatttatagaagccaatggataagagagcaagcaaaccatttgcttctcttcttgttgggttatgcgccaaacacagtccacgaagtttgggttttctcaatttatgcaatctaatactgcatttttctctcatcttttacttttcaacaataaattgtatgaataattaattttatcaaaattatttctttataaaatatcactgtattttattttctcgatattattatgaaaaatttacatttgagaatactatttgaaattaaatttcaaaaatatggtgggtttatttaataattattttataccattttcgtgtaatatttttaaaataattatttttttttttataaatagcttttgatacatggtttgatgacgtcaccacctgcgcacgtccatcatgtcccaagattgtaaatttatgtgcctataatttcctgccacgattttcttatttttttttttaaaaaaaattgattcaattaaattgtattagaaatgatttatatttgaaaatattaatttttaaaaattaggagtttatagagtgggtatagggatttggatatatatagcttataactaatttcttttgcttattagtcatcttttttattttggggtctgatatttgagttgagagagtttatgtgtatttagggtttccttaaggtgatgggtttctttttctctctgtgttagtattttagtgagtgtttgagtttctttatctttatgtgaaatttgttgagcgatggtttaaactcgattgcttatttccccttgttattttgcaaaagtaatgtttgataagaagaagaaggaggtttctaatgatggcgatggtgttgattcaaatagttcttgtggatctagtggttcctctggtggtagtcgtggatctgttttggaaaacaacatgcagagagcagctggtaaagtgaaaatggatgatgtgcatgtttcgaaaaagatgaaagaagttgtagaagaggttgaggaagaatatgacagtgatgatttggaggttcaggttcctaataatatgaaagtatgtttctatttttatttttcagtttatgatttgtatttccttctgatctggtggtttattttcacttttatgtattgttaggttatggtttatttatgatttgttaaatattgatagaatttatatgtgttttatgagaataaaatttattgtgttacagatgtagtataagcaaacttaagtctaatgctctcaaagaaagcaccaagcttttgacgcagttttttgccagttaatctaagaagatcataaatttatagcgattagattcacactatatgattgtcagaaataaattggtttaataaggaaatagaatcagacacataatttttatagtggtttagtctcttgatgtggtggtaattggctagtccacttgttattttattgatcaatgcttaaacacacaacaattatgctctcaagaatatattttagtgattacaacaggtaagatctttagtagagatctctttagtgtgtgtagggttgttcatcaaatcgctcaaaccgcttgcacaataaaaaaatgcagtttgaaattctttgcggtgcgatcgcagtttaaatttttcttgaatcccacggtgcggtacaatttgcggttttaaattgttaatatgc

SEQ ID NO: 110578 - DNA, 1966 bp, Cannabis sativa
  modified_base (1924)..(1939): a, c, t, g, unknown or other
ccttatgtaatttgtacaaataaagttattattaatgaaactcttattttgatattttctcatatttatgcgcatcttaattttacttttgagaaaatttagaggacctgaataaatataaggtttagagtttatttgcttaagaacgttgctacataaagtacattgttatatagtaaatatattgtaatacatgaaaaataatactcgacacataaatgaggacatcactatgattcatatgtttattatataatgaggaacgttcggtttgaatattttagtctaaatactaaacaagtgggagaatattagaatattttttaattatgaaataaaataaagaattaattttgagataaatgaattttccatattcattgaatttggacaatattaattacgtgatattttatatatggtcagattttaatattcattatctgatttgatttctcaattaattatcaaaatattctaacaattaatgtagctcagatactgatgtagtatctcacttataaatatagggtctcggtccctaagttcttcactcattttgtgtaaatagcaaaattccatttaaagagagttgagagagcgaggaagctcaaattcccatacagaagctatcgcaaagattgaagctcaaacattaatggttgaaagtatttcgatcatttcatcgcatatacatttcgatatgtttatagttattccgcgttatatatcgttcatatatgatttattttttatattatattatagtcgaacattaattaaatgagaccgtggaaaatgatacacaatgaaatgataatgcttttcttaaaaattgagaaatatctctagctaaaaatacatagtcaaccattaacatctcacataatatctttaaacgtttaacaatttgatgaactcttttaaatcaaaacaaaaatatcaccaaggaaacacaattaatgctacacctatatatataccaccaaaactaaaataatagtaagcacttaaaagcaaaacattattaaggtattatttctccaaatgtgaaagcattacaaatcaattatatattccctaatacgataacaatagtaataacaattatgaacaataaaataagaaaataaagcatgactttgtgttgtggataaatgataatgatgatttaagtgcactatgagcccctccataatgttgtttaaacaccaaaataaataaactaactaataagggtacaccaaatttgctaaaatgggcccacattttgatagtattaatgagtactacttatttttcataatgtttgcttgaccaccaccaccactaataataataccattttagccagtcatagctatagccacctacctctttattctaggttcaaaatgatagataggaatatccctatccatcacccttaaaattgtagaaatcatgtggttattaataccctttttctttcttaaaaagtcacaattaatttatttttattttattttcttttaaaaaaaaactctaagtacttataggtagatattatttttaaggaatcataggtagacattagacaatatggttttttccaccaattagtgagaaaagtttagtttatgataattttatactcaattttgatacatggttggattggatggtagaaattttgatgagatcctaaatcataatgaagtaagaagatgattattgcatcttattttcctatgcaaaggggaaatatattattttaaattattagaaggacattctattgtctgtcactattatttctttctttataaattgaactaaatatttatttaaaaaaaaggctaattaaaaatttttaccctatactttaacaagtaccaaattataccccttgaacttttctgaccgttaaaaattcctcctgaannnnnnnnnnnnnnnnatttaaggacttttgtttaatttcatt

SEQ ID NO: 110579 - DNA, 4882 bp, Cannabis sativa
gagagagagagagagagaatggttgatgccgtgcgtttgggcgagagagagagaagcagttcaaatgtgagtgatattatggggataaaggaaatgtagtcatatatgggctatggtaaaacatttaagtttaggaaaataatattagggtttattatatatagaatttcaaatttttaacacctttaaaaaatactaccattgaagatgctctcaacagcctataattaaggctagtacattactagtagggtgatcccgaaatttggtgaaaggcatatacgctgtcaaaatggtacaagaacttaatctacacaagttcttaattccaaatacaaacactcataggtaggcgccattcttaagtcatgtaaaactctttttattatttctacttgaggaaacaaccttgaaaaatctatcttttaattgataaagccttcagatatcatataataagacatctttaaaagatgagcattaagaagtacattaacagtggggatgaagagttattacatgactaatcatacagaagcaggtgtttccttttcggatggaccgccattatttccattctgcaacattttatcctctgatggcaaattcttcttagcttttctgcttccttcaactttccacatatcccaaacgcgggttttcggtggaggagcagcatctgaaagtggcgcaactaatcctggtttcccatcatcaataacttcatcgattaacccatattccttggcttcccaggcattcatgaaattgtcacgatctgtatcctgttcaatctataaatgacaaaataaaaaaaattaattgggcatcataaagtaaatgagttaggaggaggattatgtcccacctgtgattccggcttccctgtgattcttgaaaatattttgttcagcttaatcttgtgatacaccatttccctaatccgtatacccatttctgatgcctgaaagcatatgtagttgcaagtcaaactaagaaaaaatttaatcttcaatcccaccagcacatgtatcaaactgaaaataataagagcagcttaaatatgatatagtgtttagtaaaatagcattcaagttatagtcactctgcacaatagtcttgttttgataattttgtgcaaaatggccttccagacaccctgcacaatggtcttgtttcgattattttgtgcaaaatggccttttagacaccccggacacctgttaagaattctagacagcttgttgaaaattctcaacatcctttctggattctagaccgatgtcgttgtgcaaaaaaattattaatagaaagtcacgacaatataaaatatactattttcaacgattaatgtaataataataataattccttgagtgtgcttccaaaaaataaaataaaataattccttgagtggatgtgcttggaactgtcctgctgattatcaagtatgtgaccaagctacacataaatttatgcatagcacatattgtaacaaaaacaatctaataaaccgttgagctatgtaaaattaaaagccgagtaaaaatctcagacaggatgagagcggttcatgaaataatgcaatgagatcgacatgacaaatgcaaatgaaattcacacccatcaaaattcaaaagtctaaccatgacaaatgcaaatgtatagatgcccaaatttatgctggcatattttcaatagtttcacttcttgcattgcagtttattgtttacaacctctgacaattctttatctttttctgttttctttgaggacctagcactgaagtagcattatatctcatattaaaaatggaatgcaaagttatactaacttccacagttcttccacaccaatgtttccgtactatatcggaattaacaatggaatcacaaagcaaagaaccttaactgaaatcttaaagaacaggcagaaaaccactacttactttgcctccagctgttccaagtggttgatggatcatcactctagaattgggcatacaaaacctctttcctttggtaccagaagcaaggagaaatgcacccattgatgctgcaagccctaggcaaacagttgaaacatctgctttgcacagtttcattgcatcatatatccccattcctacacatcagtagaaatgacggatgaagaataacaaacaaaatggatcaagaaaacttttaagattaatagattgacaatgatatacactcaattactttacccatgcatatcacatttatcatttcattcccaagggaccatctaaggaactccattagtccattcatggtcaaaaatcttattaaattaagtcacactttcacgaatccattttcagaaaaaatatatgcatgtagatttttgttctgtacttaccaaccatttgaaattgaaggggactttaacaaagataatttaaggaatactattggacaaaaatataactattcaccacagaaaggtttcaatgtacaatgctggactttaattccttcctaacatgaaatgcatttaagcaattataagttctgcatgaaacacgtctttaatcctaacccaaatgaattgaatgtagactaattacaaacatatcaagatgagttctcaatgtagtttatgagcttatggtgtctgaacaagtgctttaggctgtgtttactaatcaataatcagccaaaacaagaagacaaagaagagaaagtatttccctttttcacatatttacgtttttttaacacacaattcattgagtgtgttgttgaaacagaatcattgagtgcattgtaatttccaagtacaccaacatggcataaccacaacaagtgaagaaaacaaatcaccatatccaaagttaattgacttgttataaaacataccagcagtaacagaaccaccaggagaattgataaacaacgttatatctttggtagaatcttcagcatccagaaacaaaagttggcttatgataaaatctgctgtcacatcatcaacctgcaaatcatattaataagcaaaatggctaaaaattttatgaagataataattcccaatttccaactaatatactatacttgcatttgcatatgaaagtttaggtcgagtactcgtgaccaagggtcaatttaacattcaaattatacaaaatcgaatgtagagttcagcaaggcctaataataaaaattaaaattgcactaaattaccttaaatatctgataactagggaaaaaaagaactcattttctaaccatagcagttactcaaatcattgataaagattgaaaaattttcatgtcatacattaaaatcaaaaaattgataccgaggtctatagaattaacaacaagtggctaaaactcatctcgcatagttcatttcttcaccgcacaaacaaaccaaaaataattcaagtcataattcagctaatcacctgagaacccaagaagataattctctgacgaagaagcatgttagtggtgtcgagctcttccaatctaggcatccacgaaggagctgaagttgcagaaaagcaatcttgactaatatcccaattactcgacagagttcgtcttgaagacggcgccgatttcaaggccctaatcgccggagcgcctcttcttctttctgtatgaccacttgtaagactgccgaggttacagctactactggggccgaagcttttttccaaggttgaaatgggtaaaagggttcgcaagacgccatggttggggcagagagagctcgaaggtgagcctgcgtaggccaagctcatctccatttttttaggcttttgagatattaactgacttgttggactgagaaaatggcacggaaaataggtttacttttgggttcagaaaggctgaaactcctccaaatgatgtcgtttcaccttaatgttttcatttttctctccttttttttaagtgctttaaagtaataattagtaattacacaaaataatatagttgacaattatttatgaatttttagtattttgtttagtaaaatagttagtaattttacaaaaaaattaaagtgcttctagaaagttatagtgtaattagaggtaagtatacaatttggcatatttgtttataattatactgtaattgaatgattaaaggtaattaaggggttccaattactctctctctattgatgcaaaaatctggacacagatctttgggccacactcactcactagattgatgagaatgaattataggttaagtatatttatgagagacacaaagatgtttatgtggttcatgcgttaacgatccttagtccacgagtctatattattgacctctttgggtaagcattttggattaaaaagtgttacaatattgatctctttgtttctcttgtgtgaaagctttcttggaatttttgcagagtgactgcaagcaaaaaattattctcccattcatcaagaaaaataagactatttataggcacacatgaggtaaagggcatacattttacctacttagggtttcgtcttctacacgctactaaggcatgtactgcgagaggatgatctgactattagctggtaggaaccttctgcatcatgcggtgcacagcagctggtgaggacttttgtacgaccctggacacatgttgcacaaaggtctctcctttgcaaaaataatctctaaccaggttgttaggcaaaaggtatactcgagggtgcgtacgcgcaataccacgatctggcataggggacaagatttgattttgtgtcagaaaaaaagtgtaaccgtctatagagtgatattttgcaagatgttgacgtggccaacgtctccaaaacccttacctataagaatatttctatattgggaaatatatttctatttaaggaaataaa

SEQ ID NO: 110580 - DNA, 7315 bp, Cannabis sativa
agtactattttgagtggggaagttttgccttcaaaataattaacttcaaatgatgataagcaaacaccctaatatgtatttatacatatataataaggaagaagctcactgtgagtttcataaatattgagattgtggctatgtacaaagacaaaacttctcttgaagttgttctggttcttaatggtcaggaaaaaataggacacaacatcaacttcaaaatatgtacttctagtgatttttttttcctttaacaaaaaactccaatagaatctccaactgagcaactttatagagaaacacatggcccttttctgactcatgttagatttttgaattaaggaatgtgttcgcacttactcatgtgctgcaaaagggagtttgcttttctctgagctctatttgttccagactttgaaagctccactaaagattcatacacaccatactgcagtgcacccaaaatgaaggaagagttattcaaacccaactcaagaagaacagatgtagcacattctttgttcttaggagttcccgtttgaataattcttacgagtgtttcaatgaaggacagtcttcctatctcacttcgtccttcaggatgtgatgcaaggagttggaggattgaaagagcttcatccaccatacccaagttcttatcctcaagaagatgtagcagtggtggtattatgccagccttaatgactctggacttattggcttggtttaaagacaagttaaacaaagcagtggcggcatctttcttacctctaattgtcccactccccaaaagctccactagtggagggattccgttcaaatttcccacgagcaatttgttttcatcgatcatcgataagctaaacaatgctgctgcagaattctctttagcctgaccatttcctttttgcaagacctcaattatggccggtatggctccttctctagatatgagtcttttgtttgcctcgtcaatcgacaagttcaaaagggctgtcacagtttgttcttggatctcagaatccggataggacaatagctgaaccaaaggtgggattcctccactgctggcaatcaaaattctgttctctggattctctttggagagcatacgtatcttcacaatggcttctctccgcacatcaagattgcaagagtaaagatcttggactaaggaggagatttcctcaatgatttcagcagaacaaccaaaaggagggagtattacaggatctttcctgggaagttcaactttgttctgctcacaccactgcctaatcacattcttgagagcaaaatttggcgctaatgacaaatgatccaatgtctgtccagtctttggacatgatctacgatttgaaaacagccacttctctatgcttgctctttcataagtcttcaagaaaataaaaaagagggaaaaaaagtagcatctcagttttacgcaatattaataaatcattaaaagatcatttttagcttaacatttcaggcttattttctctaaagtcttcagtgtttagaatgtattatatacttttgtggaaaaaagaaaagaatgtattatattgaccaagtcattaaacatagtcattccctagaatggacatggaagtagttaagacttgtttacctgaccacttgcaacaataacaggatcaatcatgatctccaacgtgattggacaaagaaattcatgtggaattaacgaagttggacacctctgaagagttttggagaaaggactatcaaccaaaagagcctcatcaatccctgcaatggccttaaacttgttcaaaagatcagtcatctgctgaaggctttcagagttctgtcgtctcctctttagaagctttttaacggcaaatgtttcttctttcaggtcagcaacagtatgcagttctaacttggttgctagtctttcaagtatggcactatcagcatttcgatcatcttttttcttagagaacacaaccatcaaatccattgctaactccatatcttgtgtatcagttcttctccttgctctctgaagttgtgtatgcattaactcaacctgatgtaaatccatcaaacatagaagtaaaatatctactttcatccttaaaataccattacctctaaacagcacactttgaaatttttctttcaattatgaaactgtcagtgtatcatgagatggataaagttcatggcacaatcatataaatataaatgcctatctaaaacaagtctctttccctttcccctaagagagagagacaaaaaaacctaaaatgtgagtcccactacctactcattaaagaagattatgactcagaaaaacttgacaaagggtcatcttattatattctgcagattgcagctttctgacaaggaattttgagtaaataaattaaagctatatatatgtatatataagtagaatttaaaataaaaataaaaacctgttctttaacttcaactgagattccaagttcatcgtaaggcatttcatctaaagcttgatttaatttgtcatagacagcatgaaatctccccatcacggcttcactctctagagcctaataattgatttaataaaaaatcaacaaaatcaataaacatcacatcaaaacaaataaaagattacccagttgtcaaattcgcatctacatcccccaaaagaaacaaaattaaataagactaaccaagtaaatcttgcttccatagttacaatcctttaacaacttcttagccggaagaagtgcagtcttcaaattaaccaaaccattcagagcctgagcagaaatcaatgtagtgtcgttttctctaatctcttccaaaagcggcactaaaagctgcagtcttctgaccaagctcaggcattgcttccttgtcgttttccggtacccagaataagatccaacggtctcgatcaatcccatcagttccacaacaacgtcgttctcatcgccgccactaccgtcgcttgatctgatgaccacatttctcctcttctgttctccctcctccattttcttatccaaccccttctctctctctctaaagccttaaagcagctgttgcttccagctttagtagtagtagttactaaaaagaatatcgtctttaacgattttgacaataagggtattttttttttatttttctttttatagaaagttaaaaataaataaaaataattaatgacgacgataaataggtaatatagttccattttgtttttttggttattatataatttatttttcttttttaatttaattggctggatggcattttggcgggttgtgttgtgttgttgggtgttggtaaaataaaaagaaaaagaaaaagtaaaggaagattttctttttatttttctagcaaggaagaaattattttgaaaaacagttgaatgtgtttataggtcacataatattatttattattataatatatatatgtgtaggacggtttcacgcggtttattgacaatgtgacgcgtcttcacgtgtgactttttttgattgctttgcgtcgttttcgtggtttttgggtcccattttgtttagaggtctctaatttttggcttatggtatgggtcccaccttctcaatctcacagatatttatttagataaacgttattgttaattttttttttttttacaatctcttaattaatttttacgtctgaaaatgtatgtcagaatattttattcaattttcttttacgggttatcgtcatgcttattgcttacaacatcatctttatattaggaattctgttttcagtactataaattattcggaatttctaaaaatttataaagataatactgtaatcataaataataccgctatgaaaaaaaatttgaaaaaaaaatttcgacatgtaatttcagacgtagaaattgactaagagattgtaattaacattcctcatttatttatataaaattcaatttattttccttttcaaaaaaaaaaaaaactatgtataatttattttttctcaattttctaaagtgattttggggacaggctaatctgaagaaacggagcttgcgatttaagttaaacggctgtcatttttggttttaagccgtgtaaatcacgctctaatttttagacataaatatatggccattgcaccaagtcatttttatattttttattatttttttagttgagaaataataaaatgtttggttctgatttcaaagtcgttaattgttagtgtctagagtgaggtggtaataagttttttatactcgaattaaaaaaaaaaatgaaactcaaatttagtattcttttgtgtaagatgaaattttagtgatttgaataatgatgttgaagtgaataggagagatgtacacccaacaaaatgggtggatggatgtatcatttcatgtttttggtgtatagataattttgattttctataagtgatattataattgtttaaaacaacatacaaataattaaacaatttaggttatatatgtatgaaataaaataaatatactaaacttagttaaaagtcttaaattaagttttgttttaggttgagaataaaacctgttatatattaaatatttaaagttaaaatataaagttaatagtggagggggagtattttctaaccaaatacaatatctgtccatggaaaaaatatacttagccaacttataagcatcagtattagtagatctaaaaacatgagaaatctacactcttgagaaattagtcacaagattctaaatattaattagaatacaatgaaagaaactacatctttagaagattccaatcctttcgccaccacaagggaattagttttaatataatgcactggaaactgcattcaaccaccgaagactgtagaagatctacataacttcaagtatttttggtttgtaacatcctttaaaagccattaaaattgctgctaaaagttcaccattaggattgtgaaaaatagctccaaaaccaaattgccgagaaattttcctgagaaaactctaaaggtgcgtttctttagattcaacttcattttgtacttccaaatgatagaaaaagcttttttctaaatcttcactatgtttcataaaaatttttgacttaaccaacatgttatcaacatataccttcatgttcttatcaagacattaccaagatcaagaacatcttggtatatgttcttttcaacatatacctcatgttcttgatatatgactctaacattttttaatctaaaatgcatgatcttgtaacagtatgtgcctttatcagtcttaaagctagtatattcttgatctactaaactggatacaaggcttcttaaaggaactcaatatttgttaggttatccactttcactttcattacttctgattgaactatattcaatggtcttctcttcttacagactagatgtgctttttcatcattgtgttaggacacagtgtaggtggcgccactcttgtcttaattaagaaattggtgatgttttttatccaaacaacttttgtcttgtctccatttaattgatttgaaaaataaataatttattacaaaataaatacataaatcgaggtacaatcgtaccatggccggcgaggcaaaccgtggtcaaatggaccactgtgtcctttacttgagcttcatggcacggatcgcagctcctcacggagcaaattcagaattcaattcctatttgcctttacaaatgggagaagggacggtggtccctatttgtgttgtggttggagaagacgccatgtgatggtcatggccctattgttattcaacgaactgagacccgatcaggtcccatgggtctttcaaccctatcttcgcctattgcctatgcccgcggtcttcttcatgccattcatggccactgtgacaatggtggctcatggagtcgccaaccacaataaacaaatggtggcccgaccctatacttgataatttatatatgtatatatatgttatacattatataatgtatatactatatagtgtatacactatacattatcattattatttaatgaatcaaaaataatattttgaggaatatttattttttaaaattattttgaaattaaaataaataatatttgattttggatttgaaattcaaattctaatatccatagccatattaagacaaatgttgtcttaattccattaaaacaataaaatttattattttaaaataaaacataaagtggtaattaagctgtcttaaataaagtatttatttaagaataaattaataaattaaaaaattatatagttcactagacactataaactgaaataaaaattttactaaatttaaaatttcatgtgggcaaaatttaaaatttaataaaatcagatgaactttatgatagatttaatcaaataattagtttaagaaaaataaaggtgtgctatctatcttaattaaatttatgataacactattaaattaaatctccataactttttgtggggtaaattattagaatccaatttagcttattatcctaattaattatataaatataataaaattcttgtggggtaaaattattatacctatataattaattacaagttatatctaaattttaattattatataattttatataattaaagatattgtgacttgactactccctaattatttaaaattatattttcacttagacattatgtattgagctctatctaaaagcaatttcgttattaacataataaacaatcactgagattaatactcctagtctagtcgtccgaaaattattaaaaatcgttcaaaagatataagcatttgtctcagtttcatgctttattatgtcaaaccataaaattacttacattttattcataatttattcactttataaaacttaatgtggtaaataaaatatacacctatcttaatgtttgaatattttcttaatatatctagcactattatagaattaatatatagcatttaaatcatataaatcttaattaattatactaataataaatttacaaaaataaatacaaaataacacaattattaaatacatattctataatatgatacttaatgactaaattaattaaaaaatcatgctaaataagacaataaatctttatggaattaatctagcatttaaatcatacacaatttcaattggttgtactaataataaatttataaaaaataaagagaaaatagtaaaattattatatgataataaattaaagggaaattactttatatattatttttttaactttatttttcaaatttacggtttgagtttctaaggtgg

SEQ ID NO: 110581 - DNA, 3868 bp, Cannabis sativa
  modified_base (37)..(40): a, c, t, g, unknown or other
tagtttagggataaaatattaagtatatgtaagtatnnnnaatcaaatttccctatatataatacgataacaataggttggtttgtaacgtcgtattaggttgtattgtattatattatattatattgagttggattatatatcatatttttatataatataatattaaattttattatatagtaaaatattatatatttaggtgtaaataaaaattaataccacatgtaattttatataaaaatattatataaaatacaattcaatataacattatataatacaagtataatacaaacaaccctaaatattttaggacaatactgtaacatgggtgattagactagttagcatttgtttattatttagacaaaaagctgcatcattagaaagagtaacaacaaacaagttggtgttggtccctccctccctccaacaaatggaaccaaaagttacaaaaccttgtcttttactcactcggaggggactcattgcacacgtgtcaaaccaatggaaaaactacgtggttccaagtttccaagaataaccaaacttctcttctctctatgcccataactcaacattttatttttaatatgcttcgcctaccattctttcttattttatttactacagtttttcttgggatagattatacttatcttttgggacattattatattatagcggtgccattattaataatagtatgggaactctcaatttattactgacccaataaataaatatatggtacgagtttcctcaaaattatctcaataccacacaatacaatacctttgtaagttgtatttataaaaaataagtgagttgtagtatgcagtctgaaatggccggcctttaatgattttgaataatatatcataaaatataaatatttaaaatttataatacatttaaattttatttaaataaaaacctaataaatttttttatttttttattttgaactcccaaaaagtgtaggcctaacctagagccggtcctgtctgaaatttagtagtcaattagtcaaatgatttctattttaaaattatttttttttaataattgtttgcaaaatataatctgtctaaatgaccgattgtctaagctgtttgaaaatttcgactagctatctgaaaattttcaaccaaccatctagagtattgaagagtattttgtaagaaaaaaaaatgcaaatttgtacaatgttttttcaaaaactttttgcaacatagcatttttaggcacactatattttgttaaaattttttgcaaaaaatttagggacatatgtataaaaaggttatttccaaataatagttagaagaaaatgtatgatttttaaagtataatttgcggtataaatacctaaatttaactcccagttacaaataaatacttaaatgtaatttttggtgctaataatacttcaattataattctagaacttttgtaggtatctgactcttaaatgttaagtaaattgtcacgtgacaatttctgattagtcaaagtcattaaattttttatttttttataaaaattaatttaaatataccaataagaaaataacacgtagatattgacttaatatttaacggttaggtactcacagagttctaaaaatataacttaagtattattactgctaaaaattaaactaagatatttatttacagcgggagttaaacttaagtatttatgccgcaaattacttatttttaaattccttgtataagttaaataagtagtaaatttgaaacttaatgttttatagctaataacatgctaaagtcatattttttataatttcgtttttataaaactctactttttaatgactacatagaatatactatatgatagactctatgttataaaaaaacatatatattatatatatatttttgaatctttcttagttattgcattttgtcaaataattaaaacaatcttcttaacttgaatttagtatcaaaatattataatcttttttgaaataaaaaatggaaaagtagtaagattaaagggtagttttttccttataaaattattgttgtctaggacaaggactatatatggtcacatggccatggcagattcctcttttctcttttgatatgccaatctatattttatataataaccttttttgactttgttgtggttgtttcttttgggattttcagtttgtaaacttgtgggtctctgtttttttgggcctaggtttgtatatatgaataggttgaaaaggtaagatcatgatgtttagagttgattaaatatcttttttcgtttgtactgtagttttggctgaaagattcatttttgtctaagttgtgatgaaatgtaatcaagtatatgagatcaaaatcagaccacagttgtaattttggtgccctctaagttgatttggcccttggtttcattgtttcttggtaggtaagagatcttaggtattaggtaggggtattactttaccgcaatagtattttctatttccaatactagattatattttaattttttatatgaccttagtaatagatattttgttcgctttttaagaaaatcatgaataaatttattcaaaataatctattgcaccatagcggaataaaacttgcgtgcaactagaaatgaaaattgagccggcaatgaacggtgaatctctattttaatatttatttttacctccattttcatgtatttcctattagagatgggacggtgaatctctactagggcgggtaatacccacaagaaacttatttattttaataaaaaataaatatataaaaatttactaacaataaactaaaagtacatgaagataatgtgtaataatttaaaggctaattaggatttttgtccactaaactttggcatgttttaaattatgtccctgaatttttttagccattaaaaatttctccccaactattgaaattttggatttatggacatttgtccagtttcattcaattttattaattttgtaattgtccatgtactaaatcatgctctttagactttgatatttaccaatgccccccgaactttgacatgtaccaaattaagcctcttgaactttcattcatgttaaatttttcttactaaaattagaacaagttcttaaattcaacaatctcaatagtacaagtgaaaattttaacgaccttaaaagttcaaaagtcatgatttgataaatgttaaagtccagaggacaaaaatcctaataagtctaatttaaaataatattacaaaattaataaataaaaattaaatgggtccttgttagggcgtggggtgttatccctatccctgtctcgtttaacattcgaggatagaaagttgtccccatcctcaccccattctgcatttaggtagagaatcccttccccattaagagtgggtacctgcaggacccatacccatgagtacaatttttatccctacttattgttttaattttattttcgatattttaaattatttagaatttttcaaaaacagtcgaaatatttagtataagtatagtgtacatctacacaaatttggtttatgatttatgtatgatgtattgtatggtatcttctaattaaggtgggattggaatgatcctttctcaagattgatttgttggaatattttttatagtatataatcaaattaattatatattttttggttttacttgatttaatataagtaaatatttgattaactgactagatattttaattgatgatcaacttttaatttgttactatataaatataggcagccgattttgtgcccatatgtgcaaaacacggattggaatccgttgtacggcaggggggtcccaccgtacttttaa

SEQ ID NO: 110582 - DNA, 5031 bp, Cannabis sativa
  modified_base (56)..(65): a, c, t, g, unknown or other
gtctcagggtacattaaatgattgttagggtacgtttctactttttaaccctaatnnnnnnnnnntcaatctcagccgtcagatcaaatgacttcatcatctgacgactgtcgtacatcacggattacaatccgtgaaagtacactaacgggacaaaatcatatccctacatatataattctattgaaatttgagtggtgggggtgtatttatataaaatatataaagaaattaaaaatatctattttagtcattttattaaaggttaagtaagtaattataattttggagtgtagttagaattttgtggggtgtaaatataactacccaaagaaaaaaaagagaggatattttcgtaatattttgaacactctcgaactcgacccttgtttctctcccgctttctcttctgtaattacgctctctccctagggctcagtttcacctccatttcctacgtcgaaacccctcttctctctaaccctcatttttttttccctaatatcgaaacctcttttaagtttactattttacccttctcactctttcattatctcctaagccctagggtttccggttctgcatctcatcgtccatggcggcggtaccagcagcagtttcccagcctcgatcctcttccaagaccgagtcctatgtcgacaacaagcgcaaggaggacatccgccaagccaacatcgttgccgcgcgcaccgtcgccaatgccgtccggaccagtctcggacccaagggcatggataagatgatctccactgccaatggcgaggttattatcactaacgacggtgccaccattctcaacaagatggaggtcctccagcccgccgctaagatgcttgttgagctttcgaagtcccaggactccgccgctggagacggcaccacgactgtcgtcgtcatagctggtgcacttctgaagcagtgcctcactcttttgtctaacggtattcaccctactgtcatctcggactctcttcataaggccgctattaaagccgttgatgttcttactgccatggctgtccccgtcgagctctcagatcgcgattcgctggtcaagtctgctagcacttcgctgaacagcaaagttgttagccagtactccactttgctcgcgcccctcgctgtggattctgttctcacggttgtggatccatcgacgcctgagttagtcgatttgagagacattaaaattgtcaagaagcttggcggaacagttgacgatactgagctcgtcaagggtttagtgttcgataagaaagtgagccacgcagctggaggacctactcgaatggagaacgcaaagatagctgtgatccagttccagatttctccccccaaaaccgatatcgaacagagtattgttgtttcggattacacccagatggatcgaattttaaaggaagagagaaattacattctgggtatgattaagaagatcaaggccactggctgcaatgttcttttgattcaaaagagtattctgagggatgctgttactgaattgtcactgcattatctggcgaaagccaagattttggtagttaaggatgtagagcgtgacgagattgagttcattaccaagaccttgaactgtttgcccattgccaacatcgagcattttcgctcggagaagctcggttatgctgatcttgtcgaggagctttctctgggagatgggaagattgtgaagatcacaggtattaaggatatggggaggacaacgactgttcttgttcgcgggtcaaaccagctggtgcttgatgaagcagagcggagtttgcacgatgctctttgtgtgataaggtgtttggtgagcaagaggttcttgattgctggaggtggtgcacccgagattgagctgtctcgtcagttgggtgcatgggctaaggttctgtatggcatggaagggtactgtgtccggtcctttgctgaggcacttgaggttattccttacacactggctgagaatgcaggattaaacccaattgcaattgtgaccgagttgaggaataggcacgcacagggggaaatcaatgctgggatcaatgtgaggaagggacaaatcacgaatatcttggaagagaatgtggtgcaaccactacttgtgagcacaagcgcaataaccctggctacagagtgtgtgcggatgattttgaagattgatgacattgtcacagttagatagagttgggattaagcattgtcttttgatgaaaaacggcggtattatatcttcttgtgtgccttttgttttaggtagtctgcttttatgtgcggttggcttgttgttaggacgaattttgttacagtatgtttgcttaaactctttttgataatcgttgtttctaacagattttgccattgttttccagtcgtactagagttcttttgggtttacttattttattttatatttggaagttttgttatgaatttcgcaacaaatgtaggtcatcatagatctgggacattttggtagccactagttgtatactctgtggctagtggtctaccgaaagatgttttgtcttggccgttaattgagtaaggtgccttttagcattgtctccaacaaattctgtagttcatttgtcttctaaatttgctttacttaatatttagtattttgttttcttgtgtggagaacttgttatatgtgggttaaaatttacagcttaagcttttaacttagtcaacttacattagtgctatatgtcttactacttcaaaacataagttctttaagtttaatcttttaatgtggaaaaaggatatggtactgtttatttactcgattggcaggtggttatgtaccctatctacccctaatgatgttgactagaaattgaaactttagactttcctgttaatccttattgatggtcatagagactggagatagggtacctgttatgttttattgggtctgttgaggcttggcattttgaatgaattctcaactttcaacccttcaccagtgtagaatatgttatctcacctggttctgttctctttaggaaagaaaccatttggaatattttttaaacttgtatatgattgttttataaactgctaaatgaatggattctatataaaggaattaggtgaaaattattgagaggtataacataggagtattttttattttctttcttttttcctttttttttttaaaaaaaaaaaatacaacatagtaggagtttatccttttttttttataacttttggttgaagttgcattagtgcgaataggttaaattattttgtcattatttaaaccaccaacaccaaggtaatgtaatggagagcattgagaaattgacgatggactttctttgggagggaggtgacttagatggaggagaacacgtggaacatggcgagggtttgagataggtattttttttactattatttattttaaatgaatgaatcacttctcgttgagtggttatgaagattcgccaaggaattaaattgttatggcatgtagggttaatatagcaaatgtggattcaatgagttaagtgggttacttagaggggtgaaagagcctgctgccttctctttctctctgtatggtgaacttttgcagatgctgaaatttaaagttagagatggtaagaagaagaaacggttttgagaaaatacatagttagcaaaattttctgttaagaagaatgagtatgtagcagattttgtgaaaacataagaatgtagtagggagtggaacttccattttgtgagaaatctcattgatataggagtaccagaactcattgaaataatgtaaagattggagggggttaatatctataggtaagtggttgtggaaggatagaagagtttggttgggcataataaaatagtagcacagtttaattctcatctgtcggcatcttttatgtaatatgtagaccagcatattgagattatatcaatgtcctaccattttgtttattaagagtactgtttttaactttttaataaaaaaaatatttttacattaaataaggatccatctccctattttttattttaaattatacattaaatttaataaatattatctcaccgtcatttatttcgtatcaaaaacattttttttttataatcatatatcttttgtcctttgtagtgaattttgcttagtatataaaactgaaatttattttcaagccttgcttttttttttttttggaaaatttccaagttaattactttaattttgaacactttttgctacggtattgctgttctctcttattctaagaaaatagtatttttattctcctacaagtatgtttatgaagatgttatacaacgaatgttttatttatatgtattattacaaagttttctttttttttgaagaagttactataatgtatttattcatgtactttaataaaattactgtatttctacaagtttatctaaaattactgtatttacattggtacctaattcctgtgtgattttataatgtaaaagagtttgaagagttttggtgttcggatttttcgtagtacccacctctacctgtgtggtcatgtaaccgtttttccctttccggtaaaatgtttccataatttttttctttgtattatacactttctggttcatgttttgatagctactttttggactagagatggtaccatttttatttttgcttccccctaggcacgaatgtgggtgtttgactgtgttcaggattgatataaatttgcctgaaacctgtgggtgccttttgtcacagataagatgtttgcatggattgcttgtgcatttattttggttttaaagaccagaaaatgacaccgaattatgcttcattactttattccgtattcgtggaatattatggttgcttctcgacttaagaaaggattgttcttggacttaaggttgttcactaagtattcgatctaatccaatccgtacgatccaatccaatccaatttacaaaatgcggatatccgtacttgcgcggattggattggattg

SEQ ID NO: 110583 - DNA, 1312 bp, Cannabis sativa
aatactttttaatttgggtctcaatcaacaactaatatattcttcacaacatcttcatacttaataaatcaaaaacagatttacccatatatcctttatatatactacaagttacatgaaaatttgaccaatttctaaaattaagattggagagagaacttgttcattagctggttaagagctttattatatttttctcaatctaaaaaaaaaattatacatagttaaaatggccaaatattactactttacttagtgtaatattaatttggtgcatatgtcattattgtaaacatattttgatagtaacatttctttctttttttaagaatatttttttttaatttatcactatttttttgaatacatatatatatagctaactatgcatgtgaccttgtcaaaacttaaaaatggaaagtcttaattaagatgtatataactatatatatatatatttatatatgtgtcaactgtcgatttcgttttgattttgagcccttcatacatgcaatcatcttagttgtctaataacaatcaaattaaattaaataaaatcaaattgttcttcaaaatatgatatgaaattagatctcactctcaccacttatctgtaatctcaaaacaacaatatcaaaccaaacctcttttgttcttttgactttatagttttgttttttttgtttttgataaattcatttaagaatctgttgtctaatatttaactggatacctcagacctcttttaatgtctctgaccccaagataaaagaagagaagaacttttctcaatcaaattaataactcttttccttatatatattttttattaaagatttcattattcattacctttttccttttatatatatataacatttcagccataaccattggtacatacccagaaagattaaaactttcttcaagttaatccatattatatatgtatgttcattgatgttagttaagtaccatatttctgatctgggaattcattgttttgtattgaaattcaaaaaagatgaagtttgggaaagagtttgcatctcaaatggttccagaatggcaggaagcatatatggactacaagtttctgaaagaagtcctcaaagagattttgaggtttagacaaagaacctcaacagtggaaactgcaacaactcgtagaggtagtttgagtagaaaggtttctttatacagagcatttagtggtcttacaaacaggtacaggagcaatacattgaaattagatgaagatcaggtgattttagtgaacccagttcatcaacaacatcaacaacaacaacaa

SEQ ID NO: 110584 - DNA, 10259 bp, Cannabis sativa
  modified_base (813)..(813): a, c, t, g, unknown or other
  modified_base (942)..(968): a, c, t, g, unknown or other
aaaatcttaaatgtgaaaaaatgtcatagaagagtggcaaacctaaaaatgccatatttttctaactttgttatgaaatcccatatttcatgtaattttcacttttagttttctacacttagcttttttttttttttggcagtacaccattaactttatttttgtttgtaaatttgaagtgtcaattaaattccattattaaatactatacggattgcaattatgcatgtacatcttgtgtgacatgttttcattagttttgagatattttagttttctcagttgacatttaacaatagaattcaacttatgcctcacattttcaaacaaaagtaaagttaagatggtattatctaaaaaaaataataataaaatgtataaaaattaaaatatataataagttttcgccaccaattacccttattattaacatatatgtctaagtattctatataaagaagtgaagaaaaagtaactcaacactactatatatctttaaactttcaacatatatgtcttaagtatttctacaattttactattatacataaaattttcttacaaaatactgtctttttataaaacaaacgtaaaacaacaaaacagaataattaaaataacattgggacaactaaaaaataaccgtgtagaacaacagtgaaaacttaagacaatacacagtataaaatttaaacattatttttcaaaaaaatttcaccccacagtaaaaaaaattaaaaattttaatatgtagtgtaaaaacttataaaaaaaatgtaatgtactcttatagttaataataataataataanaacaataataataataataatggtcattcaaattattaggagaccattcacgtgttgtgttaattaaatttaatgatatagtatttaattctccaagaaaaatctaataatttattattattattattnnnnnnnnnnnnnnnnnnnnnnnnnnnattattattattattgttattaaagtttcagtgttctatacttctatataactgtgtgtacattattagtcagtcaacactattatctttaaattttctacatataatattgagctgtgtgtcattatccctaatggaaatatcaaaagttactaagaacaaggaagaaggagagagagaagagactatagaggaaattctggccaagcttgaaaaggttaagtatccagggtctggtaattattactatttttatcaaggattttggatttcaggttttatcttgaaaggtaaactatccctccaaactcaatttgtggcacgagatgatgatattttgttaacatcttgtccaaaatcaggtagtctttggttgaaatctctaatcttttctattgtgaaacgtaataatgataataatgatctcctttcgttcagtactagtccacacaatcttgttcgtgcacttgaattatcattacctgatgaaaccaagccaagaattatgagtgcacatagtccttacccttcattaccaccctccattatgtcttctaattgtaagattatatacatttgtagaaatccattggatttatttgtttctcattggcactttattcataaactttttggggataatactgaactaagtcatttggaggagtgctttgatatgttttgtaagggaatccacacttttggaccattttggggccatattctaggtttttggaaagcaagtttagagatgcctcacaaaatattatttctgaaatacgaggaacttaaaaaagacaatgtatttttcattagaaagatagcagattttttgagatttccattttcaactgaggaagaaaatcgaggtattccaaaacaaatagaacaattgtgtagcgttgaaaatatgaaaaaattggatgtgactaagaatggtaaacatcattctggattccctaatagtgcattcataaggaaaggcgaagtaggagattgggtgaactatttaacacccgaaatggctgagcgtgggaaaaagcttatcaaagaaaagtttgcacaatcaggtttatcgtttgatttctaaatgttttgttttcattgtctaaggaaataatatttatgacttgtttaagtcatttccttttgtccaataagttacttgttgttggtgtatatcttcttatgaaaatatgtcagttgttttcattgtctcaagattgttataatctttgtttgtttccattgtcttaagattgttgtaatttcgtttgctttttcttaagattgtcataatcatcgtttgtttcccttgtcttaataagattgttataatctctatttgtgaagtgagctagctgatgttatgtgtttctattcggacccaacaatttaaaatttaagcgttacaatgtacctttaagagcttgtattaacaaaacttagtagaaattttacattgggcacaatattttagtaaatgaatcacccttaagaactcgaccaatttacggcaatcaaaaataacaatgaaataactaaatcaatttgatcacaaatgacaatcaatattcaaagaactaaaacataatgaatttaactataagaattgataaaatgagaccttttattgatgttgaaaatcagtacatgagagacttgaaacaatagacaattgatgagcagaaattacaatgaagctcacacttgggaaaccaagatcagatacacttggaccccatttacaaccctccttatttcactctctctaattaagttctctgatctcacaacataactagaaatgaatggtacaatgtctatttatagtagggattagttaaagggtgctaattaacaaacccgagtactttctgttaaaatagttagtgacacatcaccataggtaaatataaaatagttgaactaaacaccacaaatccaccttagtttagtcattttaggtttagaaaagatatgatgtgtagcaaaaataaattgagtgagaggcatcaacacttgcagatgttgagtagattcaaacaatgtttgagcttggtcaagttggcactctttctcaacatgttagttgggttttcatatgtgttgattttcttggcttgaacttctcctttagctacaatttatctagtaaagtggatctttatgtctatatgtttagacttttcatgtagcataggattcttaatcaaatggagtgcactttgattatcacagtatatggtaatgttgtttgagtttaaaccaagttctgttgtcagaccttttagccaaagagcttctttaaatgtttcaacagctgccatgtattcttcaattgtggaaagagcaactactttttgtaggtttaattttcagctgactgctccaccaaaaattgtaaacactagaccagttagtgatcttatggtatctatgtttacagcataatcactgtctacatagcctacaacttcttcaactgcttttgattttttattgttgtggattagtctcaggtttagaatacctttaagatatctgagtatccatttgacagttgtccagtgagcatttcctagattagccatgaatccgcttactacacttagagcatgagccaggtctggtctagtgcagaccatggcatacatcaaactccccataattctagtgtaacagacttgctccatgagcttcttttctgcattactgtggggattctgagattcaaaaagcttgaaatgaagagctaggggtgtggatacaacttttgagatatccatgccaaacttttcaagtactttctttaagtagctagcttgtgacattttgatcactccttttgggttttgatcaatttctatccccaagatcttcttcgcattgctaagatctttcatctcgaattcctcacttagcgtatccttaatcttcttgatctcactccttttctttccaataatatgtcatcaacatatagaaatacaaatgttgattcatgtacacacataaatcatactgacttttagtgaacccaatactagtaataaagttatcaaatctaatatttcattgcctgggtgcctgcttcaatccatacagaaaccttttgagcaagcatacttggtttggattgccattttcatatccttgaggttatttcatgtagatttcttcatccaattctccatgaagaaatgttgtttttacatcaatttggtctacctcaagattgtctttggctactttggttaacatgactctaatagaggtctctttgaaaacaggggaaaagatttcattgaagtcaaccctttccttttgagtaaatccttttgcaacaagcctgtccttgaatcttgctggttcaactcctacgatcccttcttttactttcataggtgataatgttgatctgattggagtcaaattggtaaagacctttgtcaagcttcccaacaagtaaagtcttcaatgtaacctgatccatgacaagacaataaaaatggtgaagctcaaagaaaataccattatcttgggcaaacttagacacactaagaagattttttgttatatttggaacatgcaataaattgttgagtacaagagtttaagaatgacaaggggaaataaagatagaatggccaatgttttgaataagtaaacatgtaccattacccatgtgaacatgctgatcaccattgtagttgttgatcaccattgtaagtgctgctagaggcaagattcagttcagtctgagtaagatgctttgtagcacttgaatcagggtaccaattaagatcattaaccacttctggggtggcatagtaggcctgcatcttaacattggcactggcatttcttggaagattctaaaaaaattcaggccctgaaaatgacctgtcaaaccagtagaaatattggtgcacaatatggccaagcttgtgacacatctggcatggtggtttttggccctaaattatagaaattcatcgacctcatgaggtacctcctctgaaatttccaaattggcctcttgttggtgaaacacctctagaaactagagcaaagtaacatggttgaggtgactactgcataggaaagtttgttgcatttcctcttgacatactgccagagccataggaagatggtgaaaaaaagggaggctattgacttcgacttgtttgattcttggtgtgagcaagattggcttcaacttttgcaatgtcaatttcctttgtaactttgtccaacttcacttcttgtggcattaagaggacctcaatctcagcaacattgtacgcatctattctggtattgacaaaggtaatgaatacattgtattcagctggtaatccatttgagatgtagttgggtgacctatagatgcaagagtactgatgatacttttaatcttgagaagaaaatcactcaacaaagattacatcatagtattgcaaagtagagttttgtattttccgatcttggctcgattgagagaagtgtagtattccgaaagattgatccagatctgagctacagattcaaatccaattattcttgtgagaaccttcttaggcattgatgaaagaagccttgacacaatgatgttatcctgttgctcccaatcctcaatttctagagtcactttattggcacaccgatcttcttctgttagaaattgaggtggagtgagaatgggatcgaaaaatttctacagtcaacttcccttgatggctgcaagtacttgatgcttccatgtcaagtagttgaactcgtcaaatcaaacagagagcgagtgagaaatagaaacaagatttgttttgggaagattagtagtattgcgaggtaagccagtttgttgagaaacatggaggaatcgacgaacctctattgttgatcgctaaagaatgctcctttaaagtgacgatacactctgataccatgttagtatttgtaaactaaagaacaatttgaaagaaatgctctatttttcattgaattaagaaaagggaacacaaggctttatatatagtcaattgagctaaaaaaaactttgcaacaactaaccaaaagttagttaataagaaaggaaaaactaatgatcaataacaacttgtaacagactaacaatgctaaactggagctaaactaggtatccttaacacattatacataatttatgtcaaaatattggaactatcattgtcatatgactaagtatataggtgcataggtgcattgtacatatgagaattgtggtataattcctccaaatgaaacatctccaagagtttcttatcattcctgaaaaattgtggactcgcggaagctggtcttggaaggctttttctttcctctgggaagggtcttcaggaaagctagtcctcctccagaaaggagttttgggtggctagtaattcctcttgaaatgtagttcaggaaagctagtcctccttcagcgagtgccttgatttgtgactctgagagccttcatactcgctcccagatgcactcctacatatgctaacgtggagatcttactcaaggagagttggttaagttaatttttgcctaactaacttaacaacctcgattcatgcagctaccgacattaggatcttgatcataagcctataaataccaccaacacttatcattttgagagatcgatcaggttgagattaagaaatagtgaaagaagagattgagaggtagttgagagaggtgcagagaaaagaaagagattggattgggttttgcaagaagaatcttttgtagatgaagatgattcttgggtaagagtgtgagagttgaaacactttgagaaaactcattagagatgatctcgactgtattgtacttatttttgctcaatcaataaagaggatttggtggtgttttagaacgggagtagagaaatagattacattgatctattggacttgaaccagtatatatcttggtgttgatttctttattttttgccttaattatttttggttttcctttactctgtttatccttatttttttcgattgttgttcgttatttgttaatcttgttattattaattgtttaactatttaaagtttagttaatttaattatgtacctttagttgtatttctcccagaaaaacaaagtagattatcactgtcaaaatattggaattgatacatagtgaaaccattgacaagatatataaaatttatactaccaacacatctcttcataagaaaaaaaaccatatgtttattacttaatattacatcatatataagataatggaaacaaaactaaggagtataagatatattgctagctagctaaaaatcaaacattaaatcatattgtccaaacttttcttgaatgagtgtctttccaggctcagccatttgaggtactatcaaatagttcatccaatctccaaccttaccttttctaaaaattgaactatgacacaattcatacatggcagcatattgtttcactgtcttattcacatccaaaattttaaattatcaaagctacataattgttgtatttcatgtggaactccttgattgtcttcctcactagaaaatgagaatcccaaaaactctgcaatctttttaataaaaaaacacaatgtcttttttaaggtcttcaaaataatatttgattgggcatttctaagctttgttttatcctaaaatatggtcccaaaatggtccaaacacatgaattccactacagaacatatcaaaagtactcttctaaatgacttagctcaacatatattattatctcccaaaattttgtgataaaagtgccaataagagataaatacatccaatggatttatatatatatataaatatatatatatataattttacaactcgagttcttgatagagtgtggaaaggataagaaatatgtgtactcataattattggctttatgttttggattagagataatgaagactcaaactcaagcaaggggacaagatcatgtggattggaagtaaacaacacaataatgataatttataattagccacaattttttttatctttagtcacaaattttgtaaacaaaggatggttgttgttattttttgtgaattgtttggaataatggaagagtaatggtaagtttgacaatagcaaaaataagagattttaactaagtagtacctgattttgggcaagaggctaacaaaatatcatcatctcttgctacaaattgagtttgaaatgatatcatacctttcaagacgaatatcatgaacccaaaatccttggtaacaataataagggttttgatcacttatttcaccaaattgacaaatagtgttaagagtgctaggcactatgagtgtactttaatatttttcataataaaatgaacacatatccatgtataaattctaaattacttaatattgagacaatagaaaagcatgtataatatttatgagaattgctaaacgataatactggtgcttagcaccttcctcgatgtcatatagttattggtataattaaatattgtgttacatataatttaaaaaaatagcttttaaagaatatcgctagtcaatcgtggagcgcaacttatagaaggtattggacaccactagtactcaataacaatgttcaatatttattcataattaccttaaacaaacatttgaccaataattaagacaataaaacaacaaaacaaagaaagctagatgataggtataatacgtgattttcgagacaggataaatctctaaatacactttttgagagattgtgaatcaaagttctactttctcaatacatatccattaattaaagactattcaattacatatttataatttactactaaaccctagacatcaaaggttaaattatattgtccaaatttgtgttggatgagtttcttcccacgctctgccatttgaggtgtcaaacaatttgcccaatctccaatctcaccttttctaaagaatgaactattagatgctccactaggacgtttcccaattttattaacctccaaatttctcaaatgctcaaaactacaccacttttcaatttcctgtggaactctttgattttcttcttccactgaaaaaggaaatcccaaaaaatctgcaatctttctaatgaagaatatattatcttttttaagatcttcatatttcaaaaataatattttgtgaggtatttctaaacttgctttccaatatcccaaaatatggtcccaaaatggtccaaatacatgaattcctttacagaacatatcgaaatactcttctaaatgacttggttcatgaccaagatcgtcaccaaataatactttatgattaaagtaccaatcagaaacaaataaatccaatggatttctacaaatgtatacaattttagaattagagtagttgatgatagagattggtaatgagggatatggaatgtgggtagccatgagtcttggcttcatgttttcaataattgacatgaatttctcattcatatcgaaaggtataagatcatgtggattggaactagtaaataaatgactatcatttttaatactattacgtttgacaatagcaaaaacaagagattttaaccaagtggtacctgattttggacatgaagctaatacaatatcatcttctcttgctacaaattgagtttggaaagattttatacctttcaagtgaaattcattgacccaaaacccttgataacaatagtaataaatattatcacgtactggatgtttaaccttttcaagctttgccacaatatcatcaactgtctcttctctttccattataaaaatattaggcacacaataatagtatctcaaatattatatctccaccccacgaaaattgtaaaggtgctagaatactagagactagagactaatatatagccactaagcaccttcaattagtgttataagttcgtgccttctgtgttgacccgactcgtattaatttatttgtactttttagaaaacggaccatgtcatgatgtgtcatagaaaaatatgggtcatcctaatatttttaaggaataattacataagatattattttttgtaaaaaaaattacatttttacatttaaataattttttttatatttttacggttttacattgaaacaacacgaaaataacaaaaaaaaactacattaaactaacaataatatctaaataacatcaaaacaacaataacaaattaacaagagtacaatataaaaagactgtattttcagtaaataaaatca

SEQ ID NO: 110585 - DNA, 9904 bp, Cannabis sativa
ttaaacaacatacttgggagtagatctaagatcctggtaaaataaatatccaacatgactttggtggcctaattcatgaacctttggatgtagtcattcaaaggttcttctacttcctgcttcacctcgaccaggtcttccaggtattaaggtagttttctagaagatgagaatagagtatagaattcggctgtgaaagctttccaagagtcaaactttcatggagctaacttgaaatatcactgttaggcagtatcttccagagttgctaggaaaattttgcagtctacatctccccaacaccttgaaaattagtctggatcttaaagtattttttcatttgggatagagggtcttcttttcgagtgtaatttttctcggtggacatcttaaacttggttaggagtggaagtgtgtttatccgtgcaaagaatggtgaacctcttaacctgtctagctctagattagtgagctttgggtaggtcaggctctatataaggccctttagtttatccagttgggcttgcatagctggatcgacttgacctccttgttgaccagcctgtgtcaccagttgacccactagagcttcaatgggtacgtagttatctatgatttgtgggatgtagttctccacattaattggctgattattgggtggagggacaaaatgtccgtccctatttcctctcttacgattcaaatcatctcgaagattagttttgggccccatacattagaaaactgagtcgcctgcacctcttttgtagggttggcttgtagatcgagctggcctaggtagattgttaacgttcggaggattttcccagtttttttcatgagtacgatggttataacgatgataatagttgtgcagcgcactatcatccttgttatcattcttgcttgtgtatgacagtccactatgagaccttgttttgtctttctgagattgttggctggtatgttgagactgactataaacttggactcacccatcttggttatatatacctacctgccatcgagatcttccagctggctgaggaggttcatcttctttcctcccttcaggctagggacagaagttgggttgatcattccttctaagatagtgaccaagtaagacttggtcgtctattgagttgctaacaatttaattctagggcatggagttagaaggtttgtcatgttaaggcgattgaacataaattagttgggcattcctccgggtcgtactcttgtccttcagtaaggatgtaagatgctttttctgattaggatctcttctaagtggtgagttctctagtacctacccctaatatattgatggaatcacctgatcaggtcggtagcctttcttgatcgacgattgatttcctcttgctgggcccacatgaattcagattgcctatccatttatctctggaattcatgcctctgctcttcgaacacgttgttcatgacaacacgcgtttcttcctaattgtggtcgagaacattggtgtgtccttggacctgtcctactacttctctcacagtgtctagttcagaattgtcccccagatcaactcggggttctccttcagagggatgactagtgtcatgcccagttttcccaacatatgcctgactactattcccagtatcttggaccccaagcattatcccagtggcaggtgttgcgatcccagtagccctgggtcaacattggcaggaatagtggaaggattgccctgtggtggtagccgcgtgttggggttgtcaacccctggatcagccagtgtttagatgccagggtccttcaacatataggatctcctggttcagttgacgaggatctccttgtcaaaaccattgtcgctgatttggaagtgcattaaaaatcaaatgagagcgaattggaattttaggctctcaatgaaagcaccaaaatattaacttcgcttttggccaacgacatggagtcaattaaagcaaaaagaatgataataaattgatggtaaaaaatagtaaaataaaacaacgcacgagacgtataaaggttcattcccgtataatggtaatagcatactccccttttagttgtattacttagagaaaattactaaaaccacaaggtccgaccaagtgagacgtttcttaatagctcttgtgagtgtacaaatatttttatagagtaatcgctagttaagagcgtcaaagagtagtagaggagaggtataaaataggatcaataaatcaaatttcttattttggcggagtcatttaaggatcgactccatgctcacaatcccacaaatcttgatctgatgagttaatctcgaatgaatagggattttggtttctagtttcgtggaagcagttaaggaaagaatatggagaagatctgttcccagtgtatttatctgtacagacagtacattcagcatgatgtgttcggttgcacgacatatcacgagatactggctccattccaagaatagttgtaggatagctttacttggataaattaaactttaggaaagatctggtcggcctgtttgggggctatactctgactaggttttaacatatctacaacttgttaccttgtgtacatcatcttataacaaatttgggataataatagtctttttctatagattatgtttgcctttatattgttaagttgttatgaaagacagaagagaggtgtgctataatcttactcaaagtattgttttccatcattctttctttttgaattttatattttctccgaacacatctaacaactaagcttatactttagcctaaatatttttggaatggtaattaacctttttttcagttagaagaaattaaaattatcttactatatcagactataattatgagaagagagaaaataaataaacaagaaaactcatattttatataggtcaaaatattcattttctttttaaaaaatatggcatcattaaaacgttcaacgtaactcagtggaaaaaacttcagtgggaaaaagagtgccaagaaatatcattgatcaattactgtcagtctaaatgaggtgaatcaagggcaccaccaagctaccaaacaaaatgaccatttagagtaagagtgagcttagctcaaactctttggtgggtaagtatatgaaggacatcttctaccctaatatttctttccttgaagcaaatgttaataagaagtcctcatttatttggcattctaatctttggggtaagagttgttccttgatggaatttgttgtcttattagtgaggacacttctttatttgtgtataatgatcgttggctttcttctgtgactggtaataaaatttcgtctgctcctaccttacctttagatgtcataatggatttcttaatgaatgataatggagagtggaacaaagagttgattggctcatctttttcttagatgaagttgatttaatttttttaattccaagatataatatgccttcttgtgataacttggtgtggcatcataagaagcctggtttgtacagtatcagggagttgttagttcgtctattattgtttgttatttctgttattgcagagctgtcatttactggttttccagttattctgtttggcctttctttctctcaagtgatatatatcactttgtactctgtaataattgaacgataatagaatgactctctttgattctctttcttctacattctctctattttttctttcctttgttcatcttcatctttgatctttgtcatcatgaatcgaaggaacaataaccataacatggtatcagagctttttctaccattgatggcgaatatggaaactattgcagctctaaaccgagccaaccctttgaactttggaaattccacaaatgcacatcccagtttgtagagaagtcaaaatcgcgatgctgatgagttctcccctttcactttactcataatctttctgtaaaattaaatgatcacaattttcttctttgaaaacagcaggttcttgctgcgattcgtggaaatcatttgttgaaattcattcaagatggagctcctccacctcaatcccttagtgatgtcgaccgtgcttcttcaacctacaaccctgagtatcttgaccgggatgtgcaagatcagttgctagtctcatggttgttatcatccatgactgagagccttctcactcaaatggttgggtgccacacaactcgtcaaatctgggccaattgggagaaacacttaacgctaaaagtttcatccaaaatccttgaattcagaactaagcttcagaacttgaagaaaggcacactgtcgcttaatgattatctgttgaaagtaaaacatcatgtcgatctccttgcctctgttggggaagtccttaatgatcgtgatcacattgcagcagtattcaaaggacttcccagcaactatgatacctttgtcatatcaacaaacactcgaattgaagggtactttgttggagaaattgaggccttattgcttgcatctgaatcaagaattgaatagacggatcaagaacctgaactcatagccaatcttgccacttctgagactgaacaccggaagtgaatcttgcttaccataattggtttaacaaaatcaattacccttcacgaccccctctgcaatttggaacattttctcctcagttttctacagtaagggggcctccatccaatcgtggtgctcaattttaccaccccagtggaagtggatatggcataccacagtactctttacctcacttcattcaggttaatcgaggaggttttaacagagaaggtagatcaagcaattctttcagcagatcacaatgtcaattatgcctcaagattgggcatactgttgtggattgcttttacaggttcgataaaagtttcactggaatccaatcgaaccctcctgctcatctcctcaggcaaatttggctcaaacttcaggacaaaatgataccaattggtatcagatttaggggcaacaaatcattgtacacacgatgtccacaatctagcttctaattcaccatatgaaggatctgaccagctggtcgtaggtgatggcacaggtttgtctatcaagcatattggtcattccactattttacctactactcataatgcttctcctcttattttgaataatgtacttcatttcccagagataaccaaaaacctaattagtgtttctaggtttgctagagataacagtgtattttttgaatttcaccctgatgtttgctttgttaaggatcaggtttttctcaaggttttgatgactagaacataccaaaatggcctatattcctttaactcctctcaactacacttgatgccttctcattttcctactgatgcctatagcaacttcccacaaccacaagtttaatctccacatactcttactgctttcgtttgtcaacttacacattgtaccagttctattacttcagataataatgcttgtatttctcattttgatgtttggcacaatcgacttggccacccctttgggaaagtggtcaagtctatgcttcagtcatgtaatataaattgtccaaataaagtcatcatttctgtttgtgaagcatgttgtttgtgaaaaatacacaagtttccctttcctaagacttctagcactacatatattgtcccactgtaattggttgtctctaatctttggggtccttctcacaccccttctcttaatggtcataagtattatatctattttgttgatgtatattctagatttacttggatatacatgcttaaaaccaaagatgaagcattaaaaacattttagcattttaaagctgaagctgagttacaacttggcaacaaaataaaagtcctacaaaccgattggggggtgagtatgagtcattcacaaacacattaaaaaaggctagtatcattcatagacacccatgtcccactactcatgaggaaaatggtctagctgagcgcaaacatagacatatagttgaaaatggattcactcttcttgcccaagcatcaatgcccttaaaattttgggatgagggttttagaacagctgtctatatccacaatagacttcccacacctgttctaaataacaaatcacccattgaaactttatttcacatcccacctgattacactagcctaaaaacctttggttgttcttgctatcccaatataagaccctacaataaacacaaaatgcaatttagatctactcaatgcacttttattggatatagcattcaccacaaaggttataagtgtcttgatccctctggccgtgtgtacatctcaagagatgttatctttaatgaatcttaatttctatatgcttcacatcagcaatcacctatcacactagaaatagtagcctcattttacacatctactaatattccaacaattcaaacctcctcatctggtttagcaccacatattgcatcaattttgcctcatacacatgttgtctctagcttttctaaccctgtgcaggcaccacaaataatcccagcaacaacctgtgaagcatctgctatccccacaacagcacctgctactgcatcttaggtttctcaaatgcatatacctggagcatcgaacatagacactgctcctatagcctcctcttcatctctaagacctgttgaaattacaactactcacagttctatagtagtcactaatgaaaacaatgcttctgtgccttatgagaacaatgtttctgttgctaatgctccagctcctaatgctacattacctgctgccacaaatactaatgtccaagctgttacaaactctcatagcatgcagacccgttccaagttaggaattagaaagccaaaagcatatttggctctaaaagaaccaacaagtgtgaagcaagccatgcaaagtgaacaatggaatggagccatgtccactaaaatgtgtgctctcaagaagaataagacttggactaatgtggttctgcctcctggaagagaggctattgggtgcaaatgggtttataggattaaagagaatcttgatggtaatgtgtccacactcaaagcaagggttgttgcaaaaggttttcatcaacaacctgggtttgacttcactgaaactttcagcctagtggtcaaaccggttacaattcgagttgttctatctttggctctctcaaatggttgggatatcaaacaactagatgtcaataatgcgtttctcaatggtgatttataagagtaggtgtatatgacacaaccacctagttttgtcttgcccgatgctccccatttagtgtgcaaactcaacaaagccttgtatggcctcaaacaagcccctcgggcctggtttgagaaattgaacacctcactgatcttggattttcctcatccaaattagataggtctttgttcattcaacacacaacatcttccacaaccgtgatattggtatatgttgatgacattgtcatcacaggtagcaattcccaagtcattgccaacactatcagcttgctgaattccaagttctctcttaaggatcttggaaatctaagttattttcttggtattgaagttcaaaccacaccagctgggcttcactttttacaagcaaaatacatcaaagatctattgtccaaggcgaaaattattgaagcaaaacccttccccacacctatggttacaggtttaaaactttcagcttatggtcatgaaccatttgatgacccacagttatatagatctatttttggaccattgcaatacctattaatcactcgacttgagttggcctttagtataaacaaagtctgtcaatttatgaagaatcctcttcagtcacattggcaggctgtcaaaggaattctcaggtatctaagtggtacaattgatcacgaattgcatctacacggaacaaaatcgacagatcttattgcattttgtaatgctgattgggcatccgatcccgatgataggccttctacatcaggatttttcatttttcttggtggaaatttaatcacatggcagtgcaaaaagcaaaaaccatttcgaggtctagcacaaaagaagaataccgtagcttggccaatgttgtctccaaacttacatggctgcaatcattattcactgaacttcatctctctcaatcaaagacccatgttgtctagtgtgacaaccttaccttagcaccgttcttcttgctacaaatcccgtacctgctcttgatcagctttgtgagagaaaaagttctacgtcaccaagtcgaagttaaacatgtgccttctcctgatcagcttgctgatggcctcaccaaatcaatctctagccaaaatttccctcggtttcgaaccaaactcacaatttccaatccttccagttatgagtttgtagagaggtattagggagtcgttagttggtctgttattgtttgttatttttgttattgcatcgctctcatttactggtttttgagttattctgtttggcctttatttctctcaagtgatatatatatatcactttgtactctataataattgaacaataatagaatgactctctttgattttctttcttctacattctctttgtcttttctttccttcgttcatcttcatctttgattctctttttgatttttgtcatcatgaatcgaaggaacaataatcataacatacatgagtgttcgtaactgttactgaaatgggattcatttggtgggacgtggaaaatatttattttcaaagagtattatttttggctccatcacacaatttttctattatattttgaactccaaacaataaacaaagattgggtttagctatctcttttttaattgtctttttgctccaatagtttattagtatttggcattgagtcttatctatattttattttatctttaaaaaatatatatattaatgataagtgtgtcaataataattaagagaggatgaaaatgtactagagaaaagttcaacaccataatgaatgagtgaataataaattgttatttataaatgtttataaaaattcttgaaacagccaaaattgataatacatgaacaaaagcttaaaataaaagaaagctaataactaactatacatgctaataaaattgataaattattattaattttttgttttttatatagagtgatttgaatcataaaaaataaatgtttacatcgagagatattcagccaacaagttaattatataaagttagaatataaatcggtataaaacaaaatgatttatataaaataaagttatctttaaaatttgaacaaaactacttgagaccatcctaaaacaagcactcagtctaaatgaacaatttaagtaaacctacaaaagaaatacataaagtcaaaaatttattagcactctaaacaaacaaaatgctaagaaatcttataaaagaataatttctcaactatttccttttctcaccagaaataaatttaatgagaaaatttatttttaaaaaattcttaaataaaatagtatcaccatttatccaaactaaaatatttagtctaacttttgaatatctattctaaggcagaaaaaattaaacaataaaacacctacaaccacaaaatgtcaatgcaaagtgagaattagcacattaaaattaataatgaaaaagttaaaatatttaactataaaacaaggtagctcaaagttttagtcaattaaacttatttttgatgactctgtaacttccaattgaaaaattcacctctaccagaataaaaacagacaattattgaagaaaactcaaaaaataatataaattatattatgaaaaataacttgttataaaataatataaagtagatgaaaagaaagaagaagaagatgaagagagaaagag

SEQ ID NO: 110586 - DNA, 3640 bp, Cannabis sativa
atagttcaaggggaatttttaacggtaaaaaaagttcaaggggcatgatttagtacatgtcaaagttcggagggaaaaaaatcataattagccataaatatattggtattttttaagtaggagtattatttttgtccctaatattaatattttttattatttgctagagaaattatatctcaattgtttttatacgatgttgtatattgtatttataacagtagcattgctagatatctcacttgtttttcgaaaaatttagaataaattacagtgttatattaatattttttattctttgctagagaaattatatctcaattatttttatacgatgttgtatattgtatttataacagtagcattgctagatatctcacttgttttttaaaaaatttagaataatttacagtgttgaaaataaaattcaaaataatcagatacacgtaacacgtgtatgagaaaaaagtgaaatttaccaaattaacaatctgaaatattaaaatttataaaataaccttacttaatttactctatgcgaccattatggtcgcacagtgtaaacctatggtcgttttgcaaccataatgtcatttatgaccgcacagtgtaagttttggtcgtttctgcgtgcatacaaagttattttgctaataaaatttttcataaaaactaattttacaaaatgctctaaaaaatacatgcaattgaatgcttaaatcttatttttggcattttaaattatttaaaatttctcaagaacaagttgaatgtaccttctatacataatttgaactgttttttagaagaaaaccccccaaaaccctatcttaaagagcaacaaatctaaaaaacgaaggaaaatggagatatcatttaaaattcatggcagacatcaaccatgattaaattttgaatacaatctgaatatctaggccaccaaactagcgaacttagcaagattgtgggccacaacattaactatcctagaacaatgagcaagactcacattattaaagagagagaaattactatgaatgtcacaaagaactaaacctaatgacgattccaaagcaacattattgttaatcttgttaaccatattaagacaatcaatctcaaattgaatattttccaaaccaaacaattgacattgaactcctgcatgtcgaagagcaagtgcttcaacattaaaatgtccaatcatgtgtcaaatagctaaggcaaaaataactccacgagtattacgaataacccatacccatgccacaaaaacctcttgtcacatctaaagttgcatcaatattgaccttaaaaaagtctactaaaggggggacccatcgaggcacaataagaggagaggaagaagacacaagcagacttattgccctcatagaaataatttcttttgatttcaaaagaggcttttgataatcacacaaaaaatcacggacccaattgaccgccaactcaggagacatcaaagaattattatgcacctttttatttctcctataccaaattctccacataatgacaagagctaattccacttggagattggcaacaagtccataaaaatgtaaataaaactaataaaatcagcacaagtaaccgaagggtctcaaagattaaactcacaaagtttttggcacagtgaaagagaggaacaaccccacaaaacatgatgagtggtttcctcctaggcatcacacagaggacaaagaccatcaattaagataccattcttattcaaatttaacttggaaaggtgccaaattttcatccaccatctcgaaaaaccatgtgaagaagaaggtctatcacgctctaataatcgagtaacaaaccagtaaccactcttgacagaatagaagccaaaggaatcatgaatccaaatcaatttatcactagatggagcagaatgccaaggaatagaaagaatggcaaaagcttcatcaggagaaaaaagacccatgaatcagatttgcatcccaagaaccaaattagactgaaataaatcaaccgtgctaccagtcccaagtaaattcggtgacaatacagagaatccaacaaccaatggtatctagttgtcttcgtaaatagaaatatccctactatttccaactctcccaattgccctcacatcgaataatttctttccccacaaaatgttcttccaaacaaaaaagcatcttttagaagacttaatagtcttaaaatgtctatttatgtaaggaccgtcagacactatctatttctacattagtataatattgtccgctttgggcctaagccttcacagatttgtttttgggcaccttctcaaaaggcttcattctaatagagatagtgtccatccttatatacccaagatctttcccatttttagccattgtaggactttggttgtacacccaataatttctatgatataaaccttttagaaccaaagctgccaaagaggagggatcacaataaagtctccaaggttgtttatccaataaatcttggttgaacatatgtaaatcccgaaatcccattccaccatcatctttgtgccaacataatttctcccatttgcaccaatgcatcttcatcttcacatcatcaccccaccaaaatcttgcacacatagatgaacattcttaacaacacctttgggaagcttgaaaatggacatagtgtaagtatgaatagattgaatgatagattttataagaatctctcctacccaccatagagaaggatttggccttccaaccatttaatttttttttctaaatgcagtcccgaattaataagcatagttgatttagtggcccatgcaaaacaagaaaaacctgaataatttttatggcactaaactccaataaccccgagagatgttgtcataccagtcttgttcacttcagaatcattgggactaaaacagacagctgagttttcaaaattcacactctgacctgaggcagcaacatgccaagaaagtaggagtttgaatctatcacaggccaagactaaagaattcaagaaaaaaatactgttatcaacaaataacagatgaaaaataatcggccctagttgaccacacagtattccacacaatagattattatcacaatcccagttcactaaagtcgttaaaccttcagcgcataaaaggaataaggagacatgagatcactctgacgaagtcccctttcaggatgaatagtaccataaataccaccattcaaaagaatagaatattctacagaagaaaactccatcaccttaccaatccaaatatcatgaaagtctaacttcgacataatgttagtaaaaaaacaactctatatgatcataagttttaaacaaatcaagtttaatagtgcaataaccaacatcaccatttttttttgagtatatatgttaatacactcaaagccaataagagcattgtcagtaataaatctactaagtaagaaagtactttcaactgaaatcacatttgataaaactccccattctattagtcattgctttagtaataattttatatagcacattgcaaagactaatatgtcgataataaaaaaatctagtaggaaagtcaactttcagaatgttaattctatttttggcatatttaattgac

SEQ ID NO: 110587 - DNA, 3272 bp, Cannabis sativa
  modified_base (2790)..(2791): a, c, t, g, unknown or other
aacacctgtcagagccatgtttgaatttgtagataccaagatagtgttcacgatctcatattcaaattctcattctcatcgtgtcgccactctccatcaacattagatttatactgcattatacacaaaatagcaactaatgaaacttcatgcctaacaacagattagactaagatattctaacttttaccatatcaaatacaatatataaatgagaataataataatagatagaaacctgtgatagagattgcaatctagttgttataattatcatctgaggagctgaagcaaaagaagatattggataatttggcaagtcatgtgttgcaccctattacttgttaagagcaatgtaaatgacattagtaactacatagaatgtatataacatcatactcaacactccacatactaataatatatatacatttgatgctgacaagttacttgaatggttttccatagcaaataaatcgttaaaaatctggtaaaagcctaggatatatgtcaaagaaacttacttgggcagtatccagggaggtgtatcgaaaattcacagtgagaataatcttctgctatctgtatcacattttaattttaagagagacaacccaaataataacacactaaactaagactaagaggattatgaccaatccaattaattaacaggagaaaactactaatctgccaaacaattgatcgatgatgatgtccagcagccatgacatactctgcatagatgaagtcccaactgtaacagtgcaaattaagaaattagactatgtggttaattgaataaacattggtatcattagaaattgaatttattttcaatgctaatggttgtgttgcaaaactccattgcctaaatttttctgacatctcaaatcatcagttgactttatagtggcccaacagaggccaacacataactatcatctattgaaatttaaaataattcacacatctccacaaaacaaggctaaatctttaaacagctgaaaaaaaaaatcaaatatagaatccaagaaaaccatattaacatctttgaatttgcaagcaaaactacataaaacctatcaataaagttggaggaaacatgtcattcacaagagtgtgtaaagaagtgtatgacttcacatcaatcctatgactaatggctacctcaccctgccaagttcacagttcataaaccaattaggaatcattccattaacactaccattaccaactcttttatgcaacaatacaatacagtagaataataccttaggattgataacaaatactttcccttttggaatcccaatcttcctgtaactcagctcatcagtgtctctgttcccaaaacccgcataaaatggattgtaatcattagggaacaacttcttaatatcctaaacatagaaaaaaaaaatatattgtgtcagaagaagcctgtcgaaatgcgtttaaatttgaaattagttacaggctttttgttaactttaacttctagacatgcaatcttgaattcatgaggtgctcttcctattactgcaatgaagaaaaaaaatatgagaaataaactaatcaatccaagcacactcaacaatgaatatccactacaatggttgtcttaataattatcaacataacactactttataatcaatttctcagtaactcctaagttgtgaacaactccaattcttctcctaaatgtgattgaatactaaaagattgctagaaaaagaaaataatattaggtcaaagaatcaaaattcacaaactgaaataataccttgaaggtagaacatccaacgaatccatcatttccaatggtcctttatacgtgctttgagtacatacaaggtctgcacatgatgcctgggaaacatcgttgctcttaccgatcgtggtgaagacgacgaagaaggagaagaagaaagataagaacaacacgctgctttcgcgtacttttgcagcggtggcggcagcaacaacttatgactaataatattttagtcacaataaattatttgtgacaatcttcaaatttttaaattttataatttgtaaaaggtgataatgaaatattgtgactaatagtacatttagttacaattatacatctttatgaccaaaacttgtgactaattattatttagctactaattttgtgtgttgagactaatacatctcttttagtcacaactatttattatttattttttttttgtgctttttttagtcacagctattacttgtggctaaatgttttaagctaatgttttaggttttccttttttaagctaaatgtcctcctctctgttcctcactctcttcctctcatccttaatcgatctctcacgctcatcgtcgttattgtcgccgccgatctctcatgctcatcgtcaccgccgatctctcatgctcatcgccgtcgccaatctctcacgctcatcgggataaaaaatacatttagtcgcaaatttttttgttgtgactaaaagtccactttattcagacatgtatctcaaactactatattaggagagatatattgaagatatatgagaatgaaaataccaatacaatgaactcaatgaatgacaatcgtattagagttgtgattacaactaacatgtagatatcaaataatcaaaagagagggtatatggtagtgactacacattatattgatgattcttgaattttgtgtgattgaatgatcaggtaatataataaattacttagaattttttttattatgtcaatatttgatatcgatatatgctaatnntttttttgtgtacattcaggtttatatatgtgcatgcctctcatactgctaaacttctagcaaaagtattgctgtagtgtttgattgaattgtctattgagtgtaagttttctacccttaccttagataattgtactgtgaacattgccatgatagattaaatgaaagaaaaattgaaaaatgcttctttactaatgaaaggggaactacttcacatgaaatgctctgctcatatcttgaacttgatttttcagcaaggattaggggcaattcaaggtgccatagaaactatacgtgagagtgtaggtttttggattggcactccagaaaaagttgagaagtttgaagaggctaagaaaggattatcatattctagcaataaaaggttagtacttgattcaagactaggtgaaattatactaatttgattctaactagtgccattatttataaagatgtatttagtgttggaaattatttt

SEQ ID NO: 110588 - DNA, 26553 bp, Cannabis sativa
ccccccccacataaaaaaaaaaaactagacatttttggataatctgacatttattttcattgtatcctttgctccttacatttttcaatacaatatcatcaattgtgtttttcataatcaattaatgctcaaggttttagcatcttttgcatctcagtaattcctgacacgtatactaagcatttctgttaaattccttacattgattaaaaaagttctcaatttatcattgtagatgcagtataatcgtgcatctatttatgcaggaagaatacctttctcatatttggaagatattcatatgaggtttatgaaaaattatggcaaagtggccaattatgcacctgcttatgcaatgaatgatgagttttcgagggtcttgcatcagcagatggaattcttttccagcaatcccagtgctgataccctcaatcgtgtgagaggtgaagttggtgaggtaagtattggtagttgttggaatttgtttccatttcatcttgcatgcacccaagctttggcagcctttttaggaaagtattaataatgtgaaccatacatataagctgagtaaattgcaaacttttcatttaaactgttctctgatatcatttccaggttattctttgttattaattttgttgcacagcctaaaatttacagtgttagccattaccaaagtctcgttacatgtttgtaattttgataagatgatttattgatatattatattatatctcttctattgtgaccatataacttttgataacaatttgtaagggctattgttaattaattattatttcaaattgaatgtctacactcattatactatttcttgacgattactgcaactgggtttatagattctttagagtttttgacagttttgatgttattttacacttggttatttttatgctgtacttgcaatatttgtttattctcttcttatgagttctcaattcctctatatagattcgaactataatggttgagaacatagaaaaagtactggagagaggcgatcgcattgagcttcttgttgataaaacagctaccatgcaagacggtgcatttcacttcaggaaacagtctaagcgtcttcgacgagctctttggatgaaaaatgcaaagctattgtaagtattcttatatcatatgaattaatttgtttggctggaattgcccttggaatgggaagggtttgaaaattgaagagaacttattcccatacgatcacaattctattgttcaaaaggaattcttattccaatgcactcccggtggaaaagcactttccattcctaactagtaactacttaacagaattaattatataattaatcattagttgcttaattaatttaaatgttactttttacatagctaaaaaataataatattttcgaaatatattgaattactaatatcttctaattcaagtgaactttattcattagataaaatattacatttaaatatactaaatttcattattctaaaaatgtataaagcaattctaaactaagaacaaattttgtcaatataatagttccatacgaacaactaatcaaaaatagttatctgttgattccaaatattataccaaacaatgatctaataccacaaccaatatgatcccattgaactactattcttccttttttttttgtgcctaggaactactattctatctaccattctagtttgtattatactgatccaaacatcacctaatctcttatagaagctgcagaatatattgactaggaggatggaataaattgacttaatgaagccattaaactcctcatgttaaagattccccaaatcacgacatcttcacggacgttatgcatctgctgtcaaacagatgctggcgatcttaacgaaacagaattatattaattgcagtgctaattaaaccatgctttgaagtggttgcaagttgaataagaaaatatggaagctgttttgcctactcttgtaaaagatgataaaccattttctcttagcttatccccaagcttgcaaattattttaggcaaaagaaaaaatttgcaagtgtcatttagcttcttaaagattttgtatccaccaccattggagatggctttttggccctctttttacttttggtcaattgctttatgtttgctctaactgttatacatatttagaacttgtggcagcttcggatgttattcataatgtttgattttgtaatgtttatggattggtaaacattacaaaattatgtaaataattatctcaactacttagtagccattggttatattcatgaataacattgaatcttgtaatttggtgcagggcgctgttgacttgcatgattgttctgttgctatatataattattgctgctgcatgtggaggcatcactctaccttcttgcagatcttaagtgatgttaaaatttcagctgaggtatgcaacaatgactcctgagttgatgcatttcgaatctgttagtcggtattctgtcacttgttcatccaaaattttgtggtctgcatcgggtgggatcatataatctttactaaatgtctgtagatttctctagctatgcttgcaccccagtgaataacagttatttgttttatgatgcttaacatatgatctctatatattctttgaaagtgctcagattgtagtatattgtggagaaataaaaatggtttattacacttgtatttgtatctatatttgactaattgttttggctattactgtaatttttttgttgttgttgctgtgttttttttttttttttgaaattatcctattttttatttattcttttaaatccccaaaaaagagagaatttgtttcaaaataggtatgtactcacttcaaaaattaaaatatataccgttatatcggtataaaatgtgtacttttatgtttctaaataaaataaaatattagttccaagtgtaatttttcacatatatttgataatttctcgtgatctacttttaaaatcatgtttagggttcgcagtgtaagttttgactatttttttaaattaaactgcacatgtaatttttataattttttaaactgcaaccctacttcaagacttcaaaattgtaaaaatcgcaccacaaaaatacagtgcagtattaacggtttacactctctaaataaacaataatgtaataaaattttatcatcgtaatagaaataatattaatatatatcataaactagtgtaaacggctgggtacgatctcaactagcaacatattaaatcttgtatcattaatataataataacaatgtatagtaataattctaaggtaatattgaacgtgaaatgattataatttggcagagaagaacccatctagtttgtgttgtaataattaaaaaactaattaatttggttatgattcacatgtatgaacttatataaagttgtattttcataattatacggtgcggtttaaattcgttaatattaaatttaaaactgtaaatcgtaccgcactgtgtggtttggagaaaataccaatcacaattgcaccatgaagaatttcaaactgtattttttatacagttgtgtgcgggacaagtagttatgcagtatgagcggtttgatgaacactcgtgtaaaagagaatttatacatatgtataataaatttacaatatagagttcttctacggtatcaagaaaggtgcatcaatataccttttcataattgtgatatttaaataattataatttcaattttttttatgtaaaagtgtatattctaactatttaagatattttatcaagttttaagaatataaatattttacaatataaaaagttttacacatgtataaaataaaaaatcactcatacagtatttatttgaattttattttcaaagcatttcttaaaaatttatcgaatatcttaaataattacattatccactaacatataatatacatatataataagattaaaattatttgaatattaaaaatacaaaaagatgtatcgatacactcttttaaaaaatgcctcataaaatttccgtacaatatattaagttaaaaaatatagaagatttgattagcaccatcaataatgatataagaagaatattacatcataaatttactttattacatatatttttttttttcattcatcaagctctaagggcttaaaatacttaccatctattaggtaagtcccaatacttaaacggattgcccatacatccttaggctttcttgacacaattctgcaaattataacaaatcacatattaaattatgtaccttaatctagtgttatcttgcaacataaaaattgtagatttctttctcatatttccatatcaaaatagcaaaaactcagcgtgctttccaacattgttttctcttactttccaaacaatcatctttcaagtccaatttttgatacaaatatttttaaattcatgctttgaaaatgttgtatatcaatactagcatgtcatattgatgatgtgcctagttacttttaatttatttggtatgttaaaaagggaaagggatgatgggatattattgtggctctccactatgtacactaagagagctcctaccctactttaggattgtttgccaaaatcctacttatagtcgcccactaggtgaaaattatattatatactcactttattttatttgttttaatttttacttctacttttcatattttttttaaatatacccacttttatagatgatgtccccattagaccccttaacttaatgtaaattataggctaattaagatttttactccttgaactttgacatataccaaattatgcccactgaacttttttagccattaaaaattctccctgaactattgagattgatagatttaagaactttttttcaattttagtaaagaaagtctaacatggatacaagtttagggggcttgatttggtacatatcaaagttcgagggacatgttttggtagatatcaaagtctagggagcatgatttagtacatgaataatcacagaattagtaaaattaaatgaaattggataacagtccttaaatctaacaatctcaatagtttatgggggatttttaacggctaaaaatgttcagggacaatgatttggtatatgttaaagttcaggggaaaaaaatccgagtataataggcaatctattcaaaaaagttagtatattttaataaaaaataatatgaaaatatttttaattaatgaataaaaaaaaaaatatttttcaacttaccccgtctataaacactcaaatattcagatttaaaactctcaaagaaatcacctttactgtgattcgaatccttcacctctataatgcttaggccatttggttggtggtatgatcactctaataagttacaactaattaattggtaaccaaacttttcaaaaataccaatacgagtgttctttgacaagtaccaatcaaacttttaatgataactatgtaaagtaacttaattatctcttgcagataactttgattaataataatcataacaatagtaactaggattagaatatatgtaactaactaaccttccaacatcaccagggttgattaagccatggttgattctaaggcatggaactgaggcagctgttttaacggtcttaggagcctcaatgaccacaattggagatcctatccccaattttttcgaatgcccaattttcttgggatcactaatctcatcttttgaagaagaagaagaaaattcagattttattattatggtattatggttattactattaggtgaagaaatgtaaaagtagttgttgaatttgaataagttattaggggttgaagttgtttttgagaaaggagagagcttcgtaactactgaaaatgaagatgttgccatattcatatttttgtggctctctcaactctcctcacttaaacttatgttatcctttctatctatctttctcttcctccctctctatatataatttacaatcattttataatactagaacacttctcatataatgacaaattatcaaattttattggttttatttaattaaaaacattaaattatcaactattaatatattttttttcattaattttttaaatagaaatattttgttaatattgaaaattgtatccagggtattttttttttttaattgaggactagtagtgcttactgcctaacacctttcaaaggtggcgtcttgcgattagttagcgatatttactaaaaattattttattaaattatatgggatttgaaatttaattgcaccaatagcaatatgacaacaaaaaaggtattggacaccactgatactttttaacatttttttatactaatataaaatatgcccactttatatataatgaactgtgttcaaggtatttgaataaaggggttattttacaaatacacaaaaacaatagaaaaaaaataataaaaatacggttgcacggaattttaattatttttatgattttatttatagaaaatacgatcttttatgtatttttgttaatttgttgttattttacaaatacacaaaaacaacaaaaaaattacaaaaatacagttgcacagaattttaatcatgtttatgattttatttataaaaatacaatctttttatgtatttttatgttgtatttttgttaatttgttgttgctttgattttgtttgaatgttattttatgtaattttcttgttgtttttataaaacaccgtaaaaacgtaaaaaaaaaatctttgaacgtaaaaatataaaattttacaaaaaatagtgttttatataactatccctttaatacttcatgaactttgacatgtaccaaatcatgctcccttaacttttcaagtcgctaaaaatttcccccgaactattaaaattgttagatttaaggacttatgtcaaatttcatacaattttgctagcgtgacgattgttcatgtactaaattatgatcccgaactttaatatataccaaattatgcctcctaaattttcatccacgtaagattttctttaataaaattggacaaaaatctttaaatctaacaattttaatagttctggggaatttttaacggcttgaaaagttcagagatcataatttagtacatgtcaaaattcaatagacaaaaatccaaattagccaaatttaattagttcataaccttcaatttgatgtggcgttaatcgtttccaactaaagacgtagctaacagcgtgtcattggccaaaactatttttattttatcaattttttttaataaaatacattaaaaatttgaatcatttaaaaaataaaataaaatttttatatgaagaaacataaaatataaaatttactaaataaaaacacatttaaaatttggattcttgcttaaaggaagatcttatcataataagtgcaccaaactctctaacaccgctatatagattagtacaagctctcactaaataaataaatagcaacataattacttaaagttttaaatttataaatatcataaactcaattttttaagcaacataaataaatacttaatatcagtaaaattgtattttttttcaatttcatcaatagggactcaattttgaatttattaaaaaaaaaattgaaagtaactaatagtacatgtttttatccaaacccaataatctaaattttgagcctgtatatattgtttacgacaatattacatttgtcctatatcgatgaaactgaaagaaaattacaattttacaaacattaaatactcattctacattaaaaattatcgaatttatgttagttacaaactcaaaattttaagtatttataccgctatttgtccaatgagatccctcaccacattttacaagactactacgttaagagcttgtcgatgatgttgtcatccataattttgggctaatgtacaaaatcttttaaactataatatctttaacattctacagctttctttcttcctacaccagaaggtataagcatagaaatgtatgatttggtacacaccatgataacttgtattataatatctttaactataatgtatacagtacaatacactttgatacagcattgaagataaagatatacgaattagaaaacacacaactctacttccaacctgcaaaaaacacataatggtggaagtagtctaacagttctttgaatgaaaaatccaaattttggcattctcaacatggttagatacaatacaagccaagccaagagaggaacacaggtgatggtagaaaccatgcaaatttatacttttaattttaaatgtcctagctgaaaagagctctgataacctaactcccatgttaggtagttttgtttgagtaaactagtttcatgtccatgtatattccgatataaaattgagctcggtgcagccagtaattacaaaaacatttacaacctatacaaaaattggcatgtggggggtagccataaatcgttcgatttttctattggggaagaggaaaaataaactcttaacattcagctgcggctgcggctgtggaaacaagtacttattttacctcttggagtatgagaggtatggatcttgagtaatagtcaaaacatctggcctatctgcttggttatatgttagacagcggcgtatcatttcctgcaaacataattatgaagaacaataaatatgtaaccgaaaggaagaagaaacaatcgtcaaggcaatcctaagtagaacgaataagataataaaaccaaaagcttttaatcccaccaaaaattgtgcagaccagactacaaacatttggtacattttcgtttgctgttttctataatatttacaggcattgtgattttaaaagaaattaatgtcatttgtgaccagctccattataatatttatatataactcacctttgcctcatttgatacagaaggtctagaagggaaatcaactttccgagctttgataattgtgtcttcacgtagtatacgttcttgagactgatcatgcccaaaaggacgccttccaaaaagcatttggtaaaacaaaataccagctgaccatacatcaacctgcttgaagagagctaatcagaaagagttggtaaccaaaaaaaaaatggaagaaacttgtttattcgtcctaaatagcccatttctaattgaggaaacctccacaaccgtttttggacttgcatgtccaggtccagacagaagtttcatttgtttttcttttctttccttttttagttttaataaaataaaatcctaagggtgtttttttttttttgcgctctcctaataatgtacattgtcatcccaaagagaacccaattccagcaatttctgacctttgatgatatgagaggtgtcttgtgaagttcaaagcattcaggaggtaaatacctgcaagtgaaattgtatgtcctttagccaagccaaatagttcgtgtgtacggtattaagaagaaaggcaattataaaccgagaattaaaaccgaaaatcaaagttattgtacacaaaggcaaaacatagtagtgacagatgattattctgacagtcttataactaaccagtatgttccagctccctgggacgtaagttccattccctgggatccaacatcatcctccacaatcttgctaagaccaaaatcagtcacttttgcaacaccaagttcgtcaaataaaacatttccaggcttcaaatcataatggatgatcttctgtgttcttttgttcaagtatacaaggccttgaaatatctgaacaataataattcgagcttccctttccggcagcacaggtgttgctttaagtaccgcatcaagatctttccctgatgagtaaaatataataacgatgagcaacgtttcaaagaaacaaagcctttatattccaactttcataagaataagtacatagctaataagaatgagaacaagaatccaacaaatgcataccactacagtactctaagacagtgcagaatgtgttctggtcaatctcaaaaatgtcccagagccggacaatgtgacgatgcaccaaagtcttgtgaatattgtattcgcgaatggcgtgccgtatgtagctctgcttcttatcttcgctccactgagcattcaaaccatgaagcttacacgcaacatatctatgctctaccaaatcataagcctgctggaaatttcttacttcaaacactgcaaaaaggtgcttctttacaattgccaatacaggcaaggaaccattctagaattttgttttgtaaattgaatcatcttttaaaatgtgataaaataatttgtattgatacagacattatatctttcacaaagttctgaccttgtaaacctcgctgaatcctcctttcccaagaagatttaacaaggcaaatctgtggtttagaacctgaaaattgttgaatcgagaaccatcttcatcccgtatacgcttcatttcacgtataagccttcctttttctagctcatatcgatccctctcccgcagaatagtttcttcctcctagaagaaagcaacaacttgatgaaaagacatacacaatatttatcatacttacaataaaactaaaataacaaaatagagaaataaccaatgcagccatattaggtatagtgaactaacacgcttgatactggttagacgggccttgtagatttcatcctggatgagaatatcttcttcttgagttgctgtttctgaatcagctacgtctcctttatctacaagagtaaaagaggacttttcagtatttaaatatgttgataaaaacaatgacaaactaaactatgaagtgaaaattgactcttgcaacattataattggaatgatacataagaatggctacaatcaaggaaagacatttgttgattagatagtcagcagcactgaaatcaagcatatggaaggttgacattactgcccaaccataatagtgaccagagtagaacagggattatgctggatccagtaaagcaaggcaggcacaaaatgaacaggggaaagagcaggttcatttgtaattacaaaaaattgttggggaattcccaaaagatatggtggggttaacagtgattggattatttattcaacacaaactctttaccccgttttcctaatactgagaccatgacatggttgatgtcctcttcccacaccgctcttcccccactggctgctgccgccatcattgtcctcttccactaattgttcttctccgtctcctctcacctctctcgtgaccctttctctccaccattctttccctctcttttaccctatctctcacattgtgcattttcaggggggaaaaaatcctgggctgtaagagagaaatattatggatttgtcatgtatgaatttgggtaggttatctggggagggtggaaggagtcaacattcgattcttgactattgtgttggaatgtgaaaagagatgaataagcttcagattttattctcttattattattaaattgcagagagtgcacagaatcaaggtaaagataatgcttgactttcccaaggggaaagcaaggtgaagaggagaacaccagggaagctcttcctgttttggctcccactgaaatcggcatcccagtcgttatctatatttgttaatcatatgcattcaactcactatctccaaattgtgagtgcttagctgcctagtaccaaagaaggctgacatttttttctcacaaatcttttatgcttcagaagttttattacagctaaatgttatttttgttattatattgcctttaaaccaggataataattttcattaaaatctaatttaatcaaacttcagctaggaaataaatagttgtaatttttttatttccttaaaattcaattaagcttttacaagtttcgaagttttttgttattttttaattagtccaatcttgtccagtaccaaacataggattgattttccaagtttcagtttaccaagcagaaagttggatacaatctaactctatcatttctaatccagtcaagatccaatcttaatagacacacatcttctttgtgaacatgaaaggcggattatttacaacctaataaagggtattactcaaagtactttcagtagactctaaaaataataatctaacatcctgtaataacaaccaatacaatagcttaaagtgcaaaagtagtaatttcaaacaaaacaacagcggagcttaaactttcataataaacatagatgaaacataccagactgtcttttctttagaaacttccgttgccgctcgacagcttcttttgtttctagcaattgtctctacaataattgcataaccgtgttagtatcaaaaccaaataaaattcaatttaatttttcaaaataaaactcacatatgcactatgacacagttacacaatgaacaaattgaagggcagatatgcactatcacatgtgtagagaatggaaaacactactatagacatctggttataaagtggcttagttttgtactgtatttttattttccctgatctgaactaaaatatttattttgaccacggttttcctccgccacaagtgactatcaatacataacgggggaggtcaatctaaaacaatggcctctttctttttttcaaaaaaaaaatgaacagcatatgagacaagtttgtttgttctaataatgatgtgtaacaaaaaaagaagatgatgaagaagcatacaaatccaaatagaggaatacagaagcaagaacacacaaaaaattgttcaaactacaagcatatatatagcttgagatgtgtagcatagaactaaagttttctgctgtggaaatatagtgacttaaagagaacgtgaccattaaaattcattttcttcatacgcaagttcttattacgtattcacaataaaatatattactcatatcagcaaagaatttattttgtaagaaacaacaattgtattagagaagggaaaagttttcaaaagataataagggatcatctaggattacaatcctatgtgtcaatctctaagcatatcagagaaaaggaaatacattgaaatcgttggtgcaaaaatccaaacagcgacccgaaatttaattcttttcctagtcactatctgcacctagggatggaaacggagcaattattcttagcccggttacccatttatgccccacatctccgtctaatatctagcagatttggggtaggggaatactcatcttttatggggaacccgtcggggtatccattaaggcaagatggataaaaaatgtgacgatttaaaataaatgaaaaaaaaattaatataaaggatattagacagcgatgaggacataaatgggtagcgggggttgcattccttgcaccctccccatttccatccctatttgcaacccaaattcagtaggaactcttcgatactgtaaactaataataaataaataaataaaattaagcttggccgtcagcacatacaagatgagcgttgagatcctttaaagcttggccgtcttcccatgtctcagatatgatagttccagctctacgaagagatacaaaaaacagaaacaaacacaacaaaaaacaaagaatgagattaaaacgtgatcttagaaatatcttgaaaagcacttttactaaaaataattttaattaaaaaaatgttttcatattagctgtccatgaatagagtaatatgtgcttgtttacactgtgcaagaagaaattcatacctaataaaatgtaatatttaccaaggagataggaaacatcctattaataaaataaaaaggctatcctaagcaagacctccaaaagcattcagagaaactttaaggtttgacttccccagaattattcttttccctaaaatctactctcaatgttttgctctaaatttttttggcgacactaagaacttaatgcagtcttaatacatctgacatttaaaactcttattttgaaaaaccaaaagaataaacggtaatcaaaccaagaatagcaacaacacccaaatcttcagtcctaacacattaagaaagataatccacgtacttttacactcaaaaaaatccgtacctaaccaagatcgcccataaactaaacactgtatctgtattttgaattttctatgttatttgattaaattgcttctaatgcttttgtatcggtaatcttaaaaacaaaaaaagaaagaaagaaaaattcaaactacctccatttttattgttctccaaccaagaatagcaactacacattttcattgttctcgtcaaacacaaacccaaatctcctaaaactttaggaaagatttatccacatgcttttacactccgaaaaattcatacctaaccaagatatcccataaactaagactatatctgtattttggattttctacgttatttgatttaattgtttctaatgctcttgtactagctccattttattcttttttcttccaataaaagctctgattcttcatctcggttacacttttaacgcataaatccttcaaaagcaccatacaaaggtaacaatcctaacattgatacctgtaagtactaagtgtagacaaacttgctaaatttctaatctaaacccataatgcaatcccagaacccaaaaagacagcaaagtaaaacaggaaacaccatcactcataaattaaaaacccaaagaccccaatggatataaaattctgcaaaattaaaagtattaacccatttccaaaaaaaaaaatcaaattacctgatgacaccaacgttaccaagtcttaaagagtcttgtcgtactttcattctagcttcctgtctctctgcttttgaaacagatatcagtaagtcagaaatcacttttgtcctctgcacaagaagaaacaggaaatctagttacttttacaaatgtgagataaaatcgttagacaacgcaattatcaacatctctgcattctatatatcattagacaatgtaaaagacaacagtaaacacaagattttcaaaagcacaccttagggttcacttgttgttctttgtctttgagatccttcaattcctgcaccattcaaggtagcaaagaaagttcaaaagaaaaggccaacagatctatatatcaaactcagagacacagatcgatatatcaaactcagagacacagatctatatatcaaactcagagactctaacttaacatacattttccctctgtaatgtaatgtgtgctaggtaaattaccttttctaactgttgacacatatcattaaattcagatgcttcttggcgaaatttatgaagatcctcttccagggttgcaactttggcccgcaaggacgtaacttcttcctaattagttgacaaaaaaagattcacaactataagtaataaaatattgatagcacctgaatcaaaagaataaagttgattggatatcatgttttagctataaaataaaagaataaataaataaaagcagagaaagggactgattgcactgcaattttgagtttcaatgcaacaaattcattctcctccagcaaattgaaaatgaatccaaaagaaccagaaagtacacctctaatggagaacggctgtcgttgcggaaattctccttggacctactgtcctgcatgaataattaaattggtaaaggatggtcagctactcaacgcaacaaaatgttagaattggatacacagatggaaattttgtttgtacatacaaagatagttagaacagctccacaaacttttcatattttcatagttagatcatatttcgtttgttttacattttaaccttatttgttttcacaaacttttcttctttggaaaggttacagaagccattcaaattcttttaacatccttatagtaggaacccaccttcaggtgtagttcaaatgacaaagctagatatacgtttgatatttttgttgaatatcttcaaaaactttttcattagagaatccagtctagataaaagaggttggtcttgttaacattacattataatgttttttcttgctaatctttctattgttctttgattgttttttttaaagtgaaacaaataaagagaaattacacagaaagtgatgggacagggataataactgataccaacaatgagttcaaagaaacaaaaacttgcattatgaaaacaacgacaccttattatatgagttctcaagctgaccatttgaaggtgtaattgttgaagaatttatttgtgatcttgtctgatcattatttcttgagccacgcccacgacctgaaacagaatgccccctaccacgaccctgttttttcctatttacatcaacatttactttggtttctacagtttccgcattcaattgtcttccgtcggccacaacctgcaatttgtttgttgcaacatttagttgataatctgccctctaagaaagtaggggcaagaatatttatattgatagcacaaagaaagttttggtgatggacctcaaacatttatggtcaaatcagaaagatgttaatcaagtcaagcaatcacatttaaaaaggtattctattaaagaaaaaaacgaaagcgggaaaacttaatccaagaagcatacagttgtcaacaaattagtcatctagttttgttttatgttataatttaaaagaaatcaaggattcacctcaacacgttcaaatgcagttgtgctttcatcttcttcaagtttccgacgcttttgagtgttggcttgtattaaaaactcccctcccgtctggcataagataaaaaaaccaagatacattaacaccatattctgacaacgataagcaatgccaactaaaaataaggcagacacacaattaatgtatatagaataatcaaaattaaaatatgtataagatgatctcatgtcatcttctgtacttgaaaaggataagttaccatctttcataaatgtttctccctctggaacattttcttttcctctcaaaaagaaaaacattatttcctataataaattgaacttccaatgaggatgaataaaagaatgattataaaacattctcataaatcattctattatccttacaactctactagaatctgctttcaaagccagctaatgatgtcaataccttatcctctgttctctaattcattttttaatcctaatcaataaaggtgtttgtctcttattcattaaagaaagaaagacatgcacaatgaaaactgccaaacatatatttcagttcaacaataaaaaataaactagaatgtgcttgtcagctaaaaggggaaaaaattcagtctccttataaattctctccaacttgacctctaacccgatatacaaataaatggaagtacaaagaaaacacaaaagatgtcagctttatattagttttatacattcaatgaaatttttagtgagcatagataaagtggcatactgttataatcgaaaccaatcttctacaataatttcagagatacagatcagattgcaataataaatcatcaccatcttctccacacatgatgcattaagttatgcattactattagtcctcctggctaataatcacctaagcaattaaacttactaggaataccagcatgcgattaaagtcaaagggttcgagaaatgaggactcaggatctatccatcaaatcaaaaatagtaaaaatgtaaagctattctcttatttaaattttaatacatctcagaaatcaaagatagtaaatttttctcactggagctacaattgggtgtcttgaaactcaagttaatagtcaatctcacatgaaatcaaatccagattccatcaaagtcttgcgaggccttaccattggacctagctctgggatctaacttttctagcttttggattaaccaaagctagattgctaccactatgaatcttctcattatcagattaaatccacattctaaatcttaaattcaattcaaggaacttaggaaccccttgaaaatcctctatcattttatacccacataatcccaactcaaaataattgaatcatttcactgaattaagatgtaacaaaatgcaaggagaaagtaatcctagataaatatatgcacgcatataaacatatatatgtagatgaaacaatctcaataagcactcatcattcatcataacaaaccaacacatcaatgaaatcacaggcttacatcatcgtcagagtcactggaagtagagggttctggcaattcgtcagtaacaaatttcatggcagaggacatagatgaccaagtttgctgctgttgcgcaggcgctgaagggactacggtggcagtagcgggaacaggagcagaggccgatgaggccttgccgaccatgcgagcttcgagcttggcaatcttggtaggcaaggattggtcagactgattagatgagttggaagagaaatgtaagagcatatcatccgacattgcttaaaccttccaatgcagaagaagcaagaacagtaaccgtcagatgatcatttggttttctctgtctttttttttaaaaaaaaatgaaagtagaaaataaacgatgggctccaacggaatcagatttcagtttgagtcagccctcgagaaaatatttaattttctaggcatccaaacagtgcggtaatttttggtagattcaaaaaaaaaaaaaatgaattagggttttcaagtctgtattaaggagggaagaactgaaatctcacctttttctttttttattcaatatttattctactctcttctttaatatttattattgattaagtggttggtagaaagtcatctaattcaattataatcgactaatccaatctcaacccatctaatagaattggtatccaatcttaattggatttgattgaatgtaaattttaaaaattcaatcggattagatcggttgttggatcggacatccgatcccataaataacaaaaccgatccaattatcctccaatgatcatccaattatatttatatatttttaaaataaatttataattttatatattttatttaaaaatatatatattaattgatttaatatacatttttcttaagaatatttaatatacatttaacacatgagattaaagaaaaaaaaaactttagatttaaaatattaatcctcatcttcctaaacctaataaaattgtcaatatttattgaataaattttattttttagcagttttattatgagattatgagaattaggttggattacactaatgtttattatatatgttggattattaagttttaaattatatttttttatatatttatatatatttttctttttaatgaaattaacttaaatggtagctaaaatggattggatggatcccatccaattaaaaatcagtcaatgcatctaatggttggaaccgatccaatatctatttgatcggattggatcggatgcctcaattcgattggattggatcggatgacaaaattcaatatccaataaataattagactggatcggttgggtccaaatctgttggatgtgatccaatgaatacccttattttactctaacagtattgatattaggcactagtaatatttaacactttctagacgtatcgtgttgtgattgtctaacaatattttataaaaattattaaattaaaatatataaaatctcatatttaattagactaatagcaatattgagacgtaaaaagatgctatgcaccactactgttcatttccatttcttaacagtaatagtgagttttattaaaaataaattaaaaaaccaaaactatttgccacaagaattaatttctttgtatatagatttaatcacaccgaacatattctatatataaaaaaaaaaaaaatcacaccaaacatgatattttttagttaccatttatctgattatttccataataacttgttctttctatccttaaaaaaaatacttgttctttttaaatttctattacaaacaacaaacaatttaagaagtgtgaagaaaaaaaataccaataaaactacccttatttaattgtgagaattttttttctttattggtgaattaattttgagaacttaattataaagaaaccaaaattttaagagcagtaagtcaaaaaaaaaaataaagtttaaggattttatccaaatttggggatcttttgtcaaaaaaaaaaatatttagggaccaacttatcaaaacattatggctaaagtcctcaatctccacaatcattttggtcaagactccttccattaatctggctctattatgtgtcggatggctcctacatggtgccaagtcaactttgttatatcctataaaaccctctacgtcgaatttgggtataagattaccaaactaaaactaattaatgaaaaaattaacaaatgggaaaagacaactaaataaaaaaattcacgtgttataattaatccaaaactaaaattattatgggagtaaaattaaaaggaaaatgaaaaggaaagtaatttacattaagatagataaataaaagaaaaagaccataaacacaccattcaaaccaatgaaaggaaaaaggaaaaaggatactcattctgagaaagtgaaaagtaaaaggcaattttggtcaaaaaggagatcgattatcgatggtggcaatgtaatacctcagacgatctattggtgatcccccacctgattatggtaagtttctctggttcataattatttctagggtttttcgttttgggtaaacttatttctagggtttctgtgttgggtttcttgtttgtagagggttagtaggatttttgagtgaaaaaaatattggttttatagttggatttttgttagagattcgaggaacgatttagttggaatggtaaatgtgatcttaactctgctttgaatattgattaaagtgttcaaaaaatcagttgtaaaagaatctttctgcttgtttgtcttcgtcagtggggtacatatgcacatgctacttttgttttttgtttttgtctttttgatggagtctaaatgtttgggtttttgcccaactgctccaataatatgtggttttgcctagattagatcagagcctttactgttctttcattttttccattgcagtggtaaggttgatcagttcacaatgaagttattccacgtgggtacatggtttacccattttggaaactgaaggtatgaatgtggggtgtataatttgtttgacaattgcaagggtgaatctctctcaggggagaactggaatacaaatttctatttggctttctgttcaagccttaagggaagcacttgaattttggatttgagaagtaaaaattatgtagaagcttcaatttacttggtcttactagatccactacttccaattgagtggagaaaagatgtggatattatcaaacatgttcctaagcctcctcaaacattgaaaaagtgcacaattgaggagattccataagggagtaggaggctggttgatgagttattggcacaagggtgtagtgatgaggttttgtcagatgaaattcaagaaccaattaattgagattaattcaacatcatcttctaagtcagagacagatacatctttcatgtttgagccacaacctataccaaatgaaattgaaggtaatgatcaaaactatgattgagaccgttaagtggaggaagttgtagaaaattcagaatacttcaatgttcttggagatgaagattacattgcattgttgaacaacttgaagatattggtgaaaatgtaagtgttgtagttgtgtgtatctattttttttcttcaatttttgttagggtattgtagccttgaatgttaacttattgttgcattcttattaggaatttgatgatgagatcatccatgctcgagcatttgatgttgaacctcaagatggagcagtggacgttgaacataattcccctaaaatcatggatgatggacataattctcatgaagtgatggatgatgaacctaattcccctgaagtaatggaagttgaaataacttgattcactgaggaaacacctaggtcaaagaggttaaaattgaggaggttgaggaaggctcaacaacaaaagacagtgaatgttgatcatactccatgaacccctcttttggcagattttgtacttgatcaacaaccttatacataacctgaaagccaacaagaggccccacttattgaaacacaacttgaactacttgctgaaacacaacctgaaccacttgttgtaaatcagcctgagccccaacctgaaccataacctgaggcccaacctaaaatgcaccaacctgaaccacaatctgaggcccaacctgaaatgcaccaacctgaggcctaacttgaaaatcaacctgaggcctaacccccaagacgaggtgattttaactatgttaaagaagagttcaataaagcactatttgaggagatgtatgattatggtccagcagaaccacaagctttgtgggatcaagtttctagcttagctggggatgctaaggtagatgaagcttatgagattgaatttggtgatgacttggccagcaaccacagtgaagatgaagctgttgaaacagatccaaaggtggaatacaaaccacatacaaaaatagttggcttcaagtttgacattgttatggaatttggcagtgtggacattctaagaaatgtgatgaaggaacacttcatatatatatatatatatattgacaatgagtatgaactgattccaaatgccaaagagaggtttagggcaaagtatagagtagaaggatgaacatggaaaatatatgcatctgttaaagaacatgagaagactttcagagtcaagactctcacccctaaacatgaatgtgagattgtattggacaatatgtatttaaaattactgttatttttcaatactacactgtaaacttatttgtggttttttatcttatggatttcatacttccattaatcttgtaggcatatagatgttaacttgctcagcaaatacttcttggaacagttcagactctacccaaatatgcactatagtgctttcaaggagatgatagagaacactaagttctctaaaatgagttcatggcagttctatagggctaaaaaattacaatgcaaaagcttgagggatttgtaccagaacagtttgcaatacttgatgattgctacaagtaaatcttgtccacaaatctaggaagcactgccaaaatacaaattgagaggagggatggaaataggatatttcaaagaggctatatttgtctacaagcttgcaaagagggggtttacagaggttgtaggccactcataggtttagatggttgttttttgaaggactattgcaaatgagtgttattagttgctattaaagtaaatgaaggtggagctaattcaattccctatggcctatgtagttgttgagaaagaaataaccaacagttgggaatggttcgtgcaattactgaaggaagacttggcccttagggatcccaacactttaacaatgatgagtgacaaatagaaagtgctacaaaatgatgttgaatccattttaattagtcatgatagcagattttatgttagacacatgtatgccaatttcaagaaagaatttcctggacttctgttaaaacagttagtatgggcagctggcagagccaccataccagctgagtttgaccaaagaatgcaagacatcaagaatattagtgttggggcttacaactggttagtagccaaagagaaatcaaaatggacaaaggcacacttcaaggaaggggtgaaatgtgacatgctattgaacaacctgtgtgaaagtttcaacaatatcattttagatgggagggacaagcctattataacactattagaaacaatcagatattggttgatgtgtagatttgagaaaagaatgctttcaacagctaagtggaaaaattcagatcaccacaacattgctaagataatagacaataatcagaacgtagctaagaattgctcaatgacacgagcaaatgcatttgtctttgaagtgaagatgtcagaagcacgtagattcacagttaatttggaccacaacacatgcatttgcaggagattttaactttcaagtatcccttgtgggcatgcattagttgtgatcagattttgtggacataaatgatgggactactgtcataaatactactacaaaaggaagctttcgaagcagcttatgcagggactattttccctttgcctagtctagataagtggcaagacaaaggtcgcagtccaatattaccccccactgagcacaatctgcctggcaggccaaagaaaaaaaaggaacagagcagctgatgagcaacctccaccaactacaacacttaaaagtagtatagcagggacaaaaatgcattgctcaaattgtaaggaggttggccacgcaactaggaaatgcaaaaaacctagaacaatgccaccacaatagagtatatttttatattaattaacttgctcacatgttaataccatttcggtaaatattgaccatgctattatattggtgtaggctccagagaggtagcacaaagggcagtaggagaaggatcgacttcacaatctactcaacaatgaagttaactgctatagtattagtttgtcatagttaaatattatagcattactacaactgcctccattaatgggatgatttttattttggaacagataacttttgtgataagtttattttggaacagatccttttagaacaactaggaaattgggtctttaactgttgtgataatttttttttggaactagtccatttggaacaactactaaattggatctttaacttatgtgttaggttaagttatgggacaaatcctgttggaatatggatgctttaacattttctatgtatcgatgtcttgaatcaagtagtctattgtcttttttattgaaattctttaacttttatgtcagtaatggaagatggaagatctaaacttgtcaaaataaccattttcatttcaaaatatcaagtattacatgtaaaattaatagaaacacttgttcaaaatcctactaaaagacgaagttaaagtaggatcttgaaccaaagtaatacaaaagcaataacaacactaatgacaacatttctacaaagggcacttctactatttttgtggcagctagaacattgaagaactcgaacactaggactgttatcatggaagctctcactttcgcacaactttgtaaggtaagattgctcatttacttctcttctcccacttctgacctagaaattattgatatttcttgttccaattgacgaatctatctcaacatgttaggaatcataatagtggaacgatcacacataggaggattgatccattcccaaaactcacacccaccataacattgccaatcaagaaacattcacatagtacaacgaagaaaaccccaaaataagaaaaaagaaaaaaaaaagaaagagaataagagaagtcacgagacccagaggcactttgcaaatcttttttgtggattcgaactcgtccacgagctataaatttttgggattttagactcctcgtaatcgcaactcctccttcgaacaatcaccattttcttcttcttcacacagcaatggcacctagtctctttctctctcttcgaccctcttatttctttgttttttgtttatttatttacatttttcttttactttttaatttttatcataattggttttagtttgttaatcttctacccagatctgacatgaaagtttttatatgacttggcaccacgtaggagccatctaacacatatcagagctagaccaacagaaggagtcctgaccaaaacgattgtggaggttgggaactttagccataatttttctagtatggggattaaaccatttatagtttagaaacccaaaatacaaataatttttcaaaaaaaaattattgctattagacactactaggtggcatcttaagaattaataatatttcaaaaaaaattattgctatattttgtaggaagctccccacagtgaacaaaaggaaatatgtgctcatgaaaacaaacatctatagaatgaaaaactttgtttgtgttgagatccaacaatctgtagactttcatacctgcaggatatccaagaaaaatgcaaggagcagctaatggagagaattttgatctagattgacttaaaattgagacataggcaagacaaccaaaggcctttaagtgttcataagttggttgtttggaatataggatagcagagggtgatttatttttagattaagtgtaggtatcctattaatcaaataagcagcagtagcaacacattccacccagtagcataaaggaatgtaatgttagactataatatagtatatgaaatacaacatatatataaacgatatgtaatgcgaaaaatactataaacatatcgaaatatatatgcaatga

SEQ ID NO: 110589 - DNA, 2220 bp, Cannabis sativa
  modified_base (2171)..(2184): a, c, t, g, unknown or other
tttttaaaaaatgtcatatttagggtaattatgtttttatcccatatatatcaaaacttatctttatttttccatatttttgtaaatagcccatttttatatgaacataaattcgtacttttttttttctttaactatatgcgttttatataattttaattatttttaaataatatcttaataattatttgaacagaatcataaaaaaaaaattataattaccatagttttttttaataaatgtttttttttttaataaagattaaacttcaataaaccaaatcattcaagactaaggatgcaattacagagggtagggagtccctactaaaaatacgatcagcctcagaaaaagaagattacgataaagcatgcataaccttattagcagaccgctgaacaaaattaaaagaaacaacatcaaaatcaacaatcaaagtcatacaatcataaagaatatggccataaggagagaccatatgtttaggcttttgcaaatcactaatgacttttaaacaatccgactcaagtacaacgcttgcccatccattcgctttactccacgataaagcctatttgataccaatagcttcgacaacatgaggttgcaaagcacttcccttggataagattctagcttccaacactgtaccagcaacagtccttgcaaccaaacccacaccatatcgaccctggctagtgaaaagtgctccatcaacattgactttaatagatggaaattttggtgcggtccaatgctcaagattcatcccattcgtgccattgatatcagcagcagaagcattgcttttttgggcattaaaccagtaaacatagttcaatttagccactgttacaacttcactagcatagttctaaatcaggtcatttcgatgtttccaaattgaccaacaaatcatagcagcctcaataacctctgttgtgttccacgattccaaccccacctcaaaccaactaaaaaaaaatcatcgcaccaggtgcaacagatgggacttggaccctactccagcaactttgagcaaagtgacaccgaaccagaacatgcatagtagtttcaggagctgcaaggcagaagggacaactagaatcaattggtacatgctttgttgaaagttgaaatcttgttggtaggctgtttgtggatactctccactagaaaatttaatactttggggggaagttttaatttccataactgacgtcaaaaaccagagttatctggtgtgttgttgctggttttcaaattttgtagcagagaatatgcactcttgaaagtgaacatccctgaatcatcttgcaaccaataccaagtatctcttcccgaatgattatttagaggtgtttttcacaccaaagcttgatccctgtcacttaacacatctgtgataattttctcatcccattcaaccaagccaatcttcatcaatgaatcaacattcttccccacgagaccgcgagacctggatgagtagattcaatgtagggattcatctcatcaggtaaccacggctctaacagaatattaattttagagccattgccaacaagtctcctttcacctgcccgaactagctccttggcctaaaaaatacttctccatatataacttggattactacccaaaaagctataagaaaagaacctgaagagaagtatctggctttgaaaatttgccccatcaaactatccccacatgtcagtagtccaaccttgcttagctagaagatttaaattgaaatccctcaaatctcggaatcccatttcaccgttgtttttttgatccgtgagtttttcccatctcaaccaatgaattcctttatttttggttgacctccaccgaaatttgctaatggttcgctcaatgtcctggcaaattccaactgggataagaaacacattcatcgtgtaggccgggagcgcttgaacaactaacttgatatgaatttccttgcatgcacgagaaagaaatttattatcccacgattgaattcatttctgaactttgtccttcaagtagccaaaactacatttttatttcttccaaatgtacttggtagacccaaatatttactgtgttcagccacttcgtggatgcccaacctatcacagatggattgtctcatggtagtggtgttggaaatattttaccnnnnnnnnnnnnnnctaccatgtatgtttcattaacaacctaatatgaat

SEQ ID NO: 110590 - DNA, 4754 bp, Cannabis sativa
  modified_base (1806)..(1807): a, c, t, g, unknown or other
aaattaaataaaccccatgtaattgtgatttatatttggcatcagtagtattggtactttttatagatagtattctgtcattagttagcaatatttcttaaaatttattttcttaagttatatatatgagacatgatacttaatcataccaataatagtagaatactgaaaaaaatattaaacatcaatattatttttttagcgattctcttcaattatttgcaacattaaaaacatgagagagagaaacgtgtggggcccaccattaaagaaagagggaaatgagtaggaaaatgaccaagtatatatgtataccactatttaagtaatgagagaaaaagaagttgggatattgagatatatgatattagtatggacttaattagggaatttggattgaaatttaaggctctccaaaagatgttattaccttaatatttcattttttttctttcttctaaggtccttccaaactatttgactttactacacactatgaaaaaaaattaaataaatataataaatataaaattgagagaatatgaagctgcaaagcaaagaaccctccaccacccaccacccaattattctccctcatttcctccttgccttacattttcatgacgatcctcactacctcattcatacaaatatatatatatatatattatatagggccggcactaggtataactagattaggtccgtgtttagagtccatacttttcagtgattcaaaataaaaaataaaatgtcttattagacttttatttaagtaaaattaagtgcattgtaaacaacaaaattcaaaatttaagtagttgtggtgtatgacacattatacaatagtttgggtttgggtcctatatcactcttttttaatacttttgaaagttaaaactttaaaatttaaatagtcttagacgttatatacatcgtagttatagaagacattaattttatatgttttcaaaaattagaataatatacactacctaaaatatggttcaaatacttagttgcataaatataattagttattttgaattttattttagtattattataaattatataaaaaaatttaaaaacaattaaaaattgaatataattttttcaaataccaaaaatataaatactcttacccaacaaaagtgacactcctcctatcaaaatagttcggtcttctctaagtgtataatttattaatatgttacatattacactattgttgaatagagtagtacaagttgagaatatattatccactaaaccattatgatcatgattaaagaaaaagaaccaataaaatatagggacacttttaatagaggtgtccttgatccttttacttcaaacaaattctatcttataatatacatattaattagtctacaatttcatcactatatgatcactaccttttgattgacagagtaatcttaggttttggatttggaagacaatacccattatttttatatatatattaatttaataattaatcatctaaaaatatttatgtttattccaaaaaaaataaacatcttagaaatcgtaagtgtttttaactatattagaataagagtgttcgtacttcgtagcagtaacagacctagaattttataataaattagagtaaaaattataaaaaattttaataaaaaattagtgagaattatttttgtagattgaattgaatatatatgacgtgaaatcatactatatcataccttaatatgtaatgtagtgtaatttatgccatttaaaattttgcaataaaatgtgagtatatatatatatatnnatatatttttttttttgaatatttctagttgatcttttattacccttatgaactcaaatcactttgtcattctttgatgtagtttgagaaatgggtgggcatatttttgaccaactacttgccttttttatgtttgaattatattgatttaaaattgttaagaattaaaacctaaattatataattagaattgttttaatcattgattcagtcctatgtcttaaaatattattattagatataagcagtattcaataccactataatataatgtcttataaataattaataatatttatattaattattaaagtaaaatatatagccgattataataataactttgtaaaaacatcattaatattttttaacatttctctacgcgttatatttgttttgttgcataatcccaaaaggcataataacctctacggttgtctacgtggccataattgacgttcaaggatgaatctcaaccgtaggattagatgaccatgatgtcactaagtttttcctttttggttcaaaaagtcatcaacttttattaatatattcacacactaataattaatccattcattgtttaataatttaagaataataataataataataataataccacaagtttagggatgacatcattcccactccactcaatcttaaatctcaatcctttgatttaaattttattttattataattttcataaatgtttttgttttatcttgaagcttagcttaattttttcacacaaacgacagaacaagattgcataaaggggtttgagaacaccaagtggacctcacaaattattattatattttcaaaatattgattatttcattctattttaccttacaaaacttaaaataatatagtctatttattttttataaaaagggtttactaaataataggtttttttaatctattttgatatttaaaaagttgtttaattaatttttttttttataattgcacacgctgtaggtgcttaaaatatcacttgtaaatttttagaaaattctgaatagtttacagtagcgaaaataaagtttaaacaattacttacctcgcgtataaaaaaaagacaatcacgtgtataataaaatatgtaaattttatttttagtattgtaaactactcgaaattttttataaatttacaaacagtctgaaataactataatatacacgatcatgacaaaaatagactaaaaaatatttttgaatgatgaaagagttaagggattactaaaacagttatagatgtgtattgtagacttacccaatgatttatacaattctatgtgtcatttggatcttcaattttaaacaataataaataaataaataatactttttttagaacataaataagtaataccttacctctcaacaatttaactcatctttcatattaagttttttttagtgttattattgaccgattttaagtttgagaatacgattttttgggggggctaatttgtaaaacattatgtatttattgtgattgtttagaaatgaagggatattgaaagaaaattgagacgaaaaataatgtaatttttataaaactattaaataataatagaaaaagtatactttcaatgaaaaaataataataataataaaaaaagtaacaaaatcataaggcttaggctgtagtagtgggcccattatcactttctaggcccctttaaagtgagactgtttcatgggccgagacattagacagttggctctccttagtcctttaggatttttccttctaattttctatttttataatcataataataaataaaaaaacaccaatagaaaagaaaaaaaattgtcgtgtcctttagggataacattaaaaaaaaactcattatttttttatttagtaattattaaatgagaaagagagaaaagaagaagagagtggtgaagttttttttatatatatacatatataaattaaaaaaaaatgttagaaaattaatgtgtgaccatttcatttaaatagtcaatagagctttctaggccaacttctcttctttccaaatccaattccattcccatatgaaagaaactcttcttttatgttttttttttctaataatatacctaactcattccaatcatcaacttccaacagactaattcttcacaaagttgcaataaaataactatatatttttagtatttaaaaaaacacttaaatgtttaagttgtactccaattcaagccaatacttaatgcttcttttacataaataaaaaatagttttttttttaattaggaaaaaagaatgataagagggttacacagataagcatattattttggtcaatcaatttaattgatgtttattcaatagataataggctaactagtagtcattagtgaattgagtagctaattccttttgttcaaattggttgaattttataataaattaagtaaaaaataaatatctagttggagcaattttttttttcttttgaaaaaaaaaatggcttcattaaaacctccatagtaaatttaatgggaaaaaatttcagagaaaaaagcgtcgaatgaataatatttattaaataatgtttacttaaattagatcagtaatataataaggaccaccaggatacccaatatagtgaaataaaagtaagtttagccaaaacatgagttatactattaatcaatttaggtaagaccataaacaaaagaaataacaataaatttattacaacaatcactaatatctctaataatacatcttaagtaagattgattaataatacggttgttgataaacagtaataacagtaatgcagtccgatttcacaagcatttggtcataccttaggccatctccaatgggacactaaacctatcctcataaatgactttgtctacagtgtcccaccaaatttagtgggacactatagactaca

SEQ ID NO: 110591 - DNA, 1819 bp, Cannabis sativa
  modified_base (1792)..(1793): a, c, t, g, unknown or other
ggcataaaacccaacaaagacaccacgttcccagaagaccctttgggtttccctttatattcttactcacaaataaggaaactccaattttcagatcacaatagtgcatcgaatcaagattaaagaagaaacatcctacaacaaatgttatgcaattaatttagattaattacccacaatcagtgtgcgcgatgtttaccaaattaatcccaatcttatctacctagtcagcagatcgtcttctccatgggttggacttcatgagaaagcccacaggtattctttaatgttaactcctcagtagagggaaagggaaaacctaatgtaattctcaaactactttaaataccccattaatctcatatattaaggattaaattgtcttgtatacttcgctcaagcaaacttgaaaatatacattatgtgtatttcctaatgcatttacaagcaacatcttactgaataatattgactcgtggattcagactagttaacgccctaaacacgttaaaaactattttcttttttttttgtactttctctgttgattatttattcttgagttcttattatttttattctatttccaaaaatcttggcaaacatttatgtgctttcattaagagctgaagaaagtagtgagaccacttgaagattacgttcgagtaatcatggccctcacccgaaccaagtctggcctttgtttcattggttctagtaccagagctggagattctagtgacccccaagaggtgactagtcatcacaaaagccatcaaggcgaggaccagaatctagatgctgtcatcgttgaggactcaaaatcaagagaaagtagttctgaggacattgaggttaataccaactacacaccagaggatatgaatgaagatgaacttgaggacaatactgggaagaaaagccaacctaatgagtcagatcccatggtcatcatggcgcgacaacttcaattggatgagagcaagttaactggcaggatcaattcaacgagttgctaatcggcaagatgacaaggatgaaggctgtgatgactgccatgaaaaaactatctccacacatactagctcctccagcaatagatgcacctaagaaagcaaatccaaaggaccctcgaactttaggtgtctgcaaagggcaaaggaattgctatggaagaattaaagaaggctccttctctgaaatagcctaagaagtctaaagctgctgaccaacctcaatagaagaggaaaggaaaccagaccttagggcaggatgactaaatcaattctagaggcagagtcatacacaaaaataagacggatgctggagtattgaagccagagccttgaaagaaaacacctcctcccagtgactccagtaatcttgacaaggagatagaagaagtgcatccggtattggatgatagtggcaaaagcctttccactaaagcgaaaagagataaagctgaaaaaataagaccccgcagaaatgatctgaggaaccatatcaacgatcacgtttgcagaagagaatcctcaagtgataagactcaatgccttgtacgtaatgttgaagagtagatgaggatcattcaaaagatttctaggaaacaaagtggtaccgtatccgactctgaggaagaggatacagagccttgagtgaagagaattattgatgcaccattgccagagtgtttcaggatgccccatatggaactgtatgaaggatggaagtaccctagggaccatttgtccaaatacaatcgcatcatgctgttgggttttatgccctnnataaaactctttacaatctgattagt

SEQ ID NO: 110592 - DNA, 1476 bp, Cannabis sativa
ttagttttattttaagtttagtattttgatttttaaatgtcatatatgagttagaagtaaatgatgtttaatgtaaagtgctaagagaagaaaacataatagtattctgaaaaaaaaaagattaagtaaaatattgtgtaaaatttaattaaatacaaaatattaattaaatatactgtaagcgcaataacaagttatatataaaattgaaagtaaaataatgtatagtaaagttttaatgattgataaaagaaaactatagtgtgaagttttgataattagaagaaaacattcataatgttttgaaaattaaaaaaacaaattgtatgatgttttgaaaattaaatggaaagactacgtaaaatttaaagagaagatacttaacgaaaaattaatagaaaacattattgaagactcttttaatttcttatcacttaaacggatagaacagtaaaatattttcacgctcttcatattttatcttttttgaatcggcatataattgaattgtatttttagttgtaatttttagatttgaataattcttgcagcgaaaatttaaataattgtatttcctttttacaatacatatacctgtaagaaaataaaaatgaaataaatcaaaaaccaattaaaataatgtgattaaaaattatatattatgaccaacaaattaaaattaattctgtaattgagaaacctaaaagtgaattcaaaaccaataaaaaaacacacattctaatattgcatttctctcactcccatttattgaggagaagcgtcaacaaccattgactaaaaaaacaaagtactcatgtagcaaatttcaggttgaaccaaccttggcactagttagcaaggaacccatatctaaagagattaactgcataatttgacaaaatcgattatttgaagtttcttaaccttccatcatcatatccttccattggaaatataaagatgactaaaaatattggaaatatcatcaagagtccaagaaaacataatctgagtgaatcgataatatgaagtttctcaacctatcatcatctcttttaacttttattacataatcgttaacaactaactacaattagcatttttaactttaactaataaagtattttaacagtaatggcaaaatctgttaggtgacatttgattgaaggaaatgaaatggattgaagggaatgaattataatagaatagcaaggaaatagttttattttatttattttttgtttaattttattttattttaactctttttttttaaaaaaaaattttgggttgctatagtagttgttccggtaatttttatacgggtttttatgtgaattttggttacaatttaaattattccgttgattgttatatgagtttctatgtgaatttttgtaaaaatgcaaaagaaatatatatatattttttaaaatataaaaatatttctatatatctttatttagttatagttca

SEQ ID NO: 110593 - DNA, 8610 bp, Cannabis sativa
aaaaatgtgtgttttaagatgtgttattattatatcattcaaaccatctaacttcaatatataaatgcaaaaaataatttattttaatataaatatatataaacaaaattcacactcagaatgatttatataattttggtgggagtgagatgctgtaaacaaactcaaataaatgagataataattttaaatttttattctgatggcttaaagcaaaagatggaaaattaaaagtttaaaatagaataaaggcagagagcattggttggtctgtttggctccaaaatcaaatcaaagcattgaattcttttgttgaaaacattttatgatttttgtcctttttttcactttctaatgacatatataaaagagaggccaatatcactttgagaggctttgagaaattaatattctcaaaatcatgtttggcaattggaataggctttcctcaaatgggaccattatgtatataaactcataataataagcatcataagtagaacattttataaaatatagaaagtttttgtaaaaagttatagacaccccaaagaaattatgcaagtagtacttttatatttatttatttattaaatgaggggctttagccagaattgaactctttcttgtaataacatgaacattttcttagttagagatatttttaataccctttgtggatagatttctacatttatttttagcttctctaaaaactcaacccgagaaagctactaagacgatttccaataaatgataaaaattttatgttaaatttagttaaaaaaaaaaataaaaaaaaattaatattatatttaatccaaattttattattatgctccattacattaggagttgaaagttttagttattctaaagctaagtatttgattttaggtatgattcttgatgaattaaaactagaaagataacagaatttacaagttttttctgtattagaaacacattccaatcgaatagtgtttggatccccaagaactgggtaaagtaacctccactataaaatcattaagaatacattcaccagttctgatttacaaatcaataacataatttgaaatggtcttacacgagagttatcggccgatacacttgaatacaattaactaattaggaacaaagatataagtccacttagatctgagaagacaagatccacttgcttccaccaagctgaattcccttcagtagattagtctgaactcccttcaaacattgcaaattcacactctttcaacccttgaagatccaatgaattacgatctgcaacacacaatcaacaaagagctagaatcacaaaaagattctatcaaagatggagagctagttagaaaaaagtattttctcctagcagagcaagaatcataaaaagattctatcaaagatggaaagctagttagaaaaagctttatgagcttaatatatctcacacttcagtaaaattgactcaactaactaactactaactcaacagttcaagccagctagcaacaagctaaactaactaatgaaacaaactaaaaagctagctgacttggcaaaagaaaaatgaattcagaccaaacagatgcaactaagaccaacttagatgaacaactcaaaagtcaaaccaaaaactagaacaaaacacaactaaactaatataaagcaacataattttccttacaaaaatatggtacttacaatctcccccttgacaaattatgatcaacaactaagcaaaatattcaagaaagaaaacaaaacgctaagcacaaaaagacactaactatccaaaggtaaaatcaagtcagcttacaaactgacaaagttaagttcaatagacaaaataacaaactaaaaactaaacccaaaatagttacaatgtttagaatatttgtataaaaaaaagaaacacaatatctccccttgatgatcataattactcgctactggaataggcgacaagagatgcaagaagagcattactcgaaggctccacctagacaccaacagtttttgaaacctcctgaacatttacaataaccttctccccctgaacatcaacaataatggtatcctcctgaatagttgcagaaactttctccccttgaacaccttcaggaacttgctccttttaaacaacaacacaagtattaagaccttgatcgacaaccatagaagaagattgaacatcagaaacaaggatagaaggcctagggactacagcagcagatggatttgcatccaaattagatggagagaacactggtgaatgcacagagaaggcaccatcaccatatgaaaagctaaaaaataccaccagtgggaacaaaaggaccaacttcaaaagaatttaaaacctcaatcatagtagaccaaacgtcaattacaaccttctcaaactaacgttgtctaagataatcacatgcataagattcagcaaaagtattcacctaggaaaatatctgaccttgccaagtagtaggactgaacccttccagaggtgttgaaggagcagtcgaggattatgggacattagaggctaaagccttactaatagcaagaacatccataaccaataagagtaaaggcttgccaaaaacaagagagaaagatttgtcaagggtaggaacatgaaaaatcttgtcttgatcaaacacagcaagaaaccccctttgcaccacacgattaatcagacttggataaggcaaagtgtgtagagttcacaatccaatcatacataagtgagtgaagatcaatactaacaccagtacccaatgcaaatagatttttttggtgctatagttgatagtagaaatgtgtgaattagcccaccagttggagagtgcaatcttgtaaaaaactctataaaactcagtaagcactatgacaggtactcctttccattccagaaaaactcaaagttgccagtgatctcagactctatttctttaaaggaaggcttataatcctcattaaaaacatgattgacaatagttttgaccttcaagacacaactaatagtggaaggggcaaaacgaaatcgattaccctgaatataagctaagtattgaaactttcttttcttgttcaaattgttatcatcaaggttatcaactccctaaccagattctcatttggttgttgaagatgagtgacagtcaacaaccaccctcttttttcaatcaactcacaattttttagaaagtacttaagtttgactcgatattcaggccacaaaaggtgaaaatagacattatcttgaaacctaagcaacttatcattcaaatagaatgacacagtcgatttgtttggctcagacacactagggtttgaggatgacccaggctgagaactttttgcttttttagggataggaatatgaggagaagcatcgatttccctcttgtttttaatggtactcttcatgatttttccctcctaagagaggacttaggcaagagatcctttgtctcctttcctttttgtcattagaatagagtgtttgtctcatttgctctcaaaagtagctaaaagggaagaatttggctaccactcgagatgtaaatctaatcaacttaatcatctttcctttactgttgatgtactactcttttctaagggggatattcagtcggttatgttgtttctaagagctttcaagtgattctcagatacttcgagccttcaagctaatacaagtaaaactgccatttatttatatgatatatctaactctattgtgaaattgatagctttggtttcactcttagtagtattacttttaaatatttgggattactgatttgtgcatcccaaatttctaaagctaattgtgattcaataaaatttggagttcgaaatatatttcttatgcggacatgtgtatcctgattaattctgttttaatggctattcacacattttgggcttaaatcatgattttgtccaatacatttttgaaaaaattaatagtatttacaggtcttttttctttagaaaggtgatgttgatatttgagggccatgacatcttgcttggaattatagttgccaacctaaaagggagggcggtcttgactttagagacatagagcggtagaatgtgggtgctcttagcaaatatgtgtgggacattgctactaaaaaaaataatctttgggtttattaggtgcactatgtgtacattaaatatgttttaaataactataacgacgatcataaaaaattggactaaaaaattctctaagatgctaaaacagaaaatagatatattgataattaaacttcttttaactaatatataacattttacaatttgtccatacattttttttaaaaaaaaatagaaacatgacacacacaattgatgagtacaaataattatgcatgcaattcaatgaaccatattaatattaagtaagatgaaagaaaaggagggagaaggatgatacgatcatcattaaattatggggatattttggatgttcaagcaaaaaaaaatatatctttatatatatgggaatattttatttatttcctcaaaagcttaaggatagacatatatatattttgaggatggagttaggataaaaaattaggaggccaaattatattataaattgaagtaataaatatttcaaaaagtctttattaaatgagatatttttagcaaaattctttttatatttgtatttgttacacatacggttttaattaaaaaaaatgacgtaaaaaaaaataacgtcaaaagtattttatcttatacttttgttacagctgtacctttcagtgtcaaataagcccattaagtactaacttagaaacatgtggtaagatattattgtaccatttaataaataaaaaaaagcttttacatttttttctattttattatttatttaattaatgaaaaactggtttcgtttttctattcaaatttgtttatttttaattaaaaataagataaataatagttatttaaaatgtggcctaataatgtcgctatgtgtttttgagttggcactcaataagggtaagactgtaataaaatcttaagtaaatatatttttactgctatttttttttattaaggtcatatctgtaacaactgtaaatgttaaagaagttcagcgtaaatatctcttattaaattcataattaaaattaaaataaagaatgttttccttgcatattacaaaagtcatcaataagtgaatttatattaaaatttttgacaatttctttcaatatataccagtaaacaatcatttaaaaatttattttatcttattgcagcgtgtagttttcactagattaatagttgaaaaaaattattttgtagtagctactaagccttaaccctatcccatgataaaattttaataatttatagtatttatattacattttatagacaattgagcatatcttgcaaagtaaaataatattgttaaaaagaaaaataaatatcttaaaacacaataaaggaaacgaataaatttttataaaaataaataaaagcaaatccctataaaatatatcatattcataatttatgtttgacaacgatactcaattatcctataagtttaagcacatataatatattgtggggggaccatggtccctctatgtcaaagtgtacgtccaactttgtataccttaatctttattaggtaaatactattttaaattttgtgttttataaaatttatcaatctgatattatattttgttaaatgaaaaattagattctagtttcatttttttgttaatttattttttagtataaccaacctaaaatcaatttctaacacaaatacatatatacaaaaaattaagtcataatctttttaagttatatttattattaaattttactttaacaaaaattaagctcaaagtattattttgtattattttaaaaatataaaatttaaattatcatttaacagaataaaaaatcaagttaataacttttataaaatccaaagtaacatttagtcttttttaaagcgaaattaataatattacacatcaattaataactagtgtgattgttttttatttatttatttatatataaaaaggctatcttttatatttaggggaacgatttggtaccataaattaggattaagtaataaacaaattgttttcctaccaaaatccaaacttgaaaatatagactaagaaaactttgtaaattctttaatcaataacattaatttatggattattaggtctttacttggttattagtccacgcctcaacaaaatgtgttttaatttgaaataaaggaacaattcgattaaaaggcacaaagccaaaggatcaaaagatcaatacaaaatgtacacttggtaaattattaacagagtaataaagacattatactaaaattcttatttggaacttgtctaattaaattattgttttttctcaattaattttatttataatatgtataataataagaataaacaaactaagtttcagttataacaaaactacatagtgtttaaggataattttaatttaagatttcatataattagcttgagcaataaaaatgattatttatttatgagcattgctattaggcaccaagtggtgtctgtcaacttctcgacatgttgcattgcgcttggctagcgatatttttaaaaattattatattaaattatataagacttgataattagttggaccaaaacaatattgacacataggaggctagcaccacgggagcagaactttacaagccaagcgaaaacaaagtcgcacaaatcccgataatcaaatgatagcaaatcacgctgattaaaaattatgaggctaaaacccaagaaagaacatgtaccctaagaaccgataatgattatccaaacaaagaagagacgaaacatatcatccgaacacagacacactaagcagtttgcttcaaaatattacacactttattaatcttataatgatatataaaatgcaaacattttctttaattttagtaggaatatatacatgtcaatataataatgcgtgtaactttaaattaatttgttttacgtactttttggctactaattaaatctactatttttatttattaacagctaatatatagtacatatcattattataaaatgttatggatgatatatctcatcgaatgtggttgatcattaacaatattatagtacttgtatgtttattaattcatttgtagaagtagttgtataatatttttgttataattatgagggcatgtatattatagttgtgcttgtgtgactataattatacatatattttaagggtgagtagcaatttaaaatatactaaataaaaatatagaagatttaatattaatttgcccaaaaacaatataataaaacatttaagtagggtgttatgaatttaaaaatatttcaaaaataatatttgataaacaaaacgaataatgatattctagctagctatagtttaagcatgcatatatacaaaattatctcatgaaaaaaaaaacatgttgccgacttcaacattgtatatatgtatatatatatatatatatatatatataaaatgtgcctgtaaattggtttgaatatgggaattggaagagaatggagtagtgttgggttggggatagagaatattatttaaagcacatgatggtgtagaaggaaaatatggtcacatattatggggattatttataacttctcatgcattatggcgtgggcaatgctacacccataattttagttcaacaaagaaaataatgaaactatacatcataatgtctataaatatatatatatatatatatatatacatcgatctatatcacttctcattattaagtgactggagatcatgtacaaagtccatgaacctgacaggaaatgttcataacccaaaagcaaaaaggtcatgatcatgatcatgcatattatatatccatacttagggttttcataagtaatccaatctaatccacatgatgtaatctaatacaatctgcaaggtgcatattttatagtaaaaaattatactttaaaaatttaatacatatcatacaaatatatttcaaaacttaataaatcaaatacataattcattcttatttataaagaaaatatataatctaaagaaatatttacataattttttttcttcttcctaattaattaatttgttattttttatttaatttaatttaattattattggagatataaaataataatactttaatttattttattgttacttatgtgaaaaaaattatttttttaataaatattaaatatataatttaatattaaaaaataatcaatccaaaataatagattcaattaatttttttttaaagttattggattaaatccaaagtataaaattcacataatgatcaatacactataaacaaaataatagaaattaaattagatcaacactatatataacatcttcttacattttatatatatgacgatgatcatataattgtttttgcagcccttattggatgcatgcccttgtttaatttttatattaattaattacttttgcagtgcacatgctagctatttaaaa

SEQ ID NO: 110594 - DNA, 12263 bp, Cannabis sativa
tgttttcgtgttattttttggaaaaccgtaaaaatgtaaaaaaataaaaaaatattctttaaacgtaaaaatataaataatttacaaaaaatggtgcctatttttttcatattcgtttacgttataattatttagggtaaatagcggcgaaacccccaaaattttcattttggtttcacttaactcccaaaatccacatttaggcggtaaaatccccaatactcgtattctgttagcaatttaatattttcgtccatgttaggtgttaagtgtcatgttaaactgaacacagtgtacacgtgacacaattttattttattatggttgcagtaacccacaaatccgagtgtaaaagtagtaaaggttcattataagttgtggaagaaaagggaaaatgtaatttatgatgtttgccaagacaaaagctatacactcatcaaaaattgttttattaaaaaattggatattacaagaagatagagccaattttataattctagttgtaagttggtcaagcttattgtgccacaaagaaaaactaaatttggtaatgacactaagtgattaaggcagtaaggacttgaagactgatgacccaactcagaaggcaacaaatgagtgacactggaggaggagagttgactaaggtagaatcaaatttgtaaaagtccttgtcaagcttcccaaataaagtggtattttgagtgtcttgacccttgacataacaagaaaatgagtgaaatttaaagaagatattgatgtctttggcaaattgggagatgcttaatgaattttggttatggaagaaacatatatccgattattaagggtgagatgttgagagataaaatgagaaaggatatatgagttaccaatgtgtaggagttgtgggcaccgagattggaccccttgttagatgatgagttgctccaaattctaggtaccaattatcatatgagatcaattcaggtgaagcatggcaagcttgcatttcaataagatgagctattgtaggaaactggttaacagattcaggacatgtaaaagatctttcaaacatatagaaacattgtttggttgtatgacccatcttatgatagaatttatattagaattgacattgtggcttttggctccaagaattaggttgtcctcttccaaagctcggcaaaccagcgcgagctgtagaattgggattgttgtgattgacatgtctagaggtaagaccaccttgatgtatggcattcatcatatgaccaacaccatttgagcaaaattaaggaccacgagaagatccataaggtatccataaactagaaggaaagggattgtgagtgaaaaaattaggtttgaagggtttaatatgagagatatttgcttcacttttgtttatatctagagacttgacattcttgtcaattcgaacacactgggccattagaagtgcttccatctctgcaactatctagttatcatttcttgtggtgcagaggtgacaaagacatcatactagggagcaagaacactaaagattgcctcaatatgatcttgaggtgtcttattgtgaccgatggtagcaagaaaatcaacaattaattcccttaatcttcagcaggtagtcattaagagaaccactcatcttcatgttcataagttgagtcttgtaaagacaaatattgatagtgttaagggttgtgtattactcattgagagagttccaaatctaagaaatattatcacatccaatcatgtgatttgtggttttctcggatattaaagacaataaccaagaaaccaagagattgtcttattgttcctaattctcaaaggcatggtttcttgtattgcttggttcatcagcaagggttaaaaagatgacaagaatttgagttgaatcgagatatttgtgaagacggctttctttgattgaagctaacacttgatgttgccaagaaagaaaattatgctcatcaagctggatggacaagaaatgggcaaacaaaaaaaggtaagattttggaagagggacttgaagaggatcttgaatttgagtttggttcaaacttaatgctccaacacaaagcaagaattctccattaaagaacgattgaaactctaatactgtaatgttctatcaagaatgaggaagaaagaatcgactcttttattcaattgaaagaaattacaattagcatttaaggacttacaggttgttactactaactgttacaatcaatagcaaaccaacaaccgattcaataccaataactagtaacaaataactacctaagctattaataactaactctcaacttgcttactaacattatccttaacaaccatcttcatattttatcaatgatttcaatgatttgaattttttaacagttttaacgaactcaccaagtcatggtactgaataaattttagtaacaaatttgagaaaataatacataaacatagaatgaatctgatcatcgagcatacaccttgagataacgctagcaaattgtattgaaaaagaaaaaaatatataaaaattcaaataaaatataccaaatattttgtaggcaactaaaaaaatatatattcttgtataaacatacctctagaaacgtttaatttatacaaacctattccatcaaattacaatatatttatataggtagccaaaacaaaacaccctaaacctttaaatacattacttacattgtctcaaacgatcataataataacaatggcaagcacgaaacaattttgagaaaattaaatgagtctttgaaagaggcaaatttcaaccgagtgagatgcaaaaaacgcaagataggtgagagcacaaaagaaaaccttaaggtgatatttggcaatgtatgtttcatgttttgcttgctttgctttgctagtgctatgaatttgggtgaagttttaagagaagaaagaggcgtaggattaaaaagaaaacaagtaaatgcatggctcgctagaggttggttacaaatagtggctattaatgggatttattctgtacacattataaaagaaagaaagaaaaaaaaaatcacttgtcaattcttaggttagtacacatatgtccgagttcaggccttgcatccatccatgaggtgaatgttgtatcggctcctttagtgcaatagaggtaggatctaaatgtcaccaggaaaaaatagcgcctgcacacatcggcaaatcattcattcattcatatacacaatcattatcgcgctttatcactttcaactttcatctcataataaatatcatcttcttttactgaaaatacgcaaattaaataccttaaagccttgatgcccatgtccattaagtacgctccctgctcatcatccaaaaccggaaacttctccagttccttgctatagtgaaagatatcatctctcaagtgtccagcacctgcacacctatttacattgaacaaagaaattaagctaagcctgcttcaccagtcacctcaactccaaacaatcactgcaaacttctattttattgaacatacaagcttctcttaagactttcttacctttcaatcacaaggtcagcatctactttgctttctggaccgtacaccagaactcttgtaaggcttaatatatcacggtaatcacccattctgagagtttcttcattagatgcccgactaggcaactcctcgtcagcattgtttatctggtgcatactactacccaaggatgtttgaacttctgaagaaaagcttgcctgagcactaagtctaatacaaataattgccatggcatatgccactcctccaaagcctgtgtgcgatacaaaaaggtaacaccctgcagagctatttaaaaaaaattgttttaagaactgagaggatacatttgccaatgtgaatatccaagaaaagaaagacaaaataatctacgcaaaaggaagacttagtgatccatcacagagaacatcctggatggttgaagagtttctatcaatttatagtgtgtttggtaggagaaaaatatgaaaggaaggaaaggagtggggtttattagatgaacttggtgtatattgggtaggaaatagggagaagaatgaaccaattttcaactcctccaaattagagagattttatgaagaaatgaccataattgttcaaatgaaccttctcatcccccaattccacctctccttcctaccaaacaaatggagaatgtttgatctttccttcttctacccatacaaaacacaagaatgtatgattttctccttcatgctctatttctttcccttcgcaccatacctcttcttcctttctatcttttctcccccaaatatatccttatggactaggaaaaataatcaagccccacatacaatttagcatataataagcatgttattagactatcacagagctgaaagtatttaggatcggatacttactcatctatacagttctggattgcatctacatcagacgataatgcctccctctctcttgttaatggaattctcctatacgtaatattataaccatcttccttcaaagaagcatatacctctgcaggagtcttcacatcatctgcaaagatgttttcccaatatcctatgacactggattgattcaatgttgggttatattcttcacgatgtaaaagtatccgaccacctgacagtctaacttcagacaatatgtcttcttttagtcgttcttccatgtgttccacctgcattagattgcaaaacattggaactatatttgcaatacgactactagacaaaatgagaaaagttttgatgacgtaccacagagccagttattccaacgtgcttgagtgtatcaacgggcttattaagctccctgagtacaaaaggtgttccattaatgtaaacaactgcctcttctctcaaatcagttaatatcactttttctgcagcagagcctttcaatttgggcttagcacctagatatgttagcatttctttggcaccagcaattgttggagttgccatactgtacacagggtatccatccacctgtagaaaatggaagttacgactttacagcacaaaagtcccgttatctatgaaatctaatcttacaatgatcacatgataagctgttcgtaaaaaaacttcatgtatataatgttctagagttctctggtccaattggcagctagtaaatcgctctttaatgaaatatttaactctgcctccataacattaaatttactgtcctgtacttgtccaatccggcaacacaatgactaaagatatttcactgtaatgactcaagagatggaactatggaattaccatatgactttgacagcataataatcataagatgtttgaaacacatccatgtaaacttaccttgtaaacatgtggtgcaccatggatctgtatgttgctagaagttctctgaccaggaaagaaatacattttaagtatagagcctttccctaaaaccgaaccatttcgcgtctttacaattgcctccataactgcatcaccattttgggactcgtaaggtgctctcagttcctcctaaatgaaaaaaaaaatgagggtacatatccatgcccgtaaaaggaaatattgtaagaaaaaaggaaatgttgcaagctaagaaaaatagtaagtctcaagtttgctagtccaagaaagaaggaattacaggaactgtgaagaatcttccaggccttaatcttatgctccatttcattgcttgaacctctgatctttgatgcaaccactccttaaatgtcatcctggattctccttgtccacaaaatccatcaaatgcttcactacccaagtatgctgcaaaagtaattaaacggaagtaccgttccaagtactcggcaccgcggtttagtgctaccctccttacccttggttcaacatgctgttgattgaaaacttttcggtactgaagaacagcttggcgtatgttctgcaaagccgaacatctatctataatagcatccaaggcttcacggcattccactccattatcaaataatcttgttattttccacaataataagatatcatttatgccaaaacttctaccttggtccttttcaatttttacttttgcaacactagaagttgatggaacaacattttctccagtctcttcaccactggaggttccaccatcctcctcttcatgggtcatactatcaagcaaaattttaataggcctaccatgatcaattcgaagtttcaaaaggcaagctattacggtgccagtggttgtccttcctctgcccatctgtaaattttaataatgttcagaaaaagacaaagtacagtacatagaattgcgaattcatttaacatttaaaatgcacaattcatcacagtaagaatgaaaaatgttaacctggcaattgaaaacaaaagcagtatccttggaagacgaagcaatattcattgccaaagtgtcaaagtctgaactttttggagctttaccatcagttataggtacacgcgcatatttaataggaaaaccatcagcctctaagcatttaaaaacctcaagtggagtctgaatagcatcgatatttacatgttcccaagcatcaaatatttgtccatcatttgtttcatgaataaccattatggcaccaccataacgttcagcttctctgaggatatcttctttcagtcgagcttccattctttccactctctcacgatcaatgccctgaaagaagacatcctaattttactttccccaaaaatggacatagacagttagggaaaacatctccctacattctagactagcagcaataatgtagattacacatttgaatatgtatacatactatatatgccacaaataaaaattaccgagtattcaagcatgtttttgtatggtctttcaacctcacggagcacaaatggttttccatttatgtaaataaccggttcctctctcatattgtgccaaagaactggacaaccacttttcgagccaccaattctttgtatcacagatcgtattccatcgatagttggatttgctactccataaactggaaagccaggaacttcccggaaattaggggcaccctcaactctttcaggtaagtgttggttttgacaacctgggcaatgatcacttttcagaacagtttggctgcctaaaacctcaccatttcgtgatgcagcaactatacccatctcagaaggacgaccatcagtagattcagcaatcttcataagggatggcttcaaacttgaatacccaagtgcacccattggatctctccttagcagtctgaaagagcaccagattgcagaaatattattaatgaccaaaaattccaacaataataatgcctaagatatgacctagttcctttgtttgtcaaaaaaaaaatgaagaagagggtattaactagttcatcatgaattgggagaggaaaaaagaggcaacatcacatatggaaatccgctagataatcttcatatattttttatccttactgttttgctttcttgaaataagatatattctacttttcaatatgaaagattgcaatgcctaaaagttgttctagaaacacaaatttgtaccattattttgaccctcaattagcatcaaattcctgaagaaaataatcaccttaaatcctaagaaccctggctaatctaaccttctacaggtgcactttcatccgaatgtagtcatatacctcaacattattggaggtttttaataaaatatacacaatgctcagaatttctctatggtgatgagtctgatgactcaaaacagtcagttgggatcaatgataaaagtaaaagaaaaagcaataagcgacgaaaccagttgggatcacattcaatgtttgccatattgtcaactttattaaattagatatgataagaacttttaatacctgcgaagaatgctatagagttctggtctcgctctcatccagtcagcaaaattgctattaccaacagatttagattgaagggctgatttctctgaatgaatgtagacggcaaagcatataagaaagtagtatctctcaagatactccacaaaaaatgaaagcaacgcctctcttttcatttcatctggttgacgtaaaatgctattgcgataagtggcaattgcctcacgcaagttctgtaaaatttcaacaaatggtttcatgagttcaacagacttttaattttaaaagagcttatatataaatgtatatgtatacatatataaatattttctggcaagaaatggatgaaagagatttcttggaaaaatcagataatttgagaatctcccattaaatagatgtttataaagcaaactgaagtcaaagggtgcagcatgggattgaagagttatacctgcatggaggcacacttgtctatgactttatctacttgccttttcccttcaaggccaccctaaaacatgaattaataatgaaatttttcaaaaagtattaatttttcagtttttttaattaaaaaaaaaaataagaaaagattttaagtacctctaataccctaaccaggcttcttatgacaccatattcccctctacgaagtgcttcttctgtgtttggaaagttgtcagtggcactagcagcagcatctgaaactctaccaattgaattggatcttggaatacctatttatgcaaaaagactaagaatgagaagctaacatcatcaaagcaactgactagagtgtcgtgccgttgccaaatgccaataacaacagaagaaagtggaaaaatatacaatatgttaaaactacaatatgagtgatccagcaaaaacttattaataatatcagtaagacatctgttgttgattgaatgtaaacatgtttgaaaatttgctttccaagccatcacattactattactgatccaaaagaaaaagtctcatttagagcttgaaaatcaatccttacctttgtcctagtttgttcagaaataattatttattgtggatacatgtacactcaaaggcagggaagactaccacttaactgctcaatcccaaattatacatcagaggtagaagagattattaggcaaaatattggtagaatggtctggtattttagatatttctccctccacaactatgatctaagaaacatacagacatgaaatttcaatatgccacatcaaatgctaattgtggcatgttaaaaaccttacaaaaggaatagaattcttcacggctacgtagcttagatactgatccaatactaaattacttgtgatgcgaccaaagaactatttggcattgttccaatctaatttgacgtctaatgtcatctcagtgtttgaaaaaatgttgaagatacatagaaacaacactcgctatttccaatctaatttgacttcctcaaggcatgcagcactcgctagtttttatattcagataaccattctttcactgatcttatatattacacgattctccctcttgttgttatacttatacttcaaataaagggcccttaaccccctgatcattatgatctatttcacaattatgactggacaagtaacaaacaagctattgtgagtgctcttagtatcagtattctgcaatgcaccaacaataggctttctcctgctttaatgttacattttgtggaattaatattattagcaagcataaagtgaaaagtaacagattattgaaagtaacaatgagaataaccaggttaacaagacaagtttttctaaagatatttgtaacatgatgtcaaataatgtaaatacacaacattaaaagtcatatgcacattcattgttcattgtattgatgaataatgattattccaaatattgaaagtaaaaaagagtatagaaagcaggaatgctaccagaagatcctattctgttgagataaactaaagttgcaatcaccatcccagttgtagtccgcccacgtcccatttgacaattaaatataatctttgtatttatatcagcttgagaaattttatgaacctaggaataaaaagcgaaaattagagacaaatgtaaatgttttaccacagaaagacttgaaagaagtgtttgtcatgacaaaatacagtctgctcatataaactcattcttattatctggttgttattatttgagtagaaactaagagttgtgaacacttttaagtgacatgtaggtcttaagtattgtctacgacagaacacttaggcaagctaaaaggaggattcttcccatttcaactcaccaaaatatcaaaatccaactccttgggagatttttcatcagttataggaacacgctcatagtcaactaggtatctgtctacttgtaattccttgtacacctaaaggaaagaaaacaagttgagttatcaaaacaaaatatatttttctttcttgaccccttcttatgaataacatacagtagagatacctctagtggtgtcttcacaaaatcacgagatactggttcccattggtccaccatctggccatctggcaattcatcggtgacaaggatcttgtttccatatctgggatgtcagatgtgcaaacaaatctatctctcattcaaatgaaaaggtaaagaactgtacaaacaatcaccatatttttgggaggggctggttataacacaatatgcagcaaaggaaaatttacctcgcagcttccatgaggatgtcttctttcagtcgagcctccatttgttcaaccctttccctattgattcccttattcaatataaaaggccataagcaagtttaaaacagacagatgttattagcacaaatacgtgaattcttgcagtatagtataaaatttatgaatctatttttagaaaaattaaacatccaaataatcctcctaattaaaccaaatgtgatgggccctggttcaggaacaagtttcaaaactgaactacattttgagagcagaagtattagcttattctgaggtggggaactactataataccgacattactactgagttaaggatgatattcatatggaggtatgcatcttcctttcaaaaatagaagtgtttgcaaaatgcccagaagatatggggttgtttagcttaacattaaagaagaaagtgatatagccttaaagatgttgtattggagttcatgaatgaagaggcaaaaacttttggagtttagaaacatgggagtaaaacataatgttcaaattgcaagtataaaaaataaaactagactttatcaacataccgtatattccaggtttgagaaaggcctttccacatcacgcaatacaaaagggcgtccgttaatgtacactacctgtttgaagaaaagaaagaacatttctttaacatgaaaatttatttggttgggaacaatcacttgtactagaaggctatctggtctgaaatcttttgcatggtcaaagcatcaaaatgctcgtgagtccaaaatttaggttggttgaacttgaaaacgaagctaaaatgaaatagaccagggaaatcgaaattggctaaagaaattaaagaacctaataagtaatggatctgtgtaagaatttaccggctcctcgcgaaggttaatccaaagaacttgagcttcctttccatgaatgtggttgagaacattccggatcccatccatggtgggaattgcaacaccatgtacatgtaaagattcggcctgacggtagtttggagcgccatcgatttgaggagacaatcgtttgttctggcatccaggaaagtggtcgcttttcagaatcgtcttcttcccaagcactgatcctcccctaagcttcataacttgctccggctctttcgccgcaatggacgacatgtcgttttgcgtatgtacgactagctccgcactactactactacaactgatgcagctgccgtgtctgtatatatatatatatatatgtatatatatatataatgtcgtgttctcaacagctttctcagagacaaaaagagacgatttttattgggtgggtggtagaaacaagcttcagtggtttgcgtgtgtgtatgtattgtaattggtattattatatatatgtgtgagagtggataagagaggaatttttgtaaggaaaatggaaatgtgtaattaagagaagagtgagggtgaggagggagaagagcttcaatctattccttcctgacatcacaacgtgaaaagcatgcgctgttagcttttgcttttattatttctttagggaaatttgattttctatacttagaaaatcaaaaaattt

SEQ ID NO: 110595 - DNA, 2936 bp, Cannabis sativa
  modified_base (194)..(211): a, c, t, g, unknown or other
aaagactaaaaaaccatgtcaaaaaacaagacttaaaaaccatgtcaaaagacaagactaaagaaccatgtcaaaagacaagactaaccgttttaaaaaaattgtttatctttttctttccatatagagatataattgagattttatttatatagtaaatgaaaagtaaaagagtaataataataataataatnnnnnnnnnnnnnnnnnnaataataataataataataaaacagattcatctatagatatatatatttttataacctaattgttgaatacaagctcatacgtaagatgactaatctaaaagaaataataagaatggaaaacttagatattaaagacgaaagaagaaaaagcaagtgattatgttccagaagaattactcctcaaaataataggtatattttttaagaatatgaattagaagaaaaaaaattaaaaaaaaacatagtacaattaaaaatataaattttataaaaaataaaaattattaaaattgagtgtctttaaaaaattttgaggtgtaaataattttttttttcttaagaatattttcaacgacattaaaataaaaaaaatccaaccttttcatttcatctcatctaatcaatggataaatatccttaagtttaaaaaaaaaaaaaaagaaaaaaaggtttacacgtggcagtagacacaccgagagctaaaagaaggaataatcacacgtgtaatctcttctcccagctaaaaattgtataaacgtaacggctatattacttcccgcgcaacctgtttaactataaatttcacggactgtactcttctccactctcctactgtacaatgcattaatcctaatcctccttcttctttatgtcaaattaccatattaccccgcagccatgaccaagatcgacgtcctccgtcgttacctcctcccttgcttctgtccggccgacgccgtctccaccgtcactaacgccacccacaccaccaagaaacgcttaagcacctcgcttcgcgacgacttacccgacaactacatttcccaatcaccaaacgacaacgaagacgatcaagattctccatctccatctcctgccatggcggcgcagcctcgtccatccaaatcgatggtgatcggaacgatcttcggccaccgcagaggccacgtctggttctgtatccaatacgatcgtctctccttcaaaccctccatcctcctcgagttccccattctaactcaccaactcgtcaacgagatgcgattcggactcgttcggatcgctcttgagggagacgggtcggatcttgggcgttgcccgctgcgatcggtgcccgtgtggaccatgtactgcaacggccgaaagctggggttcgcggcacggcggaaggcgagcgacaggattcggttgatgctgaagacaatgcaatcgacaacggtcggtgctggggtgatgccgtccgggttcgggtcgtcggattcggaggagataatgtacatgagggctaattacgagcacgtagtagggaatgctgactcggagtcgtttcacctgatcaacccggacgagtgcccgggtcaagaactaagtgtgttcttgctcagatccgctaatggagtttctcattgaggagtaggggtattttcggtaaagtattaagaatatacctatatgtatctatgtgagtctttgcttgaggctttaggcgatgaaaactaggcgttttttcaacaaaaagacaaaagacgaaaatgtaaattagaaattattttatttcttttttttttttttttttactgattttagaagattgtaatcttttgtacatttgggtatattgactatacaatcgtgttaaaaaatcaagtctttatgagtaagaaatctttatgtatatatacttgcttcagtgtatgattgaaattgaagagagaatacagaaatgaaaatgtttgttctattgctttcttttttcttttttttttcttaaattttaaaagcacaacatataaaattttggagcaacaatctaagatataaatgtataattttctttccatatagaacttgttaatttttaggaaacgagttgtgcataaagattacagagagattttcttttagttgatgatgactatatttatatttatgtttatagactaaaagcattgtcattagatataagtggtctccaatactttttataggtgctttaaaattagttagtaatattctttaaaaattaattgcttaagttatatgaaacgatcaattgaaaaagatagtaagttacattttagcaattctatgcattaatgaggatttcatataattaatattttttgtgttaaaaatattaacatttcttcgtattaaatcataaaataaaacatagctataaagtaatattaagataattaattactttagtttcttatcatttactaataagagtgggttattcaagtttgttgatgagtaaaaaaaaggaaatagaaaagattgtgtaaataaataaaataataacagtagaaggagaaaattaataaatagatgtatatatgaatataaatatacatgaataatagccgtacaaaacctgagacgaatgtatacttggatttaggtgtgaatgaataaagataaaagcagctaccacttgatttctttacgaagatagggttcacctcgaagagatacgatacgctacctctataaatacactcaccaaagctatcagctaaaaggacagacagagagaagtaaagaggaaaagaagacgttcagtcccatcaagcttgtcttattaatcttcatagaaattttcctttcctttctattccctttgcttgtagaggctgtttgtaagcgtcgaagtataaacagcatgcttgcatacaaactctcttaatctttcatttcaaacctttcagaaaagataaa

SEQ ID NO: 110596 - DNA, 5306 bp, Cannabis sativa
aaatgatagattttaaaaaagaaggtaaaaataaaagaagacaatatgaaaagggtatagagtgtaatttcctcgaaaattggactcggattcaaaaatcttggatatgttgtacctattgcgcattacctccatttagtatcacttgggtaaccacaatataccaatccatatttcttggatatattatcaaatttattaattttttatttctaaaaatatttttaattataatttatataatatttaaataattaaaattacatagattaatcaaaatatgacacggaatgatagtttgctgggttttgctccaaaatgtttttctttgttgtgagggacaatttgagtaattttgctgtaaatatccctaaatagatatgttaacaaaacaaaaaaaatttaaaagaaatgaagaagaagcaaatttaaacaaataaactaattaaacaacatttattattatattccatatccccatccatatgaatatgattgtcatattttcatcaccataattagctagttaaaaaccaaatacccaccaccatatgaacacttagtttcaaagaaaataataaaataaaataaaacaaagattaattacccaaccaacccaaattaaactaatacaccaaattaacaaaatatcccacccaataattaataatacatgtttttttttttcttaactaactagccaattagtaaacaaaatctagaaaacaccatatacgtacccctaattattaagttctttcaagtacgtatccaaaaaaaaactcgagagttaatgatcatctcatcatcctcatcatatcaattagtattgtaatgatgaagatgaagatgatgatcaataattttttttattattgtcaatgtaaggttgttgtggctcctccgtcgattacatcagccggtgggagaaatgagtcgacggagagtcccgggacattgaagacgacgtcatcaatgttccaaagctcttccattctagtccttgtgtattgcatggagagttctttgcatcgaaagattgtggcgatggatcggccttggtgggcgatgagaagaccgtcgacatcccggtaatcggcaatgctgctgccaatagtggtttcccaatagacatcttctggtgctgatgctaatacgacgtcgttctgatcaggagactcaaccctagttagatgcgaatcttctaaatagactaagaggccagttttttgacagaagtatccgtacaaggcgtgtcttataacctctgcatggccctcgcttcgttccatcacagccgcacgatctgcacacactttcaaaacgaaacagttgttctcccctatttgtttctccccaagacattgtgcgttagcaaataagcttgctgtgctctttggatctaggccctgtaaaaacattatcataaataaatttagtaggttatagtaaaaaaaaatatttttggccctaaattagaaaaaaaagatataatatttttcaaaattaataaaaagaattgtttaattttaaaaaggaaatttttttttgggcccctaagctaagtgggcctttagtatataggtttaacctgtctatctctagggtcgggcctgcatattatagttgattggatcatataaataatgtagaggaaattacactctataccctttttatattgtcctattttatttttaccttcttttttaaagtctatcatttttaccttttctttaaatattgtaccaattatgcccctgtcactctaagatactctccatgtgactctcttatgtcagggtattttgggtataatacatacaaaaagaggtatgtttcaaataaatatataattagaggtaaatttgattaattgattaataaaaggggtatttttcaacttaccccaataatataattacactacatacctctttaacttgatgcttttagtttttactctctctttcaaaatttattatatatttacatctttttcaattattttactaattttattcttatcattttatgatagttttcattcttctttaatcaaaattttgcgtaactttcccacaaagctacacatctatttacaaataacacaaatttattatatttaaaattatgtatgttagttatgttagttatgtgagtgtgtgaggttatataatttgggtatagtactcataaaaaagaggtatatttgaattaaattttatttaaaggtaattaatttggttaatgtataaaaagatggtatttttcaacatgttgtatatatgagtactaattaattggactaattaatgttgagtttaattaagaaaaagtgaacattttttttacactaacttaataagaatatagaaacaatttgcaaaaagccttttgttttattttaggaataaattccaagcaattcggaaattaaatcttggtaacataaatcaaggctaacaaaatctacataagtagtgttcatttagggatgctgatatgctaataaacaaataggaaatatattcaaatacgtgtttaattttctttttgtaataatttaaaatgaatagaaagaaaaagagaaagacaataagtaaaggaggtgattaataatgtagtatagattgcagatccgacacactaaagtagagaaaaagaaaaagtgaaagcgaagagataataatatgtagacacactttgggacagtatatatgagtttataatcccaacgtttaagaatatatgtcatttgaaaatcagaaaaataaaataaagatataaaaaaaaaaaaacaaagaatgtgtggatacgatatgaacatgttacatgtaaatgtaataataatgtttatgattacgtaaagatgacgtgaaaaggtgtaatcatcacgtggttgctatatatatagttttgtataaaattaaaacctgttctttcaacttgaattaattttcaaaagaaggaaagaccagtcccaatagtactgttgggtaaagcatgagacagtttctccatcattgtcagcatttattgggattgtgatacatgatttccgatttgttcttatatcactatcatcatcatcctttggtaaagcattttttgaattatttttattatttaaaatatcccactttcttaatttctttctcattaattaattattaaaaagctaataaaacccacaaataaacaataactcctgactaacaatggttcagtataatatgtatctccatgaataacatgcaaaattattgtcacgtaccattgttattagacaccagtaatgtttaatacttctaaatatgttattttgtgattggctagcaataatttttaaaaattattacattaaattatatgaaatttgatacttagtcgaattaatagcgatattaatacgtaagaaagtgctaaaaactgcacatttctcattaaaaactatgttgtactactacaccataagatataattagcaataaatagatagatgggtacctgaatgatgcggcgaaggggacgctgggggcctttggcagcatgagcaccaagccaaggtgtgtgtctccaaacggtcttgccgtcactaccggcgacaaccttatttccaccgacgaccaattccaaggaccacattccaggcatcatttgccaaagaacaaaacaaccattttcaccactcctagtccctaaactctttacgtttttaccagtcgaaacctcagtttcacaacaaatcattttcacacttccacttacgtacatgttcttgttacatgacttttgttgcttcaaacaacctgttgatgccaaatattgctgtataatatagtgtgcaatcgaagtctcctgcaccaaatcaataaataatttattattattattaacaaaaattataaatatataaaaagaaaatgttacaaacttacaaatggaatgcctttaagatgtaggagatgatcaatattggggtcattgacttggggtattggagcaagaggacaacctaaaacgccaagcaacaaccttagatcttgtctcttggctaagatattattattgttataataattattacaattattattattattattagcgtaggaggatgggaaactagtactactattgctatttgggttgttattattataacccttttgagctcgaaaccattctctaataacttcccatgaactctccttcttgaacccttcttcttgcatttctgggtcaggaccttccatcagtggtgtcaatggtactaattgtgttccccacaattgcttttttcttggtttggagcccattaataataattatatataattggatacagagaagaagaagatgatgatgatgataattatgagttatgatatccaaaggagagaatgaaagtatatgaagagaagtataaggcttaatattaaggaatataaataaataaaggggttacaagtgggaagagacaaaagagacagcttacctgtcccaaatagcagataataatattggtgtattatttattataattattgaattatatatatatatatatatatatagatatggatgcagatgcagtactagtagtagtactatacaatacacactctcatgttggcctgtctatttgctttattcttcttcttttagactctctttctcatttaatttaataatttgttctcttttcaagtatcccaagtatgaggccccatatgtttttgacgccttttctttttcaaattcacacacatataataaataagtatataatatttcacctctttattgatcttattctaaataattaactagttttgttagaacattattgtaacctcaagaaagaaataatctcaacagggaaaaaaattattgaataaaaaattattgactaaagaataacaaaactttggatggataacctagccaccaaacaccatagtcttacaacaaagcaagcttatagataaagtattgagaaacaatgttatagctaactagcataatgggaatatatatttatatatctgtataattacaattgacatatattgacatctctaataatacgtaattataagtaagaatcatcacattcacatagctcgaatgacattcacaaatagtatgattagggcatattaggaaactcaaatttaatgttaaattaacaccaaaaaatatatatttcaatactaaattatttttcaattccaaccacaacactaaaaattacaccaaattttatattctttattattttattaatataataagaatat

SEQ ID NO: 110597 - DNA, 3475 bp, Cannabis sativa
  modified_base (1463)..(1471): a, c, t, g, unknown or other
  modified_base (1546)..(1546): a, c, t, g, unknown or other
tgaaatattaaaaattattaatatttggtcaaaacatatatattgtcaaattaactttattaatagattaacacaatttaattatatcttgaaataaataaataaagttaccatattattccttttccctatccaataatggtcggttgcctaataaacttgagtttgatcaagatagcaaatagctataatatatcttgatcatccaaaaagacaaagtaattagctataaaaatcgatcgatgtataattcaacaatattaaagctagtttcctttcaatcattacttattgtcatcaatcaaaggtatttaatttgttggaccaaaacaaattattattattatgaagatgcaatattgtaatgtcaagaacagtagccgttagattattaatttctttttcttttcttcttttcccttttctaatatactttacctgaaacagtagaccaagattatatatataaagattatatataatctgtacttataataaggatttttaggtggcctaatcatggtatatagttgaaaccttggtttgttttctcatccaaattttttttctttttctaaagaataatatatataaacattgatcaatagagactgctacttttttgaaatttcaatcccaatgggacaggatatatatgggagagtctatatattatatataataataatgaaatggtaatcattgaggccccatctttacagcaattgataccaaaaatatataattggtcaatatatatatatttttttttgaatagaaaaataatatattacctaagaagaaaaaaaaaagtaaaagctgatttcaatagcaaataatgtttaactgtataaggctaagctagcttaattaatgaattaacctgtaattggtaatggagttgttttaaggttagcctttcgaaaaagtaataataataatctgatatcagatcaaatcaaactgtataataaataaataaattttcaaatatttatggccaaaattgtacaagtagtgattattaggtcacctaagtaggacgccctagtttgttgaatcttatgggccacttatagtacgacacatagatgattatataacaagtgttcttcaccatacgatgtacccaaaaatattaatattaataagagaaaaatgccctgtttattacactaataattattgttcttttttttcgaacaaagcctaattattgtattgtatcactcctatatttttgtttttaaaaaataaaaaaaaatatgattaaataactattattaagttggttatacttaattaaaaattgtgttgtgactcatttagtgagaaatttttagttataacaaaaataaaatttgtaacttttttagtcacaatttaaaaagtatttaattgtgactaaatatggtattaattagatacaagttgttaaaactaaaaatacatttagtcacaannnnnnnnnatttttgtgactaatactttaatcacagactttttagtcacaacgtaagaatgacaatttataattagtcacaanttttttacttttagttacaagttttgttgtgagtaaaagtaatattttttgtagtagtatttttttttaaatagatattagaggacatactagtattagacattattagtgccttttaacatttcttgtagtagtcatataatagggacaatgtagaaatatttatatttttggtatttcaaaaaattatctattattaactcttttttttttttggaataatttctgattattgaaagcatagttcaaagatagaaaagtttcaattataacttctctaaaacttctctaagcgctaaaattagaaacatcgtttgacaatgaaaatgttcctatggtaaaattttccatttttattcacttcagaaaattctgtaagcaaattcactacaaattttttttagtgttagtcacaataaaacttgtgattaaaagtaaaaaaattgtgactaataattataccaaattagttattattagcagcataatttaaatttctataagttttacaactgcccaacaaattagagagtccatatatagttagattgttgctggtcctagctgatcgtgtacaaatttggctaagacagtcagtcaaaatcaaacataaaatcactgaaagctagaaaactcataatatatagtaattcttaaagaagaagaagaagaagaagataattgaagagtgagtatagcatattttgatcagagaattgggctccatttgccagagtacacacagaaattgtttgtatattattattagccttattgagcattttgtactcttcccaatttcatcacaccacacattaaatagttataaccttatgtaataataaaagagacaaacccatctgactttgtaccatatagtatccaatactttgctcattaattaattcttctaattcccaacaacaacatgtgaagattgtctctcaaactatatatatatataaatatgtgccttagttaattggtgtttttttgtaactaataacacacacagttagtcactgaggagagactacaatactactactactactgagtaatggccccataaaagagcctaatggccagttggtaagggaacattgacaataccatactaactaaaatctaaaaacacttacaaatcacactagctagctacttccactgcacacgtgtgtgttggcttttcaactagccaaaacccaaaacaaaacccttctcttgtctctaataaaaaaaaaatctcacgtgaggatataattgtaagttgtcaccatgtgacctctaatatatttaaatattataacctttgtctctaactataaactaaactatgccagccatagctattacttattagctatagctatacattttctccttttgagcttaactgattatttacttaataaatgctgtatagtaactaagtcttttctgggcccatcaatccttgggaaactgatgttcttgggctcctctgttttgggtttactgttcatagtttgttttgggttttccttttgttatgagaatgtgtttttatcacttttgtctttctaagagtttgatttgagaaatgctaaagatcactctatagtagtatctaacatcctatattattattaaggaatttttacataaaataccattttttttttttatgttttttaacatttatacggtaccataatttcagtttttaattttaccattttttttaaacttttatacggtttctttattaaaaaattatatcatatacggttttggtttttatcatataacttcctacacgcttccctctaatatgtcaaaattcaataacttccctgtcagttaccattatctaacccactccctcgatattatcattatattttgaatttcatattttatattgaaagtcctaattactaccagttc

SEQ ID NO: 110598 - DNA, 4155 bp, Cannabis sativa
gagagagagagaatgattaggagaaggagaatgagagagtggaaaggaagaatgatgaaagatgtgcgattacaatgagaagagggagagtcagaacttaaagagagagagggtgaagtttgaggggtggcaaacgagaatagaaataaagtttttaactttagatttttacacaaagtgtctaaaattatttattttattttaatttttacaggttatgatatatgattttagggattattttttcttatttatatttttaccgatcctcatgaaaacaacatgaaaataacgtgtaaataacatagtacaaaaaataaaaatgatgtgaaaaagacataatataataatgatgtaaaaaacaacataaaatcaggagtccgtgcttttatataagaaaaagaaaatcaaataaaaatattaaaaactgtaaatttgtaatttttaattatttttgttattttgaatatttaaaaaagttttccttttaatttttggaaatttgattttttttatgcatatttgaggataaaattaattaggtaaactagaattgggtgaaattgataatgtgtgtccactttctataaaccccaaattacccctcacatttcaaaatcatttccccccaaactgtttttgtttctctcgctctttccctcttgcccactcttcccctttctctagctctcaccaaactccatcgatcaccgaaatcactgtcaaactttggtgaccaccacccacgaccctccctctcactctctagttctctctcttgtgtgaccaagatcgagacccacaacccttcccctctctctgatctacctggtgcgtggccaatgacccatgacccacgacccacgacccacaatcaccaccgtcgaactaaaaaacaaacgatatatggtttctttgtatttttgtatttattgtttggtaaaaaatcaaatttttttgaattttgcattttcagtgatttttttatatatggtatgattatgtacgatagtgtctgatggttggaggttgggaatgaaagttcaatgatggtctgatgcaggcctgatgcctttctattgttgaaatgagcaaaggtttaagatgtaggttcaatggtggtccgatgctacccataaatgtaagatatgatccaatgatggtctgatgcaggtccgatgcctttctgttgttgaaatttgtaggttgtggaagtaggtccattggtacccatttttatttttatgaataataatatataaaaaaaaattggtagcattgtgccactatcggacctacatcgaacctacatcttcaactttacccatttcaacaacagatggccattatacttgcaatggaccaccatcggacctacatcgaacctactctaaaactagttttctgcccaaaatacaaattcgaccaagcgtaaccctaaatcaaatatcaactcatagatcatagaaattcactatacattctaatcctaaataaataaactcatacaggtgtctccattcgtggttgaggaggagataggcgtgggctcggacagattgaaatggagtcaagagggtcagtcgattagttttttagtgggtcgagtggtctaggatggtggtggtggtggcgtggtgttggatggtggcggtagtcctggatggcagcggtggtcttggatggtggcggtggtcatggtggttcggttctcttgaagagagcgagcgagaatggagggagagagtgagttgaaaaatgggaggggtaaccgcttgaaaaaaaagaaattaaaaaaaacaaaaaaccaaaaatttgttttaattgtacgttgttactcatattttcttttagtgttaaattaatgcagtgttattttttatttttgacaggcaaaaatgaaccagatttatccttgttattattcaagctcagctttgatgtcagtaatgggattaatacaatcagtagtttttgccttgtgcacagagagggatttgaaccaatggaagttaggttggaatatcaggcttctcactgtggtatactcggtaatatatttatatttttaatccttaataaaactagtatattgatcagcatatttgtattgaaattgctaattatatatactatgtattaatatatagggtgttacagcttcaggattagtggtgatactgattgcgtggtgtgtgaaattgagaggtcctgtgtttgtctcagttttcaatcctctcatgcttgtccttgtagcaattgctggctcttttattctcgacgagaaattacacttgggctggtatgtctatctgtgcttgaatatttttgttcatcaaactcattatatatcttataactttgaactttatatacgtgaagaacaattacatatagatgaacactttttaacatcaaattatactttataatactaattaatctaaaacatgaatagtcttaagtggagagcacatgtacaactaaaattatgtgttagagtatatatgagaaaattaacattaatttatgagatttatttgtgaatactgtttcttaatattgagccaatgattactccaatgaaaaaaattaaaaaaaaaaattattcactaacaatttggttaataaatattcatatttaagataagggagatataaatataaatatatatgatctacatattattacaatttattttacatatatacatcttttttataacgtgcaaataaattaccgtttgaacaagaaaatggtaattctatacatcagtgtactaccgtacatcaagaattaataaacattcataaacaacacaaaaaattaagatatgtatagtgctgcttttattaagaatattataagttttcttatagttgattgatatacaattattgctacactatgtgagttatagtaaagatttttaatgtatttatatatatatatgttaatatataaatatttcatgatatcatatatacattgacataagagaaatacaacagtgtattaggggcactgttaatagtgtttggactatatctggtgctgtggggaaaaggaaaagagatgaagaagaaagttatagtagcaataactacttgaaaaagctgtggtgatcaaccagctgaatcatcatgttgtacagtacttgctcctactaataatcccaacaaaataatattgttcaacaccaacaatatttaatggaagcacatgaacaattgatgcatccaaataaggatttcacatatgtcaaatttatagctcatctgaactgaaagggaacatcatcaagccaaggattcgcaaagaacataaacaaattagtaaaataataataatcaaattttgtactttcgcacatctacgtatcatataggtcttttccaattttaatcatgtgcggaaaaccaattgaagcattaatgaaatgatatatatatagggaaatatcttcttcttttttttaaaaaaaatgagctataatacattactttaactttcatttacaaccagcactttttttaattcctcttgtcttatcttctttaggcattgttggtatgactctatattaatatttaacattagctttaattttttttacaattgtatttatagtttgtaatctttggttccaaaaagaatcatttaattctattccaccaaataatgtatatagttgctgccattatcgaagctatcacaactttccgaaacttgctcaatttacttcgacgtattatctttatcaaatcagccactaacatatctattgtccactccaatcacatctatattattgtcaaacactgttggctaaaatgacattcaaagaataagtgggtgacagtttctatgtcattcccacataataatcatatgtcatctttacatatattttgaatttaaaaaatcttaatttcacctgcaatcttctaataatagccaaccacatgataaatatatgtttcggcttatttagccaactccaaatcatatcattccaatgaacagacgcaaaagatatatatagaattatatatatccttagggttttgtattaatcgactttttattttgttgggattatttttcttagtttctatgaatgtattgttggaatttattttacgaggatctta

SEQ ID NO: 110599 - DNA, 2691 bp, Cannabis sativa
tcttaagtcaatacaaataacgaggattaggctattaccgaactgctcaaggctgaacctctataaaattttagtatctttatttgctttattatgctatactcgtattaaactatttgtcgcttacaaattagactcgttgttgttggctaaaagcgagatcaacaatatgcattgctcaagtaaagctataatgaagaagatagagctaaaggtattttcaccaaattttgcttaactcacgatcttaaggagaatggctatattggtgtccaacatattcaatcaagtgtcaatcttgcagacttattcataaagttactaccagcatcaatatttgagaaggctacatacaagattggaattcgtcgtttagaagatctcaacgaatgcctaaatgagggggagttaattcacactgcactctctttcttttgaccaagttttttcagcaaggtttttaatgagatagtttttatggacatccaagggggagtgttatgaaatattatttatggatgcccaaatcaccaaattaattatcaccattaatgcttgattgtattttccttttattacattgatttagtttcccattctttcagtcatacttttgtataaatagggattcaccccattggaataaacaactaagaaattctcattcagtttctctttctctcttcattttcttcttatctattttatattattttataaccttccttttatactttttaattttaatttgatgactattattgtgcttattatgacgtaatcttattttctagggttttaatgttgatactccattataagtcaatgcaattttcagattattcttattcattgtgatttattcaattcatgtttgattcttgtgcatgcttgaacactatttacattcttgatgcttaaaagtggtaaacaccagctcgctagattggctagatgaataataaatttaagtaaataatttataaagacacacacaacttctagtagttcactctccatgttgtgatggtaatggagctatgtctacttagatattttatttctcatgagaattacaagaaaattggctaagtgtgaaagctttgatttttatagagagaaactagagagagatgctctgaccttatgagtacttttttttaatgtaaagaatgagtttacggagctctcattttataggaaaggaggtccaattaaaataaaaataaaaatatccaaaaaatatggaaaaactcaatgtaggatattttgactgtagacgatgatctaattatgaaattgactctagaggtcggttgtcaatttctggagcttaagtcgcatttgtgggaccaactttaggtaagctgtaccttaaattcataactctcttgaaggtgaaatttggagtccataaattcagatttgcgattggactgtgagacatgacttcataaaaaactgaaatagcttcgaaatgaaagttgaatcacataatttggataaatattgagtgagttaagaccgttttacttaaggttgttctattcttagcgcccaagttaacatcccagtgcccaggttgacattgagcgcccaagttgacatgtgatgtcaacacatgtcaacctggacgctgagtgagtacaaaaatgcaccaaaaatgtattttttgatgcctgagtgatattttgacataacttagcctatttctatattatggtgaagcttgccaccaattctcagaaatgttgttattctatagaaacataaactcaaaactacctgatttctaagaaaatcaccttgttgaaaaagtaaaaatatgaagttgtgaatttaactcttttgacttcatatctcttagtcactatgaaaatctagacaaacggtcgagactgaataaggatcggataggtagaacccagcgtacctggccacatgtcaaccttgacactgggcgcctattttggagcttctaggatgtcatttttatatctccaagggtcttgaacgtgaggacaaggactctcaaaccattctttttgaaattttggagtgaatgctaagagcaaaatttacattagagtgatcaaaaccagcgcaccaggttgattgtcaacctgagcgctgggcccattactaggtcaacctaagtgatgggctcaatttcgatgcccttaggattttcattttctccgcatgtttacttatatcttttttatttctgatgatggaaaaaaatgcctagaacactttccagaaaactaattagaaatagcccaagttgacaatatgtcaacttcggtgctgggcctagtgccaggtgtgacaatggtattgggtcaagtttcatgtccttaaatggttttgttttctccctaaaaatagttgatcataatctttgacaaaaatggatatgcctggaagacttttcaaaaaaatcctcgaaattaacccaggttgactaaataggcattggtccattaatctggccttaagattggtctgtttctttcgctggaagaacttgtttcccaatttttgaagaagccaaagaagatgcacgagttaaatttttgttttgatacatggaagtggctaaagttaacaaattgtcaacctgggtgctgggtgcccatgttaggttttatgccccaaataaaactccatttcaatgtaatctatttt

SEQ ID NO: 110600 - DNA, 12090 bp, Cannabis sativa
  modified_base (11592)..(11592): a, c, t, g, unknown or other
  modified_base (12045)..(12064): a, c, t, g, unknown or other
taattcctcctgtgccatagtagaatgctgaagtatcatctgactaaaccaatcccaaaatgatgtccaagacactgagaccatatttaaactcgacctctgccaatataatacaacaatatttatttgtgattaatcgtaaaaaaaaaaagcacatgacatgacaagtaatgattagaataacattgtccgaatttgatgaactgaaatggtctaaaaactcaagttaggattttgtctgaaattaattccaaacattctgaaattggaccaaactactacagccctaaaattgttatttttcttaataaaaaaactcaataactgaataaatattaagtgtgattgcaatttatccagaaaaaaaagtggttcacacacataacaaacaattaataataacacttacccgctattaaaatctcaaggaattgaactatatgttatgaaatctacaacaaatacagtaacacccttaactaccacaaatgggactttcactaaaattttcttaggaattatctacatacaatgaattttaaacagattcgaatttgtttgattcattttccagggataatatgtttgaggatgttattgttcttaattttaattatataataaataaataaaaaaggttagaaattgcagttaacattttctttcaacacgtggcaatacataaaacaagacaacttttgagaaaacaacgaagaaaaaagaaacggacaaagaaaaacagcccaaaaatatttatttattttctaattctctgcagctgcatcaacagtccacatgtacaaagcaacaatattaatccacgtgtaacatttcagaatcaactgaaaatactttcaaatctacaattttatttaattggctgatctttcaaaaaaaagttgcaaccgtatacacctgattatgataattcatatatatctaatatcttaccgaacaaatcggatcgacctcatgaactttccgtttcggatcgaacgcacgcttccacacgagaattctccaaagtccaaatgccccttagctaagcgcagtgcgcaccctaccaacgacgcttttaaccttatatcacggattactcacgtaagctcctgttttcttcttaacctacgccgctagtatgcgcattacgccccactgttctattattcacccaaaagaaaaaaaaacaattgattcttcttctttttccttactccaaacaatataaatatactctcagaatatccaaccaaggaaaaagaaaaagaaaaaccaaatcttgtttccgtttaatccctgtattcatgcatgtcgacccaaaaaatggatccagagaggtccatctacggtgcaatggccggtaactttatgagaccgacatgggcagcactgcttcttctcttgacagttgttgctgtggcgtctttgcaaatcacgacgaaggcggcgtttccgaggttcccggttattcccgttccggcgacggcgctctcttcttcttcgatatcgacgacggatgattcgagaagctgttgtggatttttcgagggggttcggaggaggaaggtggtgatgtcgatcagggatgattttggtggagttggagacgggaagacgtcaaacaccgaaacgtttcggcgtgcgattgggttcctgaaacgttttgggaaggaaggtggttctcagctgaacgtgccgagaggaaggtggctaacgggaagttttaatctcaccagtaatttcacgctttttcttgaggacggtgctgtaattgtggggtcccaggtaagtaaaagctgtaacttttatttgattttttttgagagaacttttatttaattttaatcccaaaaaacattttatttaattttgactttagttacatatataattatggaagatttgaaataattatacattttgtcaaacttaaaattcaatgttttgaaatattgcttttggacttaattccacacaataacacaactattatcatatcaactgtgtaacacattttagtttgaaagtttcacataatgttttgaaaatactttaataattttatatatctttgctcttcttaatataaaaagaaaaatgaaaattatgtacattatcactttaattatgtaataaagaatagaaaaaaaaaaaaaaaaacaaatttagaaagggagaccgttgtttatttatttatattgtcttctcaaaaaaaaaggaagaagaaaagaacgaaaaaagattctccgcgtaggagtgcactttagtcattactggttatggaagaattcacgtgctggcatgctattgtttccattgagcaatttccattagaaaacacagaccaagaaagtgggtgtactctattgtctactatttattaaatgtagagtgatacccatttcaagaactgaaatcgttttgatgccaccacccttccgttttccaacattattattagtgtcacagcaaaaaaaaaacacattattattagtgggtaaaccttttttttccttttctttcttatttttttaaaagactataattgtgtgacttttacgtttttgacttgggttagtttggttttggatatgtataacaatgaatgattagtatgtaaaaagcatctaatttaaaggggtatcttttagttctttaataatcagtcttgaatttatgttttatttttttaattgattaataggaccctgaggagtggcctataattgagccattgccttcctatggaagagggagagagagactaggagggagacatataagccttattcatggagatggtctttcaaatgttgtcataacaggtaattaactatagagcatttctttatctagcatatatactatagattgtaatagtgcttgacttttttttttatttaaacatttatatatttatatattgtaatgcgcctaacctaaaactcgaactacgacttccaaatatataatctatagtatatatgctagataaaaaaatactctaaaatctatagtatatatgctagataaaaaaatactctataatctatagtatataactatatatgcttggctctttgaagacgtgcaaaatatataatcatcatggatattaaatattattatttctgtatagcaataaagcagtagatatcccattcaaatataaaataggaatatacactttagtacaaagcctattgctatcaaaatatctttattttgattttccgacataatatatctaaacatatttataaaaattcaaattttaatataagttttctgaaaattaatattcaggtttgaaaataaaaaatttaattagctaaaaacctaaaacaaaaatattaataactttgtttattttcttctccttagattttagttgaaagataagaaaaataacaatatttttgtaaaaaattaaacgacttattattatattattattgttgttgttgttattatttatttcaacgtataaaaatctaaaaagaaacaacattattaaatatttatattagttgaaaagaaatttattaaaaattgtgttcaatgtattcataactaattgacatagtatctccctttcaataataataacaattaacatattattcataaatatgtccttgttgttttctaaaacagaaaacctatgtggcccaaaatagatatatccaaaacctacttgtgtatgtaagtatatgaataaagaaatagcttcacctcctctcacttttgttggttcaaacatttgatgtactgtgatataaatgaagaaataacttggcagaaggtgttgttgtaacatataaatattggttagacgaaagttgtaaaatatttattaaaaacttttacagacaaccagaatactcatacaatttgtatacattaatttggtttggtgatgtgtgctttacaataccagttggtaattttaaattatgaatgctgtgtgtttgctgtgtccaatagagagttaacacgtcagatgatgatgttgtggccgtttgcaggagagaacggaacaattgatggtcaagggaaaatgtggtgggaattgtggtggaatagaacattgaagtacaccaggggtcatcttcttgagcttatgaactctcacaatgttctcatctctaacctaacactcctcaattctcccttttggaccattcaccctgtttactgcaataacgttgttatcaagaatatgactattttggcccctttaaatgccccaaatactgatggtatagacccaggtaaatgctgtttcacatcccaacactcacagtcaacatcattcttgataataataataataaacctttcctttttcaaactaaaatctctttttacatgactgttttagattcaagcactaatgtatgcattgaagactgttacattgagagtggggatgatcttgtagcagtgaagagtggatgggaccaatatggaatcattatggctcgtccgagctcaaacatcatagtgagaagagtctcaggtacaactcccacctgttccggagtcggaataggtagtgaaatgtctggtgggatttcaaatgtgactattgaagacctgcacatctgggattcagcagcaggggtacgtataaaatcggatcagggcagagggggttacatagcaaatattagtataagcaatataaaaatggagagagtgaagataccaataaggttcagcagaggttctaacgaccaccctgatgaaggatgggatcctagtgctgttcccaaagtaaagggtatttatttcaataatgtgattagtctgagttcaacaaaagctcctcaattaaagggtattgagggggcatcatttgaagaaatttgctttaagaacttcacaatgcttggtttggcaaagtctacagcatggcattgtgagttcgtgtcaggttatgctaatgaggtgtttccagctccttgtcctgagttactaaacaatgcctcttccttgttgtgttcatagcattgtgcctatgaacgaattcagaatgctatttttgtttcaatatggagggctttctcgcacagttatgcactggggtggttgcctttgctccgagcaggttcaaatgtgaagcagtgtaaatatggttaaagattgaatggggcgtgtacctagagaaccatcaagttttgtggatgaagatggtaatttctcaaggacacttggaatatggtttgtacagatgtatcttgtgttccaagttttcatcgtctggtttaactgttttgagtttttattttgctgatacccttcccaaaagagaggattgatcacgtatagaggctttcagaaaagtgattacaacattgaatacaaattaccatttattttattaatttattttcaagcaaatattttggttccagacatcatttttgtacaagatgggcttaaaaatttatggttaatctagattcaggtggatgattactcactggattttagtgaggaatggaaaaaataaaggaagtgtaaagaaaaaaaattgtggagaataaaagaaattttcatgtttgcatggaggctagtgttgaatcatgtttgttacaatccaaatatgagaattaatttttttttttatttatttactttttttctccgtataattttcatacatttttctttccttcaccaaaatctaaattccaaacataaacctcaacaaatttgctgtatggtgacaaaattaggaaggaggactaacttttttgtttgtgcattaaacaataaaatctaaaagttggaaaaaggaaaagaagattacaagaagaagatataaagttcttttgataggaaatttaaatacacgaggaggagaataaatatgtaggggagaaggaaagagttgagatctttcaccatttccagaacacattagaaccacacttgtatttatccttaccttcgcactccaaagccaaatcatcagagataaatggcactttctgcatccatcccacaaaaaccaaatcaaattgcatctaatcaaatcgacaataatagctaaaagaaaagtgaaacttttgtgtaaagaaatattataccttttgcttggcaagatcttggcagccagtgaagttctctgggaatttgcatgtgccaaattgaactgtgtatgctcttgcaaagtttgcaccacttgttgccaatctcttcttgtcattcaattcctagaccccaaaaagaagcaaattagtcctaagaaatcccagataacaatggcaatcggagtcaaaagcaaacataccttgttggccttgctcttctcaaggtattcctcaatgactccagcattggcagaagagtttgaggcagcagcagctgtggtgaagagggtggctgctaggtagagcattgcagcccggcgaccatcactcctttttggctcggaaaccttggcttgctgagccctgatcacaggcattttctgtccagccacaactggtgatgcaactgtaacggccttgggactgagctcagacattccaggccctgagatgacatagttacaagccaaaacgcttgagttcatggctgccattgctgattgtttgttaactttgatgagaataatcaactcttgtttctcaaaggcgaagaaagaaaagggttattagtttagcaaagaaatggttctggatttttgataagggagtgtgatagtgattatcagtgtaataaaagattgtggtgggagtgtggataaggtgagattgcctcactcctattggcaaacatttctctcatgctcacattttggacccactttggaactttaaatgtgtgctctatatttctctgccaatggacttcaacttcaaagtctccaaaatttgtactttgtaggtatgaagaccttacttcgcggaaataattttttatgtcacacaagatatgattgaagataatattgaaagtctccaatattatataaacacaataataagtaaatgtaataaaatttcgtgcaaggattaatgtccctactaaaatttagggtaaaatagttgagtaatcgaagaggattttacaagtcaccattagtattgaaggtatatattactttttgatgtacagagtgattaaaacgaaggaagcttaaattagtagcaatgatagttttatcgacccagaagtttgcacggaacgaatcatatacaagagatactagaactgtaaataaatcttaacaaataactgcattccctttgggtcaagaacaaaagagaataataaaagatatcattagtgtctaacatcctcctcaatatcgtattattattgatgtaattaagtatcaaatcctatgtaatttaatataataacttttagaaagtattactaaccaatcgtaaaagaatacgtctagaaagtaatatgcatcataccaattcaaatcagccacatttcatgaatttgacatctaaaaatgcagtcaagaagcttgacgtttgaagctatttcagtgagccatgcaaaataaaccaacaattaatttcctcacttggtctcaaacttgcagtgcaaaatcatgtctagttttgacattattagttattatataaacttcaaaagtttatttacattttctcaggtgaataaatatcaccaactatcattgttaatataatttcctactaaatttctctctaaacgaacacatgtaaagatgaatacaaaatgtgaaaatatcataatagacaaaagtcttggaatgccttcatatatcagaagcatttcatgtaagtaccttctcttgcacagtaagcctcaaactgttcccaagcaaggttgcacaaattaactagcatctgataaaactctgtagctcccagaatcttcattcaacaacacagaagttcaatggcaggtcctaatccttgttagtcacagttagttcaggctcaaggaacggggaaatctgtaccgatcaaattagatgtgtggtctattagtgaacaatttcaaaaagaaaagtgcgaacacactttgcatgtgcaggatgatttattatcttaaactggacaatcttcttcgcttcttgttcttccttgctggaacattctttggactatcagaacaagatggatgggctggcacaggcgatggcttaccaacatgtgttctactttgcttagaaatccatctcaatggcagatcatttactatggtggcaatatctttagaaccgttcaattcaacaagcttttgaatttgatcaagcatctgacaactccaggccatggactggtccagtccaacagaatcatcgattggtttcctccacagattgagtagtatttctttgaatgactgaaacgacatggaaggttgagaatcttgtttgctttcacatatcatattaaccttaatgacatgtttgcaaaggtttcctcggattgaccatgcacaatcacaaaaggcgaattcagatccaggattccatacaagacgtgtaatattaccatccttttggctcagaaccttggcaaagagattgtccttgtcatccatagtgacagcagaatcgggaatttgcaatgccctgtgccaagatgttgacgcaacatattcctccttaacattttgaaaagaatcagactcatctgcatagcggtcaagccagtagctcgaatgcaactcagttgtcaacttgtgtactaaccaatcaaccctccgtagtgctccaagatgcgaatcatcaaacagtttcatcttaagtttcacatggtaggcttcaatggcaccagatgcttcttggctcgcaagtggaagacttttcatagttgaaagccacatttctattaaaaagaaacaaatcattagattatagttatacacacacatatacatatatataaaaacatataatatagaaagacaaaaatctaaccaattttaggaacccatgatcctctaaaatattccatgaaagcagtttgatcaacaaaatcctccgttagttcttccaaggcgcgggaggtatcaactcctccccaaatgctgtaaactattttacccaaacgtttaaaaatttccctctgaacttcaatgttactacatttctttacaacattcctcagccatgatctacgaattctccagagagagaataggacaggacagcaaaatatatccctgaaaatgtgtaacagtaatgagaaagcactttcttaaaagtacaatcaaaacaaggaattaaaaagaagaaaaaaaaaaaagaccacatcttgcctgataggatcaatctctgtagcagcatcgtcaattaagaaaccactgatcttccatccaggctcaacactacgagctcgatcaagcagggctttcatccatttggttacatctggctttgcagagctaggtgtgatgacccacgcaacaggtagtgcatgttgtctcgaatcaaacacaagaagtgtgcacaaaggatactggcattatgcatattaagcatatgaataaatatcttttccagtaaaaattctcaccaaattctctcaaatcagattttaaccttcaagaaagaataataaacataatggttaccttaagactctttatgccaaatgttgaatcagctgcaatgagactgtgatgaccaaaacgaatcatctgttgtaactgccattcagtttgaatacccagaataaaagaatctgtttcggaagaatcctgataaaagaatatggatttcttgttatttcgttgaacccacatgcgaatacttgcttgatcatccagatccaattcatgggttgatctttttattatcatccccattttgtggacatactgggaagcaagactattgactcttgcatttgaaccacaatatcgttgaataccctcaatgtgcttctctaaaacattctcttcaggaattccaaggtagatcattgacatagtttgctgctgaatctcattacaaatatatggaactttcttggctccaggtccaatggcatctctgtcaagtggtccatggcaaacaaaaccagatttatttacatgacgcctctcatgatatattataagtgcaagcgaaggacgagcatatagcctcttcactacaaaattgcacgtacagcctcgcattgactgaggtctagcagcacgatttctggtattaagacgatatcttctgctaggcaatatactgccaccttcaccataattctcaggaccaaaggaacaccaataccttcacattgaaaggaaaattaatacagtatttaagcacatctgggaaaagttgcattgacaaaatggcaagcatataaaaaataacattgagagtgcttatcatcaataaggccaatattcaatataactacacagtttaaaatttccatttacaagtggttccctcattcttaagttctggtatgtttatctcccatgccatcccatctttaaaagtaatgatcaagcagatactgtaatcttcctttcctccccaattattagccttctgaagacaatttagccctgaaagaatatgatttcatagtattttttttcagtatacccatttatatagaaaacccaactccgaaaacaaatttagctgttactctttcctttaaagcccattttcactataagtataatgataaaaaatatatttgggaagtgcttccatatgtactacacgattattacagattagtaaacacaattgtaatcatcaaatggaatgcctcgcatactgttctcatgacagtgcaataccgaaagaaaaagatagtaaccttcgaaagcgtttagaagtgcttccttatttcatttaccactgttatgaattagtaaacatagttttaattatcaaaagtattgactttaagatattataatgacacacaacacaataacaaaagacacagacatagcaaaaaggaaattaagtttctataaagtttaactcacaatctgtattccaaatactcgtcttctttgtattccttcaagctgcccatggagcgttttctgcccctttcaatatgaaatcgagtagggcattctatattagagcattcaccaataatgaagtcatcaacacgttcataaggaataagggccacgacatcatggtgctcagaagttcctaatttggtccaagtcaggtcagcagaagagaaatcctcctctggggggtcttgaatttgaatgtcaagtatggattcaacaaaatccattggaactttgacacaattgaaggtttatctgaactacacacagaagaaagatatcaccgtaggttaattaaaagtagagctgtgaagggtccagtcagttgagtggaggcaaacatgtatttttcaacagccagtgaattgtgatttaattaaggagaaattaaagcaaataaaaaatcctaccattcctttgggaagtcttgggtacccaatactatacagtacactaaccgtaaccggtactacatttctagaatttattggaaaacgcatacaaacaaatggaaagatgaatcaaaacatagatagaaatgaaatttatatacatatatatatatanatatgtgtgtgtgtgtgtgtttgtatgtatatatacctgatagcgatgaagggtggatgtatgagaaaaagtgaaatggcaagaagacccaaccggagcggcgggagagtagagtgagagaggaaagagtttagggttgttaaagagaaagaaagaatgagtagagaataggaagaggaagcagtggctttggcctcaccgagaccgagcgcgattgttgaaagaaagggaaaacaataaacaggagacttttaagtttttgttttgagggagggagggacggccagcatagaatacatcgtcttgatagtacatattttagaaagaaaaaaaacattaaaccctcgaaacacctaataatttgatttaaatgtaattcatcatgatttcaaacaaagaataaataaaaaataattcaacatgattacttagtaggggtgttcatccgatccnnnnnnnnnnnnnnnnnnnnaacaacatccaatccgcactaagtgc

SEQ ID NO: 110601 - DNA, 1491 bp, Cannabis sativa
gattagcatagttaaaaaaaatttgtgagggtggcataaaataacaccatgtgtgtttttttagcataaaatgtcaaatttcccttaattaattaatgctaattttttgctaatccatattttaagtatgttgtcactacaattatgtagctatttgaaagggtgcgacgtcataataagcaaggatggatttgacaaaaggaaggaaagagactattactccacattgaagaatgggaatcgagagaccataacttccatcttaataatatcaagattggtgaaacggacgtgaggtcgctatcttgttacatgcctcgtgcatccagtaaggatgagctttattttctcgaaagaaactaagtctaattgtcttgtcttggagacaaggtcctcataggagaaaggctcatccaaaggtgcatcctcgttgtttgagactcctacttcctcctccttacccatatcgtcctctccgcgagcaggtaatctgatgtattgattgacttcttccactttaccatctgacaaagcttccaagttaataaaactgcctcgagcaaagacagtcgatttgcttcctcgcaactctattaccacaagttcctccaaatccccaaccatgtgagctatatcctccatggatagtgaatccttgcgctatggagtagcttcattcgacatcgatgtgggaatgaagttgtcgcagttttgggattcattcacagatgcttccccttgagaccggtgctcttgactgttcgagagatcgctcatttgaaagataaaagatcttttcaacgtattgtgcgtgcaatttaataaaaattgtttcctcactcgtacaatgttaaaaatatatatttctttgaaaaatgatgttaaaggattttgtatatttctggataaaagtgtgactattcatgaagttcttcatgttataagtaaaacctataaatatatgtgtgtgtgcatgtgagcattcaaagtgttctatggagaagcatgtgaatattcatagattttatgaaaaagatgtgattattcaaaaaggaggtacaaatttccaaaacaaattgcctatttcagttcattaaatcctaaacctctattacccataaattagcatatcattttcatgcattttaaaccaataaaatccagaatacatgcgattgttcgaaggtttctaaaaagaaagaaaaaacaaaacaaaaaactcgagaaactaccttgaaatctaaaaccttgcggttgtttctctttaagatgaatttgaatctgacgccaagagttttagtaacgaaaatctttgaataatcttctgaaaactgaaagaagttttctgggaaatttgagaggattcttgaaaaatttgagcagatgaaatgatagggaagtagaagttgttgggttttgtgccctaaataaaacccattacaatctggttagttatcaatttagaattttgaagtgatttatgattacatg

SEQ ID NO: 110602 - DNA, 6082 bp, Cannabis sativa
aaataggtggccatgtgggaaatagaaaaaatgtaggtggacacgtgggaaatgtggcgagaagtaggtgacgattttttaatgggccggttttaaaccgtcgggtatagggctctcttaaaaaatcgcattttattaaaagacgtcgcctattttgtttactataattttaaaccaacgggagtactaaatttttcccgacgattttaaatagttactaaatttttttagcgacggtcatcggaaaaaatcgtttttaggactgtcgcgaattctgatatttgtagtagtgaattttaagatgaaagagtttagagcacctaatgtgagtgttctaagagctcaaccgtaaaagaaaatgctaagaaggtactaagtactacaaaaaaaaatgacatatcactattatgcaaataataaatctcacacgatttaataaataatataaaaaacccctaattacttagaatgtgtcacattgtgtgtgatattagacacgttaaactgcccaataaccatgcttgccaggaaacacactgtaagtttgccacactatcacaaataaaaatacaattaaataaaaaagaaaccaaagaagaagaaatggctgaaaggaaaatagcgattataggcgccggaatcagtggactattggcctgcaaacactgtctggagaaaaaagatttagacccagttgtgttcgaagcccagagctgcatcggtggagtttggtctaaaaccattgagtccaccaggctccagactccaagacccttttaccagttttccgactttgcatggccgccttctgtgacagccactttcccagatcacaaccaagtcctggactaccttcattcctacgtttctcacttcaaaatcctcaacaagatcaacttcaacaccaaggttatcgatatctcctattcttgttcagagtccatctgtgatttttggggtggctccggagaaccattttcatctgggaaatggaatgttacagttcaggattctcgtaacccatctgctcccattgaggtatctatctagtacttcatttttaagccaaattaataattattgcgatttcctaaatatatatgtaatttaaggtataccaagtggattttgtgatcgtatgcattggaagctttagtgggttgcccaacattcctgattttggaatagacagagggcctgaggtgtttggtggtgtggttatgcattcaatggattatgctgccatggactatgaagctgctgctgagttcatcaaaggaaagctggttactgtggttggatttcaaaaatcagcactagatttggctgcacaagttgctaaatccaatggtatatgtatatatactttggttcaaaacagagaaaatttgatttggtaattatgatcatattataataatgttttgattttaggaggcgagtacccttgtacacttctgttcaggacagttcactggactgttcctgattactttacggcatacacattcaaatgcttgaatcgctttgtagaattgatgatccacaaacccattgaaggattcttccaatggttcttcgctttgctgctttcacctttggtaagctcataccatctaaggatttataaccattttggcccttctcttttaattttggccaaagtttcaatataatatatgacatgccaacttaattgtactaaatatgatatcttaaaaaaaattaaaaatatagaatgaatcataagaatgaaaaccataaaaaacttaaaaactaatatataaattttatttttatataatcaaagctagtttttttttaaaaaatccaatttcttgatgaaaaaattaatttccatacatttgactaatttaaagaaattttaaaacattaactatagatttagaaagacatttacaacctaagcccataaaacatgccataaaaaatgaataaaattaaatctgtcatattttaataaaaaacttttaaaatctaattttaagtgtaatttcctaaaatgtcaatttaacactactttttttatttaactcaaatttagtaaacaacaaatccaaatttgttgctttcagtttatacatgagataaattcacacataatataaaggtaatttgctacactaaaaaagtttgaaatcagcaaaataattttgttgaattcacactaattaagtgacctcagaatcactcaatgtaaattatgttaaggttacatacagtagtgttgaccaatatatatattatataatttcttatttcagctgtggttatattcaaaaatagtggagcactttctgagattcttgtaccctttgaagaaatacaatatggtgccaaatcatggcttcattcaacagatattttcatgtatgagtgctattacacctcctaatttctatgacagagtaagagaaggaagtctcatactcaagaagttcaatattagtttcagcttttgcaaagttggtttgattatagacaaggaggaatctacacctcttgtctctgacattgttatctttgctactggttacaaacctgatcagaaactcaaaaacatctttgcatcattgcatttccagaaatgcataattggctcctcagctcccttatacaggtataaatataataatcaagcttagaagtctttaattataagataaatgataattatctgtctagttttgtctactatagtttttggcattacataaattcttctttactcattcagggcaggcctaagtatagacagactaggcccttttcgggtcctaaaataaacaatgaaagcccttattatattcacagtttggttagttggagtgtataacacattactcaatagtgtgggtttgagtcccataacactctttttttaatattttttttatatagccctgatgtcattgtcagggccagccctgagagtaggcgagccaggcgtaactctcaggcccttgaaagctcagggttcgaaattatgaaaaaaaaaaattagtatatagataaaatattaaatattaagaaaatataacaagtattgtttggtatagtggtaaagaatattacttaaatctaagaggtgatcaattcccaacttctaccttggagctcttaagaatttttaaaagctttaccattacatcaaagtataagaactattattttcataataattagactatatatagcgcttcaaaattttattttgctttagaccccatataccttagaaccggtcctgactcattattgtgagtatggtatgttatacttatgtggctcatatacttttgaatcactcgcattctcggattgagagactcagaaaataagggaacaacaaaagataaatgaaaccgtgataatttaaaaggtattttacaatgtctgtaagtgcttaaaacaaaggcaaaggttggtttggttttttttttttttcttttctttcatttaacagggaatgcattcatccaagtattccaaatctggcaatacttggatatagtgatagtccagcaagcttgtatagcacagagataaagagcaaatgggtagctgagtttttgggaggaaaattcaaattgccaagtgtaaaggatatggaagaagatgttattaggtgggaaaagtgcatgaaaagatattctggttgtagctacaagaggtattgttcaattgctttgcttcaaatatacatcaatgatcaattatgtaaggacattggttgtaaccccagaaggaaaaactggttcttggctgatcttttctccacctatggccctacagattacaaaaacctaacccactgaccactctctctagtcctgaaatcactttttgattgtttctagctgagatgagagttgtattttcaaactagagtgaaagctcttaagttaaactccttagaacagagagtaacatttacacaactccaactctagatggtattatattagtaccacacccctctgtggttagttattccatctttggttagtttcattaatttattagccattttttaaatgtacactagcaaaacttattgttatgtcgtttgctaaattcaatttttttttcagtacttatatatctaatgtgttaatgctctttttttttttttcgttcaagtacttataggacttagcaaaagttccttactggtagggaatttttttgaccattgattttagatattatagttattatgatgtaaggtgtatacttttactataagtctgtttgtatacaactaaaattttatacatattataataatatttaataatattattatttttttaaaggtaaattaaattgtttttatataggtatttcttttaaaaaaataattttacttacaaattttgttatcaattttgttatctaaaattaaaattaataaaataataaatacatttaaaattaaatagatatagaaaaaacatatggatttgtcaccttatcgcctttagatatatgacaaaatagtttaaatgtttgttccaattcttgttattttatatattcttcttattatgctaacaaaaattcttatgtcttttagctctatttccacatatgttttttattttataataaaccatttatttcttaaaaatgcgtagtttatataaattacatgaaaaaattgagtctagcaattctaagtgaaaggatacctttgcccccttgaaattgagtctttgtaatttgtacggacattagcgccgcagctctaattcaagccgtgtataaattttttattttaaaattttgttgttacgacttagcgattctaggtgaaaagacacatttgcctcccttaaaattgagtcttcttaatttgtacagacatcagcaacgcaactctacaactctaattcaagcagtgtacatatttttcattttaaaattctattgtgacaacctagtgattttaggtgaaaagacatcgttgccccccttaaaattgagtcttcgtaatttgtataaacgttggtaccgcaactctaattcaagcagtgtacagatttttcattctgaaattctactgtgacgggctaacgattctaagtgaaaagacacatttgcccccttaaaattgaatcttcgtaatatgtacggacgtcagcaccgcaactctaattcaagcagtgtacagatttttcattttgaaagtctactgtgacgacctaacgattctaagtgaaaagacacatttgcccccttaaaattgagtcttcgtaatttgtacggacgtcactgtcgcaactctaattcaagtattgtatagatttttcattttgaaattttgttgtgataaccaatggtattattgccataactctctcgatattatttgaaattggtgatttaagatgttttaaaaagatgaagaaaggtctaacacttttatttacaacattttttcaaaaagtgcacgaattatactcaaaaatttacttgaagcttcaaacttaattttttatcacaaataaagcgtgttgagcattccaaacttaaaattttcattcattatatcatacaatctaaacttcatgataaatccaccatattcaccatatttaacatatttcttctcatttcaatccatattagttacttgattgataaaatttgaaacaagaaggaaacaagtgtaatttcacataaaataaaaaactacaataaacttctaaatcacaacataaattgcacataaatctaacctatcaaattctcacaagtttaaaatgagtaaagactcaaacacaacctaaaatatacaaagcacaaacaaatgaatcaagtcaatcaatacaaaaatggcctcaacttcaaaaaatcatgcacataatcctacatatactttcattttaaccatgactaatgaacaaccaattaattgaaattatgtatactttccaaatcttttcatcaaaccaccaaaattaataatccatatacttgctgttaagggagaagagttagttaattctgttatgactgttcagtactgttaggcttgacagttagttggttagtt

SEQ ID NO: 110603 - DNA, 4979 bp, Cannabis sativa
  modified_base (58)..(58): a, c, t, g, unknown or other
  modified_base (586)..(586): a, c, t, g, unknown or other
  modified_base (787)..(811): a, c, t, g, unknown or other
  modified_base (4902)..(4936): a, c, t, g, unknown or other
acccggggatttggaatctctgctattgcgggagatcaggtaagacagtagttagcangtagagttatgcgcggtggcacttatattggaaaggatatatatgagtaaatagtcaccgggattagggttatcaccctaacatgaacagtttaatagcctagagttattaccctagtgatatatgttgtgtaaatgctatgccatgttgaatatatgaatatattgagatttaggattatgtatttaaggcataaccaggttggactcggtaactagaaccgagaggaaccattctaaggccttaatgtatttagacgtgtgagcgcaacacgtaggtctatgttacgtaggcataaataggcaagtgagcgtaacatgcaggtctgtgtcacacaggcatatgaaaatggcattaatatttataaagtgtgataaacatgttataaatattttatactgtcttgctgggcttggctcaagggtgctctactgtgcaggaaaggataaagctgtttctgatcagccgtgagtatgggagttggacggcgtatgtacatgttggggccacactagaccaagcgggttngggtctaccagtgatgtattttgtgactctattttgctgtttaggtcagccaatggaagaggacttataatagtgttttgaaaatatttttgggatcctgacttatgtaacttttagtttgtaaagtttaaattattacaagtttattttcattccatttgttattaaagtttaattttcgtgctaattttattagtaatnnnnnnnnnnnnnnnnnnnnnnnnntaagtatcttgggtagcgtacctaataattagggtgttacactgccctcaagctgtccaattccaactgctgaagtaaactctattgtggagtttcttgtgactattgcaaggcacacctctaaaaaagctccgtctagtcgtaaaatgatggcgcagaccaagcagactgtcaaaaagtcttcatctattgatcctgatattactagtctggctaccctggccaggggggaacaggcccgacctacggtcgaggaggaggagaatactagagatgttgaagttcgggaaattaaggaccagggcgagatttgtcttgcaactccttttgaggccgagggcgaagagaaggagagggtagctcgggttctaccattcggtggtttcaacgagaagggggaacctatctttatgacaggtggagtcttagaagctggtcgagactatgttaaggaggagtttactgaggctcgtcccataagctgaaagggtccaaagggagctcgatgggtttctccaccatccgttctgaccttcaagagattgaccattctctttgaggatggtctcctagggcaggtcgaatgcttccttccctctcctgggcacctggaaacacaccctggagagggttactgtgcatggtcgggtcctcatgccaaacaaggtgcaatgctacttttgcatctgtatttcaaggaaatagccaattattacaacatcagccgacccaactcacccataagggcattaagtacttatctgcatttttcgtgttgtatgcctctcaaggatggggtcaaccatccgtccatgatactaactggttgtttgacctgatgtacagtcgcaagcaaaatagatctgggtatttctacttctctcagatcgaggagaggtggctaatcggtaacatggataccgaggtgaccaaaattggtagctacgtggaggactattacttcgtcaagggcatggacaccaagcacaccagttttcaacacattccttcttattgttgaccttcattcactctgggactcagggagagggctcaagagattctccaagctcccttagatgatcagaacattgttctcttggccattgaggccaattttatcaagcacaagctctacccatctgatcatggacaaggggccgagcagccagcagaagagcctatgccagcccaggaaggaggggttgcatctggataggaagtttcaaacaagaagaagaagaagagaagggctccccaaggtgaccaagtacctattgagcgggccattaggatcagagatagtcccgagaaggtcgcttgatcttctgctcaggtggtaggaaagggaaaggccattgtgatcgagcaggaggaggaggactctttcgatgaggatgccccttccttgcttgtttgggagggtgcccatggccacgtgtagggtactttattttattcttaactttgtttgcacttggttgattcatgcttattttgacatccttattttactcatgtgcagttatgtttcagaggatgttgcgcgcactgaagaagagatcaagtgatgcctctggccaaaagtctctggtgaagtgctctaaggtggatgatatgatgcccaagagcatcgtcccaagcaccaagactcctcaactgactattgagaagagctcagctatccctccaactgaggtttctgaggaggcaaaatcaaatgtaaacctaccggccaagacgaactcgaaatcccagtctacagttgccccgtccaaatgttcaaagggaggaagcactaatgggcctggactacctaaacctttagcgacttctaccctactgaactaagagactaagaaggggaaggagatgcttcaaatctatcaagatcgagtgcttcccgaagtgaacgactagctagccaaagaggaggacatgtctgtgtagattcttatgggcaatttgctgaaggaatccacctgaattagtaattttcctttggttttctttcacattcttttatccatgcatgttttaattttgctttattgtgcaacttaacataaaggtggcatacacgtactcccgagctaagtctgcagccttgaaaactacaacgaccacaatcaaattaaaaaaggaggtggaggaaactaagaaggatcgagcataagagctttcaactaggcaaggttaataaacagctcccagttaccaacaaacttgttgaagagttgaggaaggagatcaacgatatgccgtctgctgcccagctcgaggcggataataaggctctggccaaggatgttaactctctgaaggatgagagggaaggcttccggacccttctttcaagcttgaccgaggagaagaaggttttgtaggagactcctgactttgaacaaacaagatttagtgctaagcggaaggtgcttcagaaggaggtggaaagcttggcgacggtcgccctggacatcttttatgaattttggaaggctaacctagaagcaaactttgattacctcaatgaaaataaagagacatatcttaggttttgtgaggcctaaaaagacaaggaagaatctgaggcagccaacagcgatgctctgaccaaccaaaacaatgaaacctcagttgctgatgacacaaacccgacctgtagaaaaaactaaggactctaaccatttgaattattttttatcaatttggaacatgggcccttttttaatacaatgtggccgaccacggggcttttaaacttggttaatagtttattttgtttcaagacaactggctggccgagcagcttttaatcttggagttagcatgctttgttatcttttaaaatgtatattttctcttacttttaaataattgcacatgcaaatgttttgttttttgagcttgttacttacctatgctttgtacgtgtatagttgtcccccaagtgaccgagcagacttatgactcttggtcagttgtattgcacaagttcaatattgtctgtcagactactaggtttaggcagaccctttgtatgcattttcaatggtaattacgtaacttacagtagaaaagaaaaaattgacacaattagaatgctaattaatatcttcattcatttattagtttagatgtgttgttacaatagtaacatacatttattgaaatgaaagctattacatgatctaaacgatctttagctaattaaaacataaaacaattgaatggtataatccgtccaagagacattgctcaagaacaatgatttctgaacatattgtactttaggggtggtcatccgacctgagtaccaattgtttttccaaacctttaagtgaggtctgctttgaagaccaccaacttaagagtaaatgttcgagcattgtgtactttatgggggtcatcagaccttgtacacctattggtatatttcctcaaatgtcccctattccaataacttggtactaaaactagttctatgttttcgtcataccaactaagtttatgtgctccctaatatgtgacttctgttacttgatatggtccttcctagttaggttcaagcacgccagctgtgttgtcttttgtgtttaagaacactcttctaaggaccatatctcccacaaagaactttcttaccctcactttcttgttgaaatatcgagctactttttgttgatgagccattagctttaggtttgccgaagttcttctttcttcaatttcatcaggtgattttgtcaagagggcgtgattggtttcttgatcataaatcagtctcctatgggacggaggttctaactcgacgggcagcatcacttactaaccataaggcttggcaaatggtgtctgcctagttgatgtcctttttattgttatgtacgaccagaatactttttgtagttcctcagccagttatctttagcttctttttgttgttttttcatggtatatttgagtgtcttgttgactacttcgacttgcccatttgttgagggtgtgctactacagagaaacctttaatgatttcatgtgtcgtacagaagtctatgaacatcttgctagaattattttaccaggatctnnnnnnnnnnnnnnnnnnnnnnnnnnnnnnnnnnnaatatgaacttctaaaacgaataagtaaacacatataaagtat

SEQ ID NO: 110604 - DNA, 4456 bp, Cannabis sativa
ccccatcagaaatctcgcaccatgccatcaattcttgacaccagtctattcgaaagcttggtatcttgcatggaatacataggcatggaaagacccactgatttgattcagttagtacgcccgacctttgaaggagttttcacttttcacccttgaagcttagcagtaagatttttgaggataaaattgaaatcaacatctttctgcctggatctaaataatggaagccccaagtatttaatattcccatatggcgcattttccaagaacctctcttatcccacttttcataccttctagagatctcttaataaaaaaaatggaggttttgagcttgtttacttgctgtcccgaccaggagcagaatttctccaaacaatgccagtagtctttggctttcgccaaatcggctctggctaccatggtaaggtcatccgcaaaaagatatgagagagagtcggactaccccggctaagtctaatgcctgtgatttcccctttaccaagggcctcctctaagagtctcgacaaaatttccaaagcctagataagaagataagggaagagaggatcacccaggcaaatgctacaagtgggagtggttttccctacccgacctctattgagacaaacttttagagtggtagtggagacacactgtgtgatccatttgcggaaggtttctagccccaaaactattttaaacgtgctcaataaactatctactccatgtattattttctctatactaatacatacaactagtgttgttttcatagatatatttttattttctaaaagtgtaatccccaatactttttctacccgatggtgtttgatatttatttttaaattaaacatataagaaaacagataattgttttagaggataatattgacatgttctctttgatgtgcctgtgttgcaaaggtttcttagacatctttgcgatactgtaatgccacttcatcattattattatagataaaagtgcttggtgagtgacttatgtgttcaactcttgacaaaattggtactattcactaataatatttatatttactaataaacagtgattttacagattttgagactcgctaaagagcatggtgattttctttttgttgggatacacacagatcaaactgtcaggttgtacatttcttctttttttgttcaataaactctctttaaacttctattatatgtttgtttgttttaagggtgataatgtatattttctcattttttgtagttctggttcatatatgtatgtgtgtgtgtgcatacacgcctgtgtctgaaaccatacaaaaggatttaaagtgtacattctgtcacccaccttgtctgttttttaggggggttcagaaattaactgccaaccacccaatatccttaatttaaaaactcttgttttaatattaatactatatcattagtattagtattggtcatgcaccataaatgtttatatgcaagtctaagatatagattgattacattgtgcaacctttttatgaattcgtttaggcattagtaaactgggccaattctattcttcttttgttactgttttctgggagcggctacaataccacacatttattatgcagtactgtaccgcatgcttctatttacacaattacagaagttataacccccagattttttgtatgacggagttcattgaagttagagcaagcattttgtatgattttaggaaattcataatagcatagggtgctgaaaacaaggtccaatacagtccagacagaatattgtgcttttgatggaaatggaagtttgggcggactatttgtttgacactttaaactaattagaattttcccgaaacatcaagatgtttgttataacttgaatgaaaccatcatgtagaaaactgggttaataacttctgcaagtgtgtaaactggagtgtgtgacccggtactgtaaaaagtaatgcagtacgcagatgtttccctttttcttttttaaagagaatacaatttctttcatatgagttttagctaaattcctaagtgaagcacttgttttaaaggcttctaatgataactttctgtttcattttggtcattttttccttctttcagaaagtccattttataacttttttgaaactaaaaataaaaatattaaacaaagtctagtgtcttgagatttaaaagaaaacaccctagacactttacattgtttaatatttcttcatttatttataattattttagtcatagtttcaagaaatagaaaggtgtaacaaattcattaaaactttaataatacttgtaatactaaaaaaaaaacacgttgaccctgttacattttatttatggtatttttttcattattattatgaagtttcattgttgccaacaaaaaataaaaaaggaaatatttgaccaatttaagtgggggttaattttagcaaattttgtaaattcaaaatttgagtcacttaagattttagtgatttttttatttatttataggaaagggaaagttatcatatcaaggattaaactagagacacgtttagatgggaagtctcctacggacataactaaaaggaattactacagacagaatgaatctccataaaactctaaaaaagaaccagccttaacatctatcattttgtaaccatcgacttatcttgagtttttttttggcaaccatagacataacttattccattgcatgtatttagatttctatttttcttactagttgttaatatatctttgcttttgtgtttgtcttttttaataatgttccagtgcaaagagaggagtacatcgcccaatcatgaatcttcatgaaagaagccttagtgttttagcatgccgctatgtggatgaggtgataattggtgctccatgggaagtgtctagagacatggtgagagttgtttgttattagtattcatatttttttattcttatattctcttgtgtatttgatctcattcttttgtctgtagtgctccttttctccaaaggacattgttatctcttgattcattattttcccccactgttttactgtctggttaatgcctaaatgaaagttgaggttttcactattataaagcttttatgagaagttttccctcaaaaaaaaaaaaaagcttttatgagaagtttatgagcattagagagtattatattactaaattatgtgtattaattgtgtgattctgtgaaatttttgcaagtgcagatcaccacctttaacatttcactagttgtgcatggaacggttgctgagaatgatgattttcagaaggtaaactagaacatcttgctgctctgcttatatgaaatgtcaagatgcgctatgttctgatatttaatttatttattttcagtgacaaatattttctggtttatttcattttacaggaaagtggtaatccatacgatgtaccgatcagtatgggtatctttaaagttctggacagccctttggatataaccacaaccacaataattaagaggattgtggccaatcacgaggcataccaggtctgtcttcacaaaattatctaatatgttctttacgctcaatcataaactatagtggaaacacaatcagaaatttgtttatgataaaacacaagagaatgcactgttagttcatatctgatttaatatgccaaattaactatcatgatgttggcaaccgttttacaacagtaactttgagttgtgctttttcttgtagcatactatgttgtcttattaattagtatcattttggtgtctcttaagcagaaacgcaacgaaaagaaggcagcaagtgagaaacggtattacgagggtaagtcattcgttaccggtgattgatccgtgtcagaatcagatcttctgagacatttctgtagctgcctttggttgcaaagtttctgtatcagttacctaagtggctgtttttctttttcctttttgttagtttcatctttatttattagtatttgattgctaacttagtcctgttatcatctattatcgtttgcgtgttttagatcattgttgagaattgaatgcataacggtaaattttaggatatatagatgtccaagagaaatgtggttcataccattttagagttgtaaaaggggcatgtgccaatttttgacgatgacacaaatatagtgattcttgttttccaactcatacgaaggtaatttatgtaccaatgaaatttcttagtctcccctaaagatgtacttagcatcattcattatttttttttggaagctgaattcccttggcatcattcatttagattatcattatcattcaatgactcggtcgagtggggctttgaaaagagtgccgtatgcctaaattttcagatctgcgctatatctttaaacggtagatagtgtataatatatacagaagttgataatatgatttttttttttttt

SEQ ID NO: 110605 - DNA, 7138 bp, Cannabis sativa
  modified_base (7094)..(7096): a, c, t, g, unknown or other
tctttttatgttgtattcttattaatttgttgttgattttttgttatctgtattttatttttttattattgtttcgatattatttatatattatttttatatagttttcttgttgtttctatgaaaaatagtaaaaatatatttaaaaaaaaaaatctttaaacggaaaaatataagttttttacaaaaaaaaaaaaatagtagctttttatttttaaaaaactccaaattaaaattattttgaaactgcactgaggcaccgattagtccctagtttctaagagataagttgagaaatatcgtttttttgtatcaattaatcaaaaatacccttatattatatttcattaaaatctatccacttttgtgattgagttatctaatatactcttacccattcacttaagtgtagtacatgatttatattaatctaaagaatataacagaacatcatatataaaagtgggtatatctcaatgaatatagaaatgataaagaaaaatgggtatacaatcccatttcctcattttcaaataatgattatgggctgaaatagaaagcccagcccagccgaagaaacccacaataaaattaagctttttaacaattttttttggtcaggagactttttaacattttttttaaacactttttaacaattaaatcaactaataataagagtaaaaatggtttagttatcaaaaataaaaaaaaaaaaatgaaaaagaaagtggaaaaatggtttagcagaggttagagataggaatcggattatcttattcgggtttgggattccgatgtcgattagagaattcattctccaagaagtgccggattgggacgacgaactgctggccagggctcgatttaaggctttcagtggccaaaggtccgattggcaacccattttccttttctggagagatttgatcatcaacatcgctcgccactttcgcctccccctcctccgaccttcccaggtctgcttttttctttcttgttcttttttctttcttcttcttaaatatatctgtttttggatgacattccaccatatttgcttccctgatgatgaaggtaaaggattggttcaatcgaggagggttgaccccattatgcctcgaccatgtattggtgagtgagttaactttgatcccatccaccttctttcttgctttatgtattttcgtttttttttttttggtttaaaagagagaaagaaatacacacatgggtttctcttttccattcaatctttttcttcagcttgtaatgtataatgaaggtgatattgtaccaagcgagcaacttgtggatcctacaacagggcaactctctcaaattttcagaaaagtaagaaatttgattgttagacccatcactactcctcaacccatcaatgcccaagatgttttcgttgtcatgtcagtgatgaaggataaagctacccaggttgtcaatcttttatctcaaactcactggacctgctcttgtattgtaactatggggaagtttcgagaaatatgcggtggtagaacagatgagtcttctgctctcttaagcttcctttcatcccaaggaaaggcacgccatctttctgtgaagaggggggacattattcaggtacatctagttctacttcattatatactgtttcttatatactttccttaacaacatgaagtaatgagtgcattgcgaatacttgcttaaagaatttagctaatagaagaaaggctgtcacttaccatgtcttcaaaattttagacaactcaatgtatgcgaggttataatatttttgcctattgtgagtgtgttttctggttcccaatacctaaatatacttgaaacattctgtacctttgactttttctttttgaagatgtcaaattgttactgtatttttttcttattagggcgttaaagtctccctttcagaatcacctgtttctagtatttcaagtttagactatgatgttctgcacttgatctggactacagaaaagcttgagcaacaacttcttgtgattgaccaacgttgtgaaaggtaattagctttttgtgtatcttgattgtcagataaatcatgaatgataataagatgatccttgttgagtgttggaaagagttacactacctctatattaataccgacactgggagaaggaggttaattaattcttgtgaatgttgaatgagatgatgattctgtgatatataattgtttgagaacatagagatttattctagttggtaggaaagtctcacacattgaaatggcagcaggcgttcttaataatagaaggatttggcagaaaaatataaatttgtctttcccaaaaacattattatgcagtaattaagaccacttgccagtaaatcttaattatttatatagattacattaggcatataaattagaggactgttggagcttggatatatgtttatctgtttggtgaagttaggggtaaacgtgctagtttagtttggtctctttcacttttttgtttatattttagggaaaagaaaagatattttgttaaacgctgtcttatcctatgaatgtagtagatcttcaaacttttttttgtttttttttttctgggccggggaccatgtggagttgaacttgttctttttacaggtccagaaaatcagcaatagcttcaatgaattctggaaacaagaatgtggctttgaggcatatgagggcactaaaacttgctaatgatagtagggaaaaatgcactacctttctgaatagagtggaagaagttcttactgtaattggaaatgctgaatccacaaaaaaggtaaaattgacatgaagaaaatctttttcgattaattaacagtcagctgtactacacagttttgattcatggtttaagaagttggcgtttgttaatgaaacaagattgaatatggttgtcttttctttttggctcctgtgcaggttactgaagccatccaaattggagctgaagtgataaaatcaaataagatgagtgtggaagaagttcaacatagtttagaagaacttgaggagagcattgatttacagaagcaagtagaaaatgcgttaggtagtttccctttttttatctcaagtcttgcttactacaaattgtgctcgtgtttttaatttctctttgactatggcagaatctacgccattgtatacatctgttgaggatgaggatattgaagaggagtttagcaaattagagctggaatttggtggagaagacattcatcaaccgattccgaaggtggtggctaacagtacagttgaagaaacggagggttcggaatccactgaatcattgactgatttgttctcaaatctcaaggttgcagatggctcgtcaagtagtgcagcgtatgagaatgttgctgccaaagaaacaaaaacccttgaactggaagctgcctagctaatccaacaaattctcttacggcaaatgtttgagtgccttgaatcaatgcatgtatatttagactacacttttcaaatatgtaaatattcttggatgttgtatttggtctgaaagtaaagaagaagaagagccattttatttcattataacatgcaattacagaagtgtacccacaaacagaaaaataaatgtggagttgctccagttcttggttcccttttaaacaaagcagattgctaagacttgaaatgagaaatatgaacattttacattcaaagcattaactattagatatgaacaagtaagcacgactagttttggccctttcgatgggttgggtgttacaataagaaaggtcatgtctcgtgaatattgtgggttaagtgttagttgttttgtggtgcgtagtagtaggacaatggaaatgatggtggaatttgaggagaagaagaagaagaagagggtgatacatgccaaggcctcgtgaatattggaggtgaagactgtgatgtctgagaagctgaagatgaaacaccttgggggaaggggaacccatacatctgatgcactcctcctaatcgagaaccaacaagcggtgatgatgatgatgccattgccattgccattattggagagaaataactcatcaaatattgtgccatcattggattcatgacattattaagtcccgttcccatcgacatcatcatctgttataatataaacacatagcctcttaatatttgtagaaacttgtataattgactagacaaaaatcatgtaatattatatttaagttgtacctgtaattgaaactgaagtgacttcagatgatctatggcatcctcgagtatggaggctttgtcaacctttcacacagatgcaacatcagctaattagtatacttgacatacatatactacataaaaataattaaaataaatgatattatatatatactcaccttgttgcaattgggtattaaggcttttagggtgcgtatcctcttgttgatcttatctcttcgcctctgataacatcaggatattaatactcatctcataccctcaaaaaaaaaaagtaacactcatctctttaaacacgcacaaaaaaaaatgataaataaaaaggaaaaaaaactcaccctttcggacaaactatgaagttttgcagatctttttcttgggagaggttgtagttcttggtcttggtcttgttcaagagaagtagaagtagtagaagtattagaagtagtagcagttgtagtagtagtagtagtagtagtagtagtagctgtagtagtagtgtgaagtagtggtaatccattattatgataatcatttgaagctcccatggaatgtaaagagggaacaagtgcagcttcttcttggtttttggggtagtcctcataatcatgatagtcgtattgatcatggggttgatgattatcagggaccaagcacatagaattatcatcatcaacagctacccgcttattattattattcttcattatcagtacacgttccggcggtggttgtagatcccgctcgctagatttgttgttcaagtagtccttattaagtaaaagtactggcctaggcttagatcgatgatgattatcactatcatcatcatcatcatagtcaccacggccacaggcgccattagatttattaggtaactgctttggcgatgagaatagctcaaacacgttccttgtgggaacagcagtagcagtattgcctgctctcttattaccaccaccaccaacaacaacatgaggaacttcagtagtgttattatcactatacctttgacttgatatgaagtttgatggacacggacgtcgtttcacgatctcatcattttcccataccaattctacaaacccactagtatccatcgatcgagcttccacactaataattgtttacctatatattaatccacacacattaattaataagattaatatgaactactactattagtaagattaatgtgtacacaaaaaaagaggtggataaaaatgatgtatatatgcatatatgtaccagctagctaggtcgttttgatgatctatgatacaagtgcttatgttatgttcatgcatgtgtacgtagaactatatatatcatattaattttacaacacatatgtatattatgtatgtatagttgattacccatgggagctttaggagaggatatataggatagtatataaatacataatataaacaaaataaagcagactagattggagtagtgagtgtattggtgtagttatattaataatttttccatcaaagaaagatatatatattgtttggattagcagtacccacctctaccacaccacctggttccttcttatcaaattcaagtgcttaattaggtgccggagatcgatctgaacgttggctacaaagtatatagatttgtaacaactgactcaattgtgatgagagagaggagagagttgtgctgatatcataatagtcaaccaaaagccaaagggtatagccttcatttatagccccattaatttccgcctgggttgctaatacacacatgcaactcatatcgtccacccatttaagcatggacctcaccacacctcaccctaattactcgtacgatattttttttattattattacggtgcacaggtcacatccttacaggtgtctacaattccagagtggggtcaggacccgtatataaatattttggcattaaactgatcatttctttctctttttttttttcatttattaaaagaaaaaagcaaaagtgtgcataggtttgaaatggatgtgtaactacattaattcgttggtttcgtttccaaagtaggagaacttattataaatccaaaaaagaataagaaaaagaaaaagaaaaacatttgtgttgtttgtgagggatgggtgggagagtgaaggtgagccacgaaagggtaaagagtgatgtagcgatggagcgtaaggattgaagccacgtagtagaagaagaaggaaggaagaaatatttggtggtgtgtggtgtgggacttgaccaagacccgggtgggaaggggcatcgtatgttcaaaagtagttgagagatgagatgagaaaaaagggattatgggaatcttataaagattgtatgaaatcacgtgggtcttagccccaccaccaccacccacccatgccatactccctcactgcccctactcctctgcccgtacggaattttccccatctaatactgtaattttttctccatgtggggacgctcgctctcacattttcttgtctaatcttaactgttgattacttatctacgtgttcatgtaatctctaatatctccaaactctaactaatttggaccaaactatttgaggcctaatcaaataaatttggtgtgaatgatttagtcaattcggttttgattttaaaaaacttagtagtagttcaaactaaaccaatctgtgtaattattttatatatacttaatatatatattttggagaaatattaatatttaaaaataattttataaacttattaaaagtaaaaaaaaaattactaagggccagtttggaatagctgtgctgtgagaaaaagcagctgtagctgtgctgtgggaaaaagcagcagnnncagaactgtggaaaaaagctgagctgagtatttggtaaatta

SEQ ID NO: 110606 - DNA, 6725 bp, Cannabis sativa
ctctttgtatgtgtcacgtcattttgttttcattttaaaaaaaatgtcatttttgtaaaaagttacttaatttagtatattcttaaaaaaatcccattcttttattattctttttgtaaacttttgtaaaaactaggcccaataactctcacactccactttggataacacacacacaaatctcttaatgggtcagccctacttgttgtagccacccgctctatatggcattcaaaataaaaaataatagaaatagaagaaattacactctatactttttttatattatcttttttatttttaccttcctttttaaagtcttattatttttatttttttttaaatattgtactcctgcacttcaagatactctccatgtaactctcttatgtcaagatattttaggtaaaatacataaaaaaataagtatatttcaattacatataaaattagaggtaaatttgattaattgattaataaaagttatattttttaacttacccaaaataatatagatgctcaatcgtttatattaatactattccacaccaaaaatttacagggccaatcatataaaaaaaattattaatttttatatgtaattttttttaaagaaaaaaagaattaccatatgtacgagttttggggaagtttttttttaaattttacgtctttcttttttgcttttcatttttatagtttgcttattttatttttacgttaaattattatcattaatttttatttttacattttactccttattagactaatttgttcttttaccgtctctttttttttttttttttttgtaaatattttaattttacgaacactaagatatattaacttgaaagtatatatagctaaacattttgaccctatttttctgtaacattttgacttcttttttcttatttactgctcaaaatgtaatattttcaacacatactcatttaagttttatatttacatttaaaattattgtgggaaagtgggaggcttgctttcggggtaaatatatataaatttactattttttagtgtgtatgttcaaattgaatatgtaagcttattaccctagtaaatgtgaattatttaaattagatcaagtgaaagagtctagtattgaattacaacaatttaatttcacacaacaaccatatgagaatgcttacaacaacccacatctcatataaaaaccatgttatcaagagcaacccaatcgcatatagcaattatattaacaacttacaacaacccaacctcctacaacaactatgttaattattggcaactcaatctcatactacaagcatattagcaacccttacaacaattcaatattatacaacaattatttttgcaacccttacagtaactcaatctcatacaacaacacttacagatctcaatctcctagagcaaccatatattagcaaaccttatagaaactcaatctcatagaacaaccattttagcaaccttgtaacaaacttgcatgttagaaacccttacaacaatcatatctcatacaataaccatgttagcaacttattcaataatccaatctcatatacaacaaccatgttagcaacccttacaacatcacaatcttatataacaaccatgttagaaactcttaattatagcaacctaatctcatacaacgaccatgttagcaatatttagagcaacctaatttcatacaacaactatgttagcaatctagaaagagacacttacaacaaatcaatcttacatagcaactatgttagcaatctagagagagatgttgaaacaaaaggaataacagaaagaatgtgtggaatgaatggtcaattcattactgtgagcaattgctctattaatatacaatacaaagctgttagagagaaacagctgaaacaaacagaaacaacagaaaatgacacctcagcataacagactaacggtattaactatcactaacagattaagtcctaacaccctcctcaaactgagcgggggtagagaaaccaaactcagtttgcccctaaggagagaaaatcgagcattggaaaggggcttggttagaacatcagcaatttgatcttggacaggaacgtgcttcacttgaagttgcttgttgaggatgcgttctcgcacaaaataaaggtccagttcaatgtgtttggtgcgtgaatgcaacactgaatttgctgacattagaacagtactttggttgtcacaccaaatggtatggggtgagagctgaggttgatgaagttcactaagcaaagactgaatccacactatttttgcagttgcattagctaaacttcgatactctgcttctgtacttgaacgagacacagtacgctgctttttagagctctaggagatgatatttggcccaagatagatgcagaaacccgtagtggatctgcggtcatcaggatcggaggcccaatcagcatcacaaaaaccagtaagaggcaaagtaggagaggcctgaagcagtaaaccatgatccaaagtgcctttgagatgtcgaagaattttcttgaaaactttccaatgagtatctaaaggactttgcatgaactgagaaactttatttactgcatatgcaatttcaggccgagtgactacagcgtactgaagggcaccaacgatgcttcggtgctggtgaggatcagagaaaggatcaccagtataagcagagagtttttcactactgaccattggtgttggcatgctatttgagcagtccattttggtcttgcatagaagatcaatgatgtactttttctgagacagatgcagaccagagtttgtgtgatgcacttcaatcccaaggaagtagtcaatctgaccaaggtcttttagagaaaaggagttgtgcagcttgtgaacaaggtcagaaatcacagaaggacagcttcctgtaaccaaaatatcatctacatacactaagagaaacagtgtgtgagatgaagtcttatgaatgaagagggattgatctgcctttgaacatgtaaaaccaaaagagagcagggcatgtcttaattgtcaaaccaggcacggggagcctgcctcaacccatagatggccttattaagttcacaaacatgctttggataattcgagtgaacaaaatcggggggttgcaccatgtatacttcctcagataactccccatttagaaacacattattgacatccaattgtctaatgctccagctcttggaaagagctatggtgagaacaacctttatggtagttggtttcacaactggaccgaaagtctcagtgaaatcaaagccatattgttgaagataccccttcgcaactaaccgagacttgtgtttatcaatggagccatttggtttatatttgattttgtgaagccacttacagccaatggctttcctgccctcaggtaaaggaacaagtttccaagtgttattgttctttaaggctgtgatttctatgttcatggaaggattccacatgggtgattgtaaggcttctttaatagtcagtggggtttcggattatatgaaagtttttagtttatatgtgccaactttaccacgggtaatcatgggatgattgtttataacaggaggaggaggtgcagatgatgggactgtggttgcaggaaggggaatggttgcaggtggggaaggtgatggttggtgaaaggggttgactggtgagacccgattcgtgggtggagaagtgtttgtgacatgaatgggagttggaatgggaggtaatgacaaggcagtagggtgatgaggtggtggtgtatcaggggtaattgtactgggattaggacgggggataggtacagagggcagagtactgagtggtgaagtagtggaagtggatggggttgacatatgagcaaatgggaaagagtactcatcaaagatcacatccttggagatgtaaattctacacgtgctagctaaacacttgtaccctttgtgcttaaggctgtagccaagaaaagtacacttgacaaacctaaactcaagcttgtttctattgtatggtcgtgtgttggggtaacaagcacacccaaaaactctaaggaaagagtagtctggttttctagaaaataagacttcaataggagtctgattttgaagaataggagtggggagcctattaatgacataggtcgatgccctcacaacttcatcccaataaaacaagggcattgatgcttgggcaagaagggtgagggcagactcaactaaatgtctatgctttctctcggccacaccattttgctggtgtgtagtggggcaagagagtttgtgactaaatccatgttgatttagataggattcaaagctttgaaattcacccccatagtcagattgaagagcaagaatggggcaatttaattcttttccaatctgagtcttgaaattaataaaggtgggaagagcttctgacttagcttttagaagaaagacccaggtgtatctagagaaggcatccacaaagtaaatgtaacatttgtaaccactcgatgacaaatatggagaaggtccccataaatctgtatggagcagttgtaggggtctagtatagatagtctcaaattgggggaaagagaatttatgaatttttcctttgcaacatgcttcacaaaaatcagtaggcattttataactatgaggaattttacaagcattcatgatatgagttacaattctggcagagggatgaacaagcctcttatgccataaagagaaagctgtaaaatttgatacaagagaagtgggtgtagtgacacccacattattaacagacaaagctacaggaaacacaacagacttagggtgaggtttggtgagttaaatctgagatggttggatgacatacaacccatggctaagttgtccttccatcaacactgccttggaagcctggtctttcacaagataatggttaagataaaactcgaaaaaagcattgttgtcagcaaaaaattgagacacactaatgaggttattagtaatgtgaggaacatgaagcatacgatttaaggtaagaggtttagaggtataaggagtaaagaaagtagccttaccaacattctgtatggtgatgctagtaccatcccccatatggacttgatctgtaccttgatagggagtttgctgagtgaaattattaacatcggcagtgcagtgagttgtagcacctgaatccggataccaggcatcatccggtaaagactcagcagtggctatgttgatagattgagaccccacattagctgcaccaactccaggaaactcgatgttaaaacgctgatagcatcttgaagctatatgacctgtgcgagagcatagttgacaaacaggttttgttccagaggcgaatgcaagagtttgcatagttcgattagatcctaaaggaactgaaccaagaggagcgagaacacctgtggatcgaggagcaacaacataaggattccagaagcctcttcctcctttcacagggaaggattgttgcttgagatccgtagatgaattggacattggaggagagtttccacgaccgcgaggtgttcgattagttgtcagattaacagaatcaagatctttgtggttgctgtccatacgatgctcttgaaataacagaagagattcgatttcagccacggtgtaatcagtgtttcttgaattgacagaaatgatgaaagtatcatagtcagagggatggcctttgaagatggctgaaatgtgttctttgacagtgactcgatgacctacagatccaagacgatagactaaagctttgatgcgaagcaaatattcattgattgagaggcctcctttcttgcacatctgcagttgattagtaaagaaatcgatcttagcagaggtttgagtaacgaagtatacctctaatgtgtgccaaacttgagtcgaggttttagctccgacgatgcgagttaagatgccatcgaacatggaagaaagaagccatgagtagaggacttgatcttgcacctcccattcggagaatcgtggattgacaattccattgagtcgatcgtcgttggtgagaaactttggtggaggttgaacagagttagagatgtactccgaaagtcggtgaccacgaatggcagagagcacctgaggacgccagagcagaaaattattgtcatcgagtttgactgatactttatgtgagaaaacgactggattagccattgatgaacagcaagagcttcacagaaacacaacgaagaggaagcaaagagaagaacgaagaagcgaaagcagaaaaaaaataactggcttgataccatgttgaaacgaaaggaataacagaaatgtgtagaatgaatggtcgatcgattcattattgtgagcaattgctctattaatatacaatacaaagctattagagagaaacagctgaaacaaacagaaacaacaaaaaatgacacctcaacataacagacaggggcggacgtaggtgtgtagttggggtggccttggccccctcaaaatttctaaaaatcaatatatatatgtcttcttaatgaacaaaaatcatatatatatatatatgcattaattcatagttcatcgttatatagaaaagtccaagaaaaaaggtaaaaagtagtatattgaattattaacttgttttattttttatttttataataatttatgtggtaatatattatttataaatta

SEQ ID NO: 110607 - DNA, 3387 bp, Cannabis sativa
tctatataaatttgtattaataacggtataaccacatctcgtagtgtttagcatcttaaggtgcctcttaacatgaattagaaaaactaaacttcttaaactctacatgttacatcctattttcttcaactactaactaactatacaaaagttagtaataataataataatatacaaaaatatcacaaacattacaaaacttgttgccacacaagtgaatcacttgtttgctcaataaaaaaaaattgagagattttactttagcaaatttcatttcctatgttgttaatctatgcttgctaactatgcaagttggttgcacgcatgagtgagttatgcgtaaatcgatccggcttcaaccctcgtctaatcatgtcatcacgcaactcgaacgccttccccgtttccccgttgacacaacaaccgtatatcacaaaattatacgccagcgtatcaggcttcaaacccttatcgagcatggtatcccagagtctgattgcatcgtgcaaattgccccgtctacaatgctcgtagataaaggttgaataggtaacgcaatctggaaaaacgccatggtttgtcattccaacgaggagtttcgaggcctcctcgaacttccccattttgcaaaaacctcgaatgagaatgttgtacgttacagtgttagctaaacacccttcgagcatggtctcgtggagttgtagggctttatccatttctccttcgttgctaaggtggtccaagaaacaaccgtacgttacatgattcggaagagagttgctattcatcatgtcattgtaaagaagctctacttgatgtagatttccagctttgcataagccgtgtatcaatgatgtatacgttacaacgttaggaatgcagccttcgccaaccataatgttccaaaccccgaaagcctccttaaacttccccgattttccatatgcatcaataatactcgtgtatattacattatcaggtctcagttgttgatcacgcatcttcttcaagacactgaagagcttttcggtatcctgttgctttaaagttccataaacaagtatagcataacaaaccagatccaagtcaatacctctttcgagcatctcgcgacaagcacccaatgcatcttttaatctcccgtccttgcataaaccgagtagaagtgcactgtaacacatctcatttaaattacagttctcattatgaaggtggtttacaaaatcattggcttcggaaactctacctgtagtgcatagaccacttattagagctctgtaagtatatgtgtcgggcgtaagacccctcttcaccatttcatgaaacagttcaaaggctcttgtggtgttcccttccctacagtaaccatctatcatgacattgtaagtaacctcattgggcataattcttctttcgatcatttcatcgaaaagtttacttgcttcaagcatcaaattcacccgacaaaggccagaaatgagagcagtgaatgtgtaaatattaggcgcaatgcccttcccagtcatttcatgatatagtcgaaatgcctcggtcaattctccagatttgcaagtcccgcttatcagtgatgtataggttacaacatttggcactacaccttttctgatcatttcggtgaagaaagacttcgctgcagcttgatccccgaacttacacgccccatttatcaaagaattgtacgtatacaccgttgcttttatcccagtctcgctcattctatcgaaatatcgtacagcagcatccattttaccacttctgcagaaagaatctatcaaaatagaataagtaatatcattcggaaacaaatccttcgtccccatcttattaaaaagtgattccgccttgtctaccttcccatctttgcacaaagaattaatcaaagaattataaacaaataaattaggtacaaccccaactttaccaacatcattaaccaaatcaaaagccacttcaatcatccccttcctcctcaatccctccacaacactcgaaacggctgcctcgctaggaacaagcgccaattcaatcatctcatacaacaatcccataccaacctcaaactcttgaactctacaaaacccaagtaccaacgtacaatacgtaacaatatccgctctcaatccctttcgactcaacaagttcttaacctcaatcgccttactcgctttgtagctcttacaaagcccatgaatcaacacattatacattacaacactcaattcacacccattagattcagcacaatcaatcacattctcagcttggttaaaatccttcatttcacacaaacttttaacaacaatggtgtacacataaacatcaggctgaagacctttattcacaaactcataaaacaattcaacaacaagtttgaattgcctaattctcacaagcccattcaacaaactactcaaagttctaacctcaggaattaactccaccaatctacaatccctcatgagtttcaaaactctaacaccatccataaatttcctattttgaacataacactgaaccaacaaatcaaaccctaaagaagattcaaacttgaaactctgataagtatctaaaaaacaattaaatacctcattaggatttaatccacgaagaagaagggtttgcaataacgacgaggctggccaaaacagcttagactgaaccaaagaatgaatcagaatactaaacgacgtcgttgaatgagtaaagcctctgtgaagacctaagaagttgaagaatctcaaggctaacctggaatcatccaaagttttgatcaacagcttttctatatggtgaggcttcaatgttctggaaatgaaggtgtcgtttaatgcaattgtccagctcttgtcaccgcgtactatgtcgtttaagatcgaaacgaagcgagtgtcgctttcttcgttgttacctttggagaaagtgcagaggtttctgagatttcggagaaaccgatgatgatgttgatgatgatgaggaagagctatcctcattcttcttctttgttagctttagcgaatggaagaagtgatcggaggggaaaatggcaacggagcaaagcggcgaccggagagccaatctcgatcggagggagagagattttcagaccaaatctcaaactcaatttaggaaaggaaagagaaggcccattatgtgttgggcctaaagcccaagaccaagcccaatatgtgatgttgtagagataattacataaaacattaatttttgttttataattttaagtttaaagtttttttaaaaatttttatggtattttataaaaacataataaaacaagtaacaacaaataacaataaaataacaagagtataatgtaaaaaatataccaaaaaatcataatttatataa

SEQ ID NO: 110608 - DNA, 8750 bp, Cannabis sativa
  modified_base (1498)..(1499): a, c, t, g, unknown or other
  modified_base (8709)..(8718): a, c, t, g, unknown or other
ctatgcttcccgagcagatgtttcaagtggattccacgtgtcaccattcatgtgatgccacgtcagagtgcaaaaattaggataacaataaattttctcccaaatttacaaattcaaaatctaattacttaaattctatcaccaatatcaataccaattcaaaataaatccaaaatctatctaaatttaattcccacaacacatccaaacacattcaagaaaatacaaattcaattctaatttccatatccacaaaaattccatccatgcaatttatactaaaaccaatcaagtgctattaaaaaagcaaaaagaattagaaattacctcaaaagttacttgaattctcaaaagccttgaagaaaatttaaaaagttattctcccttcaccaatgtgtggccacggcaacaatgaggatttctaggagttttttaaatttcaaatgtaatgagtggatgagaagagggaatggaaaataataaaaaagaacgaagagaaaaaaaataccttgagtgggtgtgtgaatgcttaagatggaggagttgtttctctttgaaagcttggatggaatgagtgaagtttgaatgtgttgttggaagagagaatagcttttatttataaggaaaagaggccttatggtcgtgcctcacatatagccatgggtttctaaaaatacccttggcacatttggcacatgtcttttattttaagtgctaatgacactcctctcctttttgtcacttgtgttgataaaatttgtgatttacacatttaattatgtgaaagaataaaaagttgtcatccttagacaaattaaatttcttttcacataattaaatttaaatttcacaaatatcgagaggagtcaccaagaagacacaaccgactcgcaacgacgaaagtctcaatcgggtactccaagagacaacgaaataagcaaaaggcaacacgcttattatttttaagacatgaggggtacaataaaaaaaagcctttcccgaaagtttttgacaaacacttttaggggcaaatgttatacctgattttcaaaaaatcaaaaaaatcaaccttgcaactttgaccaagacttataaatgtcaaatgagttaagaaatctttcttgagggtcccgtggcacctctagaggactcaaaaatattaaccaaccatttggtgtcgggactcacacacccaagtgtgcccaaactagggttcatgggcccgcgcaagtattttcaccctagagatctcaatttgccaagcaaactaacaaggacttgattaatttgggcatgaaaaggcttaaatttgtgcataaagtcaaaatggcataaaactcctcatggaatagagcctatgcaccgacaaccatatggagatggtagtgctctctagtttttagagaacactgccacaaggaaatggcagtggtcgaaacctacaaaacaccaaggaaaacttttccaaatgtgttccctcaacaccaaggagtgcaanncaagtgaaagaaaccatttctcaccaaggaaaaagcctagccgaccactgccatctttgtggcataatgagtggcagtggtcgaccacaaagaatgaggatgtgatttctttccaaaaatgcatatttaccaataatatgtcaaaaccaagtgaaagaagtcaccaagtggtgtggaaaccacttggccaaccactgccacatttttggcataattggtggcaatggtcgatctccacataggaggaggagtttcattggcaaaattgaattactaacatccatgtataaaatacaagttaggaaattcacccaaggctccatagcccccttatgcgaccactgccacttttttagcaaaaaatagtggcagtgctctcctaagcaattggccaagaaccaatgtgaccaaagtaattttctagcatccatatgactgaaataagcaagaaacaccatccatggcttcgcataagccatggacgaccgctgtcacttttcggccccaactagtggttgtggtctcttgttagggtttcggatgtcaaaatgaggttttgaggtactgggacaaccaaaatatgattcatcatcaaaaaataagtcaaaacacatcccgaggggtctgggaacatgcacggctggaaacaagtcaaatatcgtgcagcctttctcatcatcttgcgagcttcatttctatcattgggaagtactcttattgtaggtcgcaatcggagtaacttcttatgggtaagtaatgcttggctcttcaagatattcaactgggacaaggttcattttttctgtgaccacaatacttgctagtctcgccaatgcatatgccttcacatttgcctccctcaggattttccttatggtataccctttgaactgtggtagtagatctttgattttgctaaggtacgctgctatttttttcacctcttgccatgtattctcttaagacgtgtttgactaccaattgtgaatcactacatatgtctaggtgttcgacatgtacttccctagctagcttgagtctaatacttagcgtttcatattctgcttcattgttcgaagtaggaaatccaaattttattgccccatgaagcctttgccctttcggggttattagggcaatctctgtatcagaaagttacgtagtcgatgacccatctattgcaacttctagataggaccctgctcttgattcttctttggctttttcttctgctcttgttcttgcttcttcttgggctcaatagtatcttcaacactaggatctttattgtttgtgcatttagctataaagtctgccagagcccgaccttttattgttatccttggttgataggtgattacgtattgtcctaactcaatttcccatttcaggagtcgactaattgcatctggtttatgtaaaacctgtcggagtggttgattggtatacaccttgaagggatgagcttagaagtaaggtcgtaactttcttgatgcgagcaggacgcaaaaggtcaattttttgattggggggtaccgactttcaacattgatcaatcttttactgacatgtacacaaagtgttgggtgcgttcttcttctctgattaggattgcacttaccacgaattctgttactgccaaatagatccctaattcttctccatccaagggcttttataggataggaagttgtgcgagttgtttctttagtccttggaaagttgcctcacactcctcggtccatttaaacttcttagttcctcgaagactactaaaaaaggaacacatttatcagtagactttgacataaatctactaaggtcgactatccgaccatttaggctttggacctctttaattttagtaggtgatttcatgtccataagggcttgtattttttctgaattagcctaaattcctcaggcatttacaatgaaacccaagaacttgcccgaacttactctgaatgaacacttgaggggactaagcttcatattatatttcctcaaaattttgaagcattcatccaagtcctctacattctcctatccatctatactttcatattctgaccaatatgatctttgaacatttggttgactaggcgttggtaggtcgctctagcatttttttaacataaatggcataatcttgtaaaaatacaaatagacacgtgttcaaaagcttgtatgttcttgatcaggtgggtacaccttgatctggttgtaacccaagtaggcatccatgaagcttaaaatctcttgcccgacagtagcatccaccagctaatcaatcttgggaagtgaaaaacaatctttagggcatactttattcaggtcggtgaagtctatgtctactcaccattttccattaggttttgggataagcactgggttcaatacccaaaccgggtaaaatgcgtctatgatgaatttactggctcacagcttttccacttcctcaatgagagctcgagctctttccttgtcaagcaatctccatttttgttatactggtcagaaattgtgagtatcaatgtttagtgcgtggaaaattactgatggacatatcttaaccatgtcattatgtgacatcaaggtttttccttagaaatttgatcaaagtgaattttatttcactcagtaaacctcaacctatcttaattatcctggttggtaatattaggtctatctttacgtcttctaattcttccactggccttattctagtatcaaggtcccctaagcagggatccatctcactattctcgtattgggcagatccctatttttttcagtttgttcgacctttgaactttggccgaactagccttccttctttgcctttatgattgtcaggctatctgttagtctccctttatacatttgaccctattatggaggggaactttacacaaaggtggtagatggaggttacagttttcaagtcatacagtgttggtcgtcctatcatgacattaaaagttgatggtatggctatcaccaaaaattgtgtcatcattgtgctacctgtgggcactttccctacagtgagggggagatggatgactcccagaggtgtgatagtatgggctaagaaaccataaatcaattgggcacatggaacaaagtctttgagctggaggcccatcttctggtatgttttcttgaagatgatgtttgatgaggccccatcatcgatcatggatcgtgctatagtcatgtttatcattttcaattccacaaccaatgggtcgttgtgggggtaatggacgtgtgcacaactagcatcactgaatgatacaaacgtgtcatccaatcatggttgtttagaagttcattcatccacgaccagtgcttcctccctttgctcatattagattgtctaagcatatctctcctgcgctttactagtatccctagcaatatgtggtactccaactatcacactaagatgtccatccactggggtggtatcaagaaattttgtgcattatcctcttgttgaggaggtcgctgaacttgatcggtctttacataccaattcaaatggggattagtcctttgaatgagggattcaatttcctctttaggttgttacactcatttgtgtcatggccaaagtcttggttgaagcggcaaaacttggtggtgtccattttatttatatcttttttgataggagggggccttctgtaaggtactgatgactaggttgtcataaaaatattttcctaagtatcaatgaggatggagaaggtagtgtactaaggagctctctctctctctctctcaaggattttactggttggtattatttaatttccccttcttttcattgttgttgtcgtttccattgttattattattgttgttatttctttgtggttggaaattttggttgttttggacagggatctttcctacactgagactgccaaggtgaacactgtcgactcttcgttctgcctctttaagttttatgaacccatcagctcggtctaaaaattctttctttgaccccacggcgagtcttttgatatcaaaccaacgtcttcctttgggctcaatcccacctaagatcgttgccagctgccccccgtcggttaaagctttgaccttggtggcctctgccatgaaccgctaaatatagtccttcaagggttcgccaaaaatttattttacttcgaccaggtcttcgagcttagcatgtaattggtaggaggaagagaattgggtgtagaacttagacacaaaagcactccatgagtcaaatttcccatgtgttatttaaagtaccattgatgtgtggattctgccaaagttgcaaggcagattatgcacctgacatcccccttttccttgtaggttagtctgtatctcaaaatacttgatgtgggataggggatcttcttttccggtgtaaactttctaagttggcattttgaacttggtcaggatttccaaggaattgatccaaggagtgaatgaagaaccccaacttcaatcgagttccatctcagtggattttgggccagttaggctttgtaccaggcttttaagtaaattcagttgggcttgcatccctggatctatttgtgctacctattgaccgacttgtgtggccggctgttgacctgggactttgtttggtatgaagtttccttggttatttgggataaagttgttctaattattcggaacaaagtttccctaattgttcgactattttccctattgtgggtcaaagttcgaatcctaattttctcttcttttgtttaggtcgtcccataagtcatcgctaggacttggacccatcattcggaacaccgaatcagtcttgggtctccaactagcattttgactttttgccctttcttgcctttgggagtttctaccattgtggccattgttgcaatttctctggccatcattatgactgttgttttggttggcatggagattttcacgcctttgttgtcaattgtcatctcgggctcagcttttggcctcgtcattttcatatttgtcagaatattgttgatgactagagacttcggggtcatctctccttcttcagccttgctgttgttgctggtcgttgtttcgacatagataacacttggaccctttggtttccttggtgtgagacggctcgtcctcatgaccctccaacaggttgagcaggcatctcattttttcttccttctgaccatggtcaacacttattttgattgtttttccttaggtaatgttcgaacaagacttgttcatttgtgagtggcctttgctagttgttcgaatgtgccctctaatctggacgaccattcccctggtgaggccttggttggttattgggacgtttttctgccccataggtgggaccctttcccctattattatttttcctatgcgactaaactttaatttgttatcccagcttaatgtggaaaatgtttgataatttatatggcctatctcgcctgatggttaatttcatcttgctaggctcgcatcttttgggcagtacagtccatccagtcctaaaactcgcgacgctgcttatcgaaggcttgattcatggtggcgcgcgtttcctcttggtcatggtagaggctattagtgtgcttttggacctgccctagaacctctcgaagattttctatctccacattatcccccaggtcgacacgtgattctcaactgaaggttggccagtccaagctccaacttttccaatgtacgacatgctaatgtttctgaactcctacgcaccaggagtaaatctgtgggtctcaacagtgaccctggccgaggtcctgacctctgtcactttggaaattgggtcaccgacccttgttcccattggggcactgttgcaaggtagcaggcacacattgggattgtctgtgttagtattggtaggcccctggacatttggatcagtggccatcgggtcatgtggttagtgggagaagctctccttgtttgaaccattgtttctgaatcgaagatgattcaaaaattgaggaaatatgaatattttgtgtagagcgaagtgttctttgctctcaatgaaagtactaaaatgttgatcaatggggcaaaaaacattaaatgtgatccaatgaactctcctaatttcaaacataagattagattaggttcccaagtctatagttaactcctcaaaatgggagttcgaatgtgccctctaatctcgacgaccattcccctggtgaggccttggttggttattgggacgttcttctggcccataggtgggaccctttcccctattattattttccctatgtgactgaactttagtttgttacccccagcttgatgtggaaaatgtttgataacttatgtggcctatatcgcatgacggttaatttcatcttgttgggcttgcatctcttgggcggtacgatccatccagtcctaaaactcgcatcgctgcttatcgaaggcttgattcatggtggcgcgcatttcctcctagtcatggtggaggttattggtgtggttttggacctgccctagaacctctcgaagaatttttatctccacattatccctcaggtcaacacgtgattctcaactgaaagttggccagtcccaactccagtttctccagtgtacaacctgctaatgtttctcaactcatacacaccaggagcaaatctgtgggtcttaacagtgacccttgttcccattggggcactattgcgaggtggcaggcacacattgggattgtttatgttagttggtaggcacctggacatttgcatcagtggccattgggtcacgtggttcagtgggcaaagctctccttgtttgaaccattgtttctgaatcgaagatgattcaaaaattgaggaaacatgaatattttgtgcagagcgaagtgttttttgctcttaatgaaaacactaaaatattgatcaacgaggcggaaaacattaaatgtgatctaatgaactctcttaatttcaaacataagattagattaggttcccaagtctaaagtacaacgcctcaaatgggagttcaggtacaccctttgtgtttcaggatacagaaaagttcttttgtctattttctttttgtatgattgtgtacgttatagttatttaagaccacttataaattttcaaaaaactctaaatttttgatacagtagaactgttgggttttatgcccnnnnnnnnnntccatttcaatgtaatccattttattcaacat

SEQ ID NO: 110609 - DNA, 5387 bp, Cannabis sativa
tagtccgttggtggctccgaagccgcacaagaaaagaaagggggggggggggttggggtggtcgccagcattagggtttgcttttagtgaagaagaagaagaaaagaaaaaggaaaggaaaataattattttttaaaattaatattatgtggacccctaaaaatttgtcacgtgtacaagtgtatacaattggattattcaccgtggcacttaactgtgctttttggacggaggggtatatagtaaaacagaataagagtttaggtagttttgccctgaaaaattgatttttgtagtgaagtattaaaaaataaggaattaccccgtatactatttttttaatttttttttcagtttgagtttctgaagtagttacaacgctaggtttctatatgatttttttgttgctacttaggttgcagcgcaataaagattcttatgtagaattcagttaaaatacaaacaaaaaaattattttgaaatgtaaaagtaaaaaaatcccaattaaatttcaagtgatttagctgccaatatctcccgaagatttgtgtttatttcgtgggcgtttttgagtagtgtgactcattttgccggcattaagcattaacctggccgattacgtggcatagagagagagaggggggttctgttctgtcagtgatggacaggagtaggaacttccaacgtcgaaacccttcttcttcttcttcgaacagttcccgcttcactgcctccaaatcctccaatctcgttccttctacccctaaatctggtcccaatacccacgataacactcgccatggccgaagcagacctagatactccgctccacaaggaccacataatccaaatgacctttccgatcttcccaccattgttggaacttgccctttcatgtgtccaggtgccttctcgatcaccaattccacatggcttcgtcttctccttctcttttttttttcttttattttttcaaaagcgactacctttatatgtatatatttatatgtatatttaagcgcagagggggaaagaacgcagcgtgagagactaagagatttggctgtgttcgagagactgaatggaaatccagctctatcttctccaagcttggccgtcaaaaaggtttttttttggaacttcacccacgttttatatatgtatatatatatatatatataacgtagttataaattggtaaattgtgtatgtgtataagctatatatattacatagttttagataataagttctttaaagattaagtttgcatcaaagaatctgaccaaaaaaagctgtttgcatcaaagaaatggagaaagaaatgaaatttaatattgggggctcatgtttactagtaaagttattggttaaagtcctttaaaagcttttgatgcagtcccttcaaacaaaattatggaattgttattgttacattgtattagaaacacattacatgtgtatacttttactcgtaaatataaaaaagcacatcaattacgctgttatgctgttgagatatatagaattgtgtgtaaacttacctatacatttacaaaatcacatttgtatgtacgaagtttttatgttatgttatgttcaaatatgaccaatctccaaatgagacaaacacatcccgtgtatgtatgtttggttagttggtgtaagggatgttgtctccaaaaaaaaagaagtgtttggttcttgtttttaatataattttcttatgttattttcctgaacagttctgcagaacgataaccacaaaggaaatgcataaatcagatattcggcctctacctgtattagtagagacactgaactaccttctaaagttgttgaattctacagaacgctcctttgaagttattcatgacttcgtttttgataggacaaggtccataaggcaagatctaagcatgcaaaatattgtcaatggcgaagttatcaatatgtatcaggaaatggtgagttttcattggataaactttgaaagatactatttgatgttaattattcctttccagcatcatgcttgtatttgacgttgttcttaccttgtacatgagagtttatgttgtgtagttgaatctttattttatggggaaacctacccatggatcttagtaggattcagttttaagttactgatgcctaaaatttgaatataactcatatgaaagttgttacaaatttcacttaaggagtagtcttttgcatctttatacaaacttggatgtataataatttgtctgcagtttataaatcatgggagcttgtattgctttatgtgatataaatgtcccatgtacaggttaaattccatgttatatcacattacaagcttcgaagttgtagtaattctcaagatgcttcttcactacattaccttaacatggagcagctcactaagactctgacatcactattagatttgtacgaagccaatcgaagttccaattctgctcgtgggaatgaagctgaattccattctttttatgtgcttcttcatcttggttcaaagagccaactgatggttgatttctatttcatttcttttttgatcttttttaatgtccaattgatgccttgtgctaagtcctaacaacatgcaatatagctatttctgatttgcagggtgagtcattatctttatggtttcgtcatgtgccttccttaatcattcattcaaaggaaatgcgctttgctcgggatcttttaaggttatcataaatatagcagtattaattttagtattttgtagctctgatgataaatatggtttcatgttgtttcttttctttcttttcttcggttgatttgctttactgtgaaaatgtttagaactgtaatctgggtttgttttcacaacagatttttcaggattgggaattataaacgtttcctaattgctatagctgctgaggcatcatatcttcaatattgtatcattgaaccttatgttaacgaggtaatcagaatcactacattctctcacattttagttctgtcgcttccagaactttttatacattgtgctacatctattttacgccttttgacctcacttttttgggttttgataatataaggtccgagcattggctctctcctttatcaataatggtgcgtacaagcttcatccatatcctctgatacacctagcaaagcttttgatgatggaggtgaggacccctattgactatgctaatcatctctttacatgatgtatttgctagctgttttaattccaaaacctgtatggtgtaatccaggtatcagatgtggagtcattttgcaaagcttgtggtctggagatttgcactgatgaacaaggaaataaggtgttaccaaccaagcaaaccacattttcttgtcccaagggagggtttcagcgttacagctttaatggtttcggacggtttgagaaggaactctaaattgttcccagtggagaaagtaaagtgatgagacaaccatttccagcctccatacctaaatttgatacttcgtggtatgtaaattatttcaggtgataaaacaaataactacatgctgatttaaaaccactactcaactgcaacagcttccggtgaggctgaagcattcatttcactgtctatttattttaatagaataaactatagtgatggtaaccaagtgccctgttatcataatcttcaaagtgaaatctctaacatttttagccaaatttgcttatccaagtcgtaatctttgtatttataaatttctacaaaaacagtgtgaagtattgatccgttctcattttgttcagttgctcattgatataaaatatgtgtaatctttctcttctttcaagtgcattttttaaaatatcaagattagattgtgattaccagaaatccagcattgttcttcttcacgtttaagcttttctatttttcttttaataaggtttatttgctcaagttcattggaacatttttaacacgtcatcatctgttgaagcagccaaacgtgtctcgttttattatgatattttgtaagtctttttattatggtattttaaaagatcgtaatcccatagtcctcataaattatcttataggaatcggttccttaacacttgttaatttattcataaatgatatttttacatcactagtaaataaaactatgcatataatactgcatattagcctattaggtagacttttgaaagagattactttaaaaattcttaaactatgttgtattccaagttgagtattgccaggacagtatactttaaatattacacaatcttctgtcaattaactctaatgtgtcaaatatgaccatactattttaatacatgaaacaattaacatatagaggtaactagctagccaagaagacaacaatttttgtctgtaattctatgtctattagacctgtagtaagcaccaatgagttaggcattgacaacatctgaaataaatccaatgattccaacgttacatatgaattcttttattgttatctcccctctgcttagaccccaaagaaaaaaaaaatgacatacagcttcaagcccaaagtaatgtaacagagaaaaatagtaagagtgcaagtcctaaacagaatgaaacaatcaccatggaagcctggaaaaacatttaaagaaaaatgagaagtgaaaaataattaattgtaccaacttaaagagagcctgataaaatttatcttggtaccttgccctgagactcaaatttaaatttgacagtaaaccatgttaatcctctgtccacgaatggagcgagtgcaagtgccctgagtttgaaagttcttattacgtatagtactcggataaaaaaaaaaaaagccttaacatttatagatgcaacactaagaagtgccttcattctatgtgtgatcgttgtaaaaattgaattaaatttactcttgcaaatcaagacggcacatgaatataagctgtgagaatcatgataaactacctactttattgggctgacaatgttaactaacttaactgataatagctctaatatccttttatttaagagacagaggtcatatgcctatgactgagctccttccaaatatattgagagccctgtcttatgtctatgactggccacataatgctgagaaactacttgatacgctacccaaactaatactggacagtggacagaaataaaaggataaatgtctttgtatgtgtgtgagtacgtgtatatagagttatagacaaaaacaagaattaacttagaaactaggcaaataaaatagtacacaagtacaggattgtaaatctggaattaagaagctcaccctccagccctaaaaatcttagtaacttggcttccagcccacaccatggccattattttgaggaacct

SEQ ID NO: 110610 - DNA, 1974 bp, Cannabis sativa
ataaaatattcatttatcagaatcaataatattattttatttccttaattagaaatattctaatatattaaagatgatataggcattattttgtatctcaacgagttagtgtttggattgtcgtttcgtacttgaggtggttgaagcgttggcaattcaaaaagctttgcatcaatatctttcctttgggtataaaaatattattattgaatctaattgtttgagtgtggtactgaaaattaaaaaaacaatttctgttatcacttctataaatttattattatatgatattcttgatttttgtaatagacttaaaattattagttttgttcattgtaagagatcttataaagatgttgttcaagtgagtcataattatattccaaatctcttaatagtagatgctagcagatacgttatttttaaatgaattctcactctaccgtttttgagtatgttttgctcttaatgtttggtagttgagacactttcttaaaaaaaaaaatatgaatttgtaactgcttgcacaatatgggaaaacaatttgtgacacaacttctactaattaaaaggaacaccatcaaaagagaaaggaacaataacctaaattacatatatacaagtatgttatataggagtcggaacttgacctctttgttttcaaggaagccccaatcactatgccacatgtgattggtaggccattgtaatgttaactgtgttttccttaatttgagacttcttcaaagctatataatgactaaattgccattggtatcatttattatgaagaatttttaatttaattattatttgttttttgtcaattttaaagtgacacatcactcatggttgaagattttgcaacgttttgtagtgtgtgcgtgtgtttttctgtctggtaaaagcacttgtcaaagtggaaattaaaaaaaagagtaattgattagtgtgttttccatacccttgtggatcctagtcccaccctaattcactagcttttcttgcacactactccctaataagctgtatatgtgtcaaaagttatgaggtggaatctgaacattattgaatttcatggagaaaaatcatgatttggacatgtatttttcaataacaacaatgtattaacatttatgaataatttagtacagtaaattgtatttatgaaacttgaatgaatatcaaagaaaaaagttgaagggaatcaattaattaatttcacacgttatattaacaatttttttttgttcctttcccttttcacaaaattggttagttgttttaaagggaatggaaaactcagtagtgggaacaaaaagaacactttaatgatcaaaacaaaaaaccttagttggcttgccttgggtgccacctagctcccttagtctcaatcaatatattttgttttctaatttgagataggttttattattccaaggccacactttccgcgttggaaggatataggaaatcagattctagtataattaattattagagttcatagggattaaaaatgttatctaagctttgtattaaaaaaacattaatatttttaattacgtagcagctaataccattttgggtagtttagtttcttgtttgcctagaatgatgtgccacgtgtgcgtcgaggtcgagtggtatgaaattataattctaaaatatttgcgagtagttttatataaatatgaaacatagtagttttatatgatgtgatgatacatataattttgtgtgaattagtggacaagaatgaatgtagattatattaaagaggatggtgatatttggacaaaatgtttggtgatgtggaagaatcctttcaagccgattgggattattgggcctaaagatctaattagatttctttgaagagaaaattacttgtatatctattttattttattcatttttatttttactagaggcaacctacgtgcaatgcacgttttgttttattgttctttt

SEQ ID NO: 110611 - DNA, 2653 bp, Cannabis sativa
aacctgctattgcatagaaattggtaataggaagataatcatattaggtcataatcagtagatacaattgaagtcgaagccctaactttaatcactactaatttctcttttgaattattttctttttaatttcgttgtctctttagtgttcttagatttaattttctcttaattttgaattcaccaaacagaagtaaagatttaattttaaagtatttaagtacaatccttctgggatcgacctcactcctggtgaggctattacttgttacgatacgtacacttgcgtgtgaaaattaccacaacagcaacactgccaatgccatagtctaatcctcgaattggctcacctggtgacacaacagcacccctacctccactcacactaataccacaagactacaccacataaacaccagattagaaagtggtattcacaaaccaaaagcttatactgccaccaaaaatctacttcctaagtctattacccactgaacctaagtcattaaaagttgccttcaacagtcctcaatggtttgcctccatgaacactgattttactgctttaaagaaataatgcacttgggcccttgttccatatgagcctcacatgaatgtcattggcaaaaaatgggtacataaagtcaagttaaacagagatggctcctttgataggttcaagtctcaattggttgctaaagggtaccttcaaacacttgagattgattatgaggacacattcagccctattgttcaaccagtaactgtttgaagtgtcctaagtcttgtagtatctcacaactcgccagtcaaacaactagatgtgagtaatgcatatcttaatggcaccctccaagagatagtctatatgcaacaacctccagggttcattgatcaaaaccagcccaaccatgtttgtcttctacataaagcactttatggtcttaagcaagccccaaaggcttggaatgacaagctgaaacaaacattatatcagtggggtttccatgcatccaagtcagatacatcattgtttattcgtgattcttatggcagtctaatttatctcttggtttatgaggaagatattctcatcataaggccaaactcgaagttaatcaactccattatctctaatctcgatgctgccttctctctcaaagatttaggtcttgttcactattttcttgctgtggagatttacagagatgatacaacaatgtatttaagacaaagtaaatacattgctgatttattaacaaggctacacatggagggagctaaatcctatccaaatctagccaactctactgccaaactcagcctccatgatggtgatccctttgaggatattagcctctatagaagtacacttggagctcttcaatacttaagtctaaccaggcccgatgtttcctttataataaataaactgagctagtttatccatgcccataccattactcattgggaagtatgtaaatgtttgcttcgttacctaaaaggcactatctcggatggattaaagcttcaagcctctgatagcttaactctttacgggtatagcgatattgattgggcaagttgtgtgggtgataggagatcaacacggtgttatgccatgtttttaggcaagaacttcgtgtcgtggtctgctaaaaaatagtaggtagttgctcgatctagtactgagagcgaatttagagcattggcaaattcagcagcagaagtaaaagtggattacttttctcctatctgaaatccaagtttcattgccacaagcacccgttttatgggtggataatcaaggagcaacaaccttagcagcaaatcccgtgtttcatgcatggtgcaaacacattgagattgacttgcttttcgtacaagattttatcattagtaaacaacttcttgtacatcatgtacccttagtggatcaaacaacagatatccttactaagtctcttacaacttaccgctacaattatcttaaaggcaaacttcacatggaaaaatcatcatttcgttttaggggagatgtaaatcaataaacttgtgtttgttacaagttagttggttgttgttgttagttagttgtagtctttctatttatttaaaaattctgttatttgacttgccttgtaattgttctatataaataaaaatatatcagctaactattttggttaagctctttttggctatctctgtttcttgctatgcattatttttttcttcccctcttctctgtcaccttgagcttctacaaccatcatttccccctctctctctatcatatttctcttaatttctccctccctctctaattaatttttgataaaaataaaaaaaataaaaaaaaaagccacgactgcccaagccttcaattctatcaccagatttcctactttcggttaaggtaacctccaacttttattttaatttttatttgtgtatagtgatttggatttaattttgtgtatatatatgtatagttagaaaatatatttatatgtatgtgtgtatatacgaatatgtgtggatatatatgagtgtgtgtgtatttttgtgtatatatatgtgtatgtatgtatatatatctatgtgtatatatatgggtattttacaattttgtatacattattttaattaa

SEQ ID NO: 110612 - DNA, 3030 bp, Cannabis sativa
tttattatttttaatttatttaattttctctattttttcatgttatttgctaatgaaagataattaattatttgttacattttaattcttaaaatttaatatgtgttaatcattcattatcagtgacttttcatttttataactcttactattattattattattgttattattattgttattattgttgtaacatatttacttaataactaatctcatacatatatatatatatatatatatatgagagcttttattattttatatatgtgacgatatatttattttttaaactatttctctaaatttattttacttattagattttgtgtttttatttttcaatgctccttatatataaaatgcaaattacaaaaatgatgagttgactctctaaaatttgtcaattttagattatttattttgtggtttatttagtttaaagtaattttgttttaaaaaaaaatttaaatctttcacatattttaacatattaaaattataaattttaatttttttttatagaatattaacatattaattaattaatatatatttttttaatatattaaatttaaattttattttttacaacataaataaatggtttttaaacaaccgcgcgaggcgcggtatcgttacctagttaattatgagtctaaattttgtcagaaaatatttttttaagcatgtaaaatgaaagttcctatttacaaagacatgtaagcatttaaagagtataatgagacacaacctaacataatgattaaatttttaaaaatataaaaattcatgaaatttttttaacaaattatatattttagagaacagacttactattgtgaaagtgtgaaattgttaattattcaaaaataaaaactcattaaaaaagtgttacacaactacgtactgtatatatataacaaacccctcactcttcgacttactaaagtaacttaaaagaaaccatagtaaattttgaaagaatcacttttcaccatattgtgttccacccattatttgttttttttttttttgaaaaaaaaaaagggtaagtacaagacacaacacaagacacatattatatataagacctctcaaagcatcttgtgaaaaagtacactacttgtggccaaagtaaggtagaaaagtaacactctcaagcccttttcttttttaaccatttgcattgagattgagaatcattataaactaatgtgaaaattaattaaaatacaattaaaatttttgttttatcaataaagatataaaaaatatactcatttggtacttttcatttttaatgatgtttgtttagttatctgtattttgaaattgtacacattttatactctacgtacttttaatcaaatttcaaatttgatccaattactcttactaattaaattttaatttaaatttaaaattcaaagacaattatttcaaaatagacaatatcaaatatatattattgaaaacataaaatgcccataaaaacatatttgtttatgaaaggtatcatgttcataacttaaattttttgaaagcaccatgttcataactttgaatagcttagagaaagaataaaaaaaaaagaccagattgatgcgttcatgaatcatcgagctgaggtggcatcattttatatttttagagtggttggttttattttaatttttccaccttacaatataactcgtgttaataagaacccaaccgtgatggttttgattttgacaaaagggagaatatatataatccttagccaaatcaaatcaagaaatgtaaatattggaacagacagcagtataagtatttctcgactgggtttcctgaaaaaagaaaatattatacaaattacaatccatatacatatgtaaatagactttgactaataataattgtgttattattattattattattccaataacacaatagttgtattgggaaaaatgtgagaagcagcacgagggtgagcaaaacgggccgagaaagagcgagaaaggttatcgggctcggcccagcccattccttgatcaaaattgttggagtacgtagtgggatcatacgaataggatgatgaaagagtagtagtagtcgtagttgttgtatcatattcatcatcatcattataattactcttcttctttttcttcttcttgattttattcttccaaaacgcaacccaaccttgctgtgttattatgtcgtatctgctgctttctcccaatctgatcacacctgcagtccttgatgaagaagaacgactataccattctttgattctcatttgctcaataataataataataagaagaagaagaaagaactggaaacttgttagttggtgtgatgaagagtttggttatatctatatctatatatatataatatatagatagggtgacttttatgattcaaattttatacgtattgtttaataaattagtcccaacacggtgttgtggagataatattttattttattattttttttaaaaaaaaaaagaaaagagacaactaggctaagtaacttttattcgtgagatgagattttcttttcttttcttttctttttttcattttaatttagaaattattaatgtatttagtgtataatttagtttgttgattttttttactataatatttttataaggactctcacaatcaagttttaaatattttaaaaagggtaatggtgtttcttggctcctgatcaatcactgtatttttttttttgtacagaatgtgaatgtgtgccgtgtgcggcgttgatggttgtgtttgatcaaattcttctatcaagtccttttgtacttattgttatagttatagagtatttttagcagctctatctgcttcttttaagattactatatttttattgattttggtctttgttataggttattacaagtttgttgtgtgcatactctttaaggtttcttttggtatgccgtattacaccgtattgtattatatagtattatattaaattatattttatgcaatatttttatgtaa

SEQ ID NO: 110613 - DNA, 3563 bp, Cannabis sativa
gtttaaaagcataaaaattaactctataccatagagttatcacctctcattgcatgattacttggcaagaaccttctatggccaacattaaaggtcttcccaattactcgaatggaagttgtgtctccattacaagtaggaaaagctttataaccttgaacactccatccaaacaagctactacaagcatgaaaatcattcactgtccacaaaagcgatgcacgtattgtaaatatcgtgttagtcaaactatctctagtaagtactccattattccataactccttttactcgtctacctatagtcttagaaatatattcatgtctttacctgagattttgcactaggaataaggacggttaacataaaataattgtctttatcatacataaccaaggtggtaggttatagttaggcaacaccaccggccacatactctatgtaagactcatgttgccaaatggattaaatccattagtagctaaccccaatcaaacatttctttgatcacttgcaaactcaggatgcttggcatagaagccttaccaagcaagaccattaattgggtgtcgcatcactccatcatcttttgatttatcagtatgatgtcatatcatgctctttgttgtaatcctcaaactatgtaatcttttgagtcgaggtgtcaacaaaaagtattgcatcactttgcaaggaacttttttccctttactgttctcagaagtaacccagcgactacttctgtaaactagacaagcctccttagatgcattctcattataaaataagcaacagttgtattgacatacattgatagactcgtaacccaatcctaatttcttcaattttttcttcacctcgtagtacgttgatggaattttatttttctttgaaaatacaaactttaacaacttcaacaattcatcaaatatgttgttaggaatttttcctctaacttttaggttctatagcgtcgctaaaatgttgagagatgaagtccagtcacaaccaggatacaattcagcttcaatttcctcaaataagtcatcaaaatgctagtttgtggttggtccctcttgtacatcctctgttgtccgaggaaagaagtcttgcagaatagggattatttcatcctctccatcatccctaacctcttcatcatcaacaacatgctctggctccccgtgataagtccacttctcatatcctttcataaaacctcgatcaaacacgtgtgctgtcacattctctaatttttcaaacttattatttatacatctcacacaagagcatttgattcttctattagaatccttatgttctgacgccatcgctaaaaaagcttgtagaccattccaaaattttaaattggcttttagtcctatggtaaagcctacaactatcagggttattttgacaattgctttaactaaaggttggtgcattagaaaattagatgccaataatgcatttttgaattgggagcttactgaagaggtctttatggaacgacctcttggatttataaacaagaattcccttaacttggtctgtaaacttaatgaggccctttatgggatgagacaagcacctcgttccttggtttggcaagctcaaatcaactctcaaacaccttcgatttgattgttctaaagcagattagtcctcgtttactagaatcaccacttctcaaaaaaattttgtgttggtatatgttgatgatatacttgttactgaccgctcacaagtaatcattactagcttaattgctctactcaatacctctgtttctttcacagacttaggtgaacttgattatttccttggtattgagattcatcactgcactacaggtttacaccttagtcaaaagaagtatattattgaattactctgtcgtgctaaaatggataatgccaatttattgcttattcttatggcaggcagtgagaagttaattaccaatgatggtgatcccatcatagatcctcattttttcaagagtttggttagtgctttatggcatgcaaaaagatctcatgtatcattaacaaagtctcataatacaagcatcaacctcttgagtctcagtagaaagtgcttaagaaaatcttatgttatctcaaagggactcttgattatgccctacatcttcagccttgttctaacttggttcttactagtttttgtgatgttgattgtgcatctgatctagatgatagtcgttcaactattagtttttgcatatatttgggatccaatcttgtatcgtggacctctaagaaataaaagattgtttctaggtccaacactgaagttgagtataggtgtcttactaatgctacaactgaacgcgtttggttatagtccttgcttgctgaaattagatttccactgctgcctaccctactatttggtatgataaccagagttttgttctcatgtcagctaacccagtgttgcattgcagaagtaaacacattgagctggaccctttattttgtcaaagaactaatactcaacaagcaacttctagttaaacacacaacagtccatgatcaagttgcagatattctaactaaaaccctttctaacactagatttttgtttctcacaggaaaaatgagtttgtcttccttggcccagctcaatttgagggggtgttagttattattaattatgctagttaggttttttttaataaaaggcgtaaatatattaaaaccaaatagagttacacctcatggtcattacataatatgttacctggtatagaggaaggatcgaccataccaattacttctggaaaaatcccacttagccatattatgggccgcaaaattagaaagttttgaaataaacaaaaaattacaacttaaaaaaatgctagagagatgtttacattgaagcacaaagttaccaataccccaactagaacaagttcccttcagagtgttgataactgtctcagagtcacactcaatcaacacaaaagtatgcttcaaagagactactgattccaaggttaacaaacaggtcgtagcttttccaataagtgggtcagagaagttgagcatgctggtagccacccacaaaatcgactccgtgttgtccctagccaaagccaccatgcacattgaaccgtaaccaactttcacatcatagttgattttgacccaatcttttgggaggagactacacaagagactcaactgtcactagcaaaggaaccaaacaagagccataatctatgtaacacatagagatagagtaaacacaatgcttaattttacatatagaattattctaaaccttgtcattgcgggttttccagatcgtgtacaccacaatcgaagcataaaggaacaactcttggacatccactcctttagacttcaaacgtcaaaggaatttaacctaatcccaaacacgagccctagaatccataactggcatcacacacaagggggaagatgttaggttataattagcctatgttttgggtctttaaagttagcattatctcgtctattgatgtcttttggagcagttttacgcttga

SEQ ID NO: 110614 - DNA, 2737 bp, Cannabis sativa
tatgttgtttttggtttttttttttttttttttttttttaagggcagaaacttgcatttgtgaaacatatcatccttggaaataattattactacatgcttttaaacacactcagtcagagatagaaatgtccaaacaacattaacatgattagctttatggatatctttttccaatatgaatatttctcaggacttttgtgggtatactggatgactactttgagggctactataccgaggaaatgatagaatctcaggtttgatattaacattcagagttcctgaccaagtatgctgaatttctatatgatttaggctatttttcaatgcataaagcaaagccaatggatagtatgcttcaagagattctaagcatataatatatgttgttttccttttatgcgcaggtggaccagcttgtctttgaggagttgatgcgggaaagatttccgaaattgggtgtgtaattctaattatcacatatatattcctttcttctttttctaacacgaaacaatgtgggaaatttattcgtttttggcttcacttgcagttaatcatctggattacttgggagtgcaggtggcatggatctctggaccttggtttctttctattttcgtgaatatgattccttgggaaagtggtgaagattttttgtctaatctttctctatatcaagcttcattctagcaagttacattcattctcattactttgtcaatcttcagttctccgtgtatgggatgtgcttctttatgatggaaatcgtgttatgttatttagaacagcacttgcactgatggaattatatggtaatttcttacaggttaagatgcatgtacaaaacttagttcatgtatgttgctattgcgattaaagctatgtaactttgttgctatctattcccgcaggtcatgcattaattacaacaaaagatgcgggagatgctactactttgttgcaatcccttgcaggctcgacatttgacagcagtcagctagttttgactgcttgcatgggttttctggctataacagaagctaggttggaagagttgagagaaaagcatcggccagctgtattatcaatagttgaggaaagatcaagaaaaggtcgggtttggaaggattccaaagggctggcaactaaactttacagctttaagcatgatcctgcatcactgatagaggagaaaaagaccaacataggaggtgagactgtaaagggagataaatctcatctagagcctcactctgctaatctcaacaatttgcttgataacatagctgtagatccagaagtggattctctaccagatctccaagaacaggtagtcatctcatctttttctcggcaaagaaatgtatgttttatttatctttttatttcgtatatctgtgtagttgaaaacttcaaaacgtggcatcactctaattaactagaaaggttatttactgcagatttttgtttcataatcgctgtttccattataattttcaactgaattgcatatggtgagtctatgactaggtgattcatggtcatgccaatagaactttgctctaagaatagatctcaaatgaattgtatgctcccttgtcttaataattcataaatgacatgaacattgagggttgttgagggcatatcaattcttcttaccaggacacctgccatctttgttagcacaatcattgtaggttgcaggggcacaccaacacttctcaccaggatctctgcaatctctgagtggcttttatattacttagcttaaatttttcattgatatttactatctatagcatgccatagatggtaaattatcacgcatccatttgtggtgccattagtcttccaatcatagatttgaaagtgattctagattgatggaacttaacttcgtagttgacaaaaggaagcaatttatgtatgagcaggtggtctggttgaaggttgagttatgcaggttgctggaggaaaaaagatatgcagtactcaggttagttaatatgttacaagcttagggttatattttctctggagaagaatttcagattcgtttcttcatgttccatgtttcatggagacagtagttaaggaaaaacatgtgaagacatgtgaagctttttgtcctacctaattatggttgttacctacttcatccacatttttatttagtattcatgatgtaaattctaaaattttacaaaattctttttatgctactttctatttttcttttatttgatttctttctttgccattacattacaagtgtgtatttttcttttatttcattatcaaccaagcatgttaactgtagcttcaatgtatatctatatgtgtatctgtgctgatagttggccctagtgatattaactatcaaggagtataaacatccataggtgataagtgggatcaagtttctatatactcatcctaatattaaaaaattggaatctaattgacttgaaagtaagcattgtgataaaccgccaattcgttatacctatgctagacgacctcgctttaattgagatggcttatttatggaagtttatgttttgtctctactttatgatttattttgaattatttgtttttgttagtggtctcagctttgtttggaaagtttaggtgctgtttggtaacacttttgttttttaattttttaattacaaaatgaaagtaaaatttttgtttttaaaaaatttattttttaaaaacaaaaa

SEQ ID NO: 110615 - DNA, 6437 bp, Cannabis sativa
  modified_base (6366)..(6389): a, c, t, g, unknown or other
aacaaaatttaacgtgaaaccaatcttcatattcacgtcttagtagtacaaattcattgtgactagtggaaaaaaatattctgagatgggtacaggccacatttcacagaaaactaaagagcgtccaatagaaaagtgatgcaaaatggtattggctttgtccctgtgaaatttcactattttttgagatgtgtagggttagattttaactaacactaacgagtgtaagagtaaggaaaaaatttattaaaatttaatctgaaaagaagaatattttcaatttttgaattaaggggccattttaaccaaatttaacgcaaaactaatcttcatattcacgtcttactagtacgaatcattgtgactagtgtcaaaaaatattctgagatgggtctaggccacatttcacaaagaggtaccactattagaaatgtgagattttcacaatttcgattaaaatgattgttagtgcatgaaaactactttttctctcaacgtctccaatatgaaagtgatgcataacggtcttggctttatccccctaaaattttacgatttttcgagatgtgtagggtgagattttaacaaaacaccaacgagtataagagtaaggaaaaaacttgttaaaatttcccgtgaaaagaagaatattttaaattttgaattagggcaaattttaaccaaatttaatgcgaaaccaatctttatattcacatcttagtagtacaaatttattgtgactagtggcgaaaaatattctgagatgggtccgggccttactctaagagacccaaagaggacgacgtgcttaggcatcttgcagatgcagaagagtggaagcagtttgtcagacaccattcatccttcgcacttgaacctagaaatttgaggttgggtttggccactgatgggttcaatctatttggtaacatgagcaactcttacagcatgtagccagtgatcttagtccccccctttgaagtgaatgaaagcggagtcattgatgttgtctttactcattccaaggcgtaccgccctaggaaaggtatggatattttcatgagaccattgattgatgaattaaaagagttgtgggagataggtgtccaagctcgagatgcttacaacgggactgtatttatattgcgtgttgctattttctgaactattaatgacttccctgtgtatgcattgatgtctggttggagcaccaaagggtacaaggcgtgccccacttgtaacgaatacactccttccattggattgcacaacaagattgattatgttgggcatagacggtttcttgaaatggacgacccaaggcagagaagtaaaaaatacgatggggaatttgagaaaagaccacctcctccagaattatcaggggttgatgttttagcttagctagagtatatacaattttgtttgcctagtgaacacaaacaatttggtggagtcaagcataaatgttctgttgatgagctaaattgatcaaagaagagtatattccttgacataatgattcacttagtgatgcatttacctaaagaaccgatacttgggggaccattgcagtataggtagatgtatccaatcgaacgagccatgtctttgtacaaataatatgtcgaaaatcgttctcgactagaaagatctatttgtgaagcttatgtggttaacgagacattaagtttttattctatgcggtcaagattatattattgtattattatttatgattttttttgagagatgaaattttaatttaaatcatattatatttagagcatttagttctttcaatattttaaaacttctccatttagatcacatttgatgtaactgctcttataaaaaccgatagcacaaccattaatggtctaacataagaagtcgaaaattagagatgaaataatgcaccgattgagagatatttttaaattttcttagtatattttcaattgatgtgaagtttgtttttaattttatttcattcatcaaaaataattataatcgagcacattatttaacattattaagatttaatttcaagattaatgatgtatctttgagggttgtccttaattatattatatactgatataccaggcaattaatcaaataaaaacatttatctactaaccaaactcattattgcaacacaaactgccaagattttatcataatacaaatctttttatattacttgtctgttttacaaagcaaatctgagctggagagttaagcatctcaatttttactattaagagaaacagaatctggtatgtagtctttttcttttctttaattaagagaagaaaaataattaataacaccaaaccagaagaacccctctctaatcccacacacacaaaaaaaaaccttcataaattatatataaatatatatatatatataaatatatagataaagtttgatatttaaaacattgattgatttatataaataataatatagattataattttttccttgttattattatttcttacactgctctcactacagcttggaatcttggttccttgggaaggaacttctgcttagcataaactgacatgtagtcaccaaacacaaactttggataaatctgatccaggtgtttgtgatcttgatctgcagatttctccaccaataataattcaggtgctggagcaatggtagccttgagtgatggattgtaaaaagaagcaattgatcttctattcccactagtgccaaccaaaaccctgtgccaaacactcttgtatctaccattgcttagaacctcaatttggtcccctgtgttgatgacaatagcattgggaattggttgaacatcaatccacttcccatctttaaggatttgaaggccacccacattgtcatcttggaacaacaagatcacaccgcctgcatcggtgtgagctcggagcccattcactagctctggatgaggacatggagggtagtgactcacctttgtcccgaaaaacgcttcattaccattactattaccattaccgttatcttcaactccacagttgaaggctgtcttgatgtttccctttggtaaacccaagttctcatccatcacttccatgatcttctctgctaacttctttagctctgtcctgtattcacccattgtttccctgcatgtacatgatacatcccattaactaaattacaaaaagctaattaagttaattctgattgatgatcaataataattaattacttgaatccaggggtgttggaaggccattcagcaccatccatgagagtaaaaacatcttcccaatcagcatcctctaatttgtccccattgttcttttgacccaactcattcaacaaattcatagctgttgacttgtagaacttttcttctctttccatcttaaaacactcttcacacaccctcttcaccctttccagcagcacatctgaaattccatgattcaccagctgcatatataatcattaattaatcatcatcaattcatcatcatcatcatagtctaacattttttttatgcataactataatataaattaatttgtgtagatagaagcttcaattacctgaaagaaaccccattcctcacacccattggcaatttgagccaaagtttcagctctgctctctccactattgagctttgagaaatcaatcactggaattgccatttatatatatatatatatatatgtattgagctaattaatttgtttaagagagagagagagagagtagtagtaatagtagtagagaatagaaaagattagatggagagtgtgattatggaaagaaagatatgaatctatttatagtaaaattttcccaccaaattgggatgtcaaccctttaatttgttaagtgtgatttactttgttttctttcccttttccttttctatgaagtagccgttaaggtgttggacggtgacacattacaattttaaatttataataaaaggtcaatgctttttgaggtgcattactattggtagcccacaacaaaagcattctctttcgagatgactcacctcataatttttcacttaattattatataataaataatatctgttatatacttattatttattaccatttaacccccttttcctaagtaactacttattttatagattatcccatataatacattagataacattttatctttgtttgaatttaaattgaatattattattattatttaatgtggtgttgagacactctaatagattaattaggaataaaatccttaaatttgtaatagctagatatttcactgaataatactattttattatatatcatcttaatattaatttttatgtagaagtattattagtacgaattgctaaacgatgaaatcaaaagcatttggcaacatggtatatgtgggctattatattatagctgaaatcaattaatgggtgatgaaattattatttcactaatattaatgccatatgcacattacttgattccaagtaatgcatgatattaagtgtcattcatgtgcaatatattcgcctcatttttcttgcccaaagtttcttatttattaactcaacatcttcatcttaaaaattataaaacaagtaattactagtatatttttactatactttaaaactctgccgactatttatagtaatagtagttcgacgaatcattatcatcatcatcatcatgtttgactaatttgtatatataaatatatattatattatatactttgtacagtccatattaattgctttgacttcgtactgcagatccatcgatcgacatgcgtttgatgaccaagtactgattaaatgtattaaacttactatacactgatttttaggcatattttaaggatttttagtccatattaaatgtattaaactcttaatgatgtggtaataagataaatattaacacacttgaaagttactacagccatttccaaaaaaaaaagtcttaattagtacaaaatttaattgaattattctagtgtaggtcaaactatatatatatgtcatgattaaataaatacatggcatatatatataaatagggatatgattttgtcccgtgattgtactttcacggaatgcattccgtgatgtacgacagccgtcagatgaaggacttatttgatctgacggctgagattgatttaggggtaattaaagttaaaaagtagaaacgtaccctgatactcatttaatgtaccccgagacccatctaatgtaccacagaatatattccgtgaaagtacatcacgggacaaaatcgtatccctatataaatatatatatatatattattatgttgccaccattaaacaaataaataataagaaggtagttggccattgagaattacatatggtaagagggccggcattacacaatgagaaatgctaaagagttttatatattaatattactattagtctaattaagtattgagtcatatatagtttaatataataatttttaaaaagtatcgctaactaatcgtaacgtgatatgtcgagaaagtactaagcaccactaatgcctaatagcaatactcttacataatatatacatgtatacgagacacttatttataaaaataagaagtatattcactcaactcagctgtacatgttacgttaaccaatatccttatcatatacatatcctttggattttgattccaattgtccgaatgtgagggtacaactccagggaacaaccccattcattgctctcctttgtagtacttcaaaattattgtccaaaattgcatgagagacaaatatattaatcacatacatctattgaggagaaagtgtatatactagttatatatatatatatatatgcttttttaataatttatcatgaaaaatatatctttatgaaaaattgtgttatttatatgtcaataattttttttttttaataatagtaaagaaaaaaaattgtacataatttaaaatttgatataagagaaatattgtacgtgatatataggattatgtccagaaaataaaatcaattagtaaaatattaaaaattacaaaagcaatttacttaaacaaaattagctagatgccctttaataatttgctgcaatccattgcaatccacctcgctaatatgatatctgaaacacaccaagtagtgaactcctttcatctattgatgcgtgctcagtacttcctcccgaagtaagggttttgacaaatcttctcccgaatttatatatatatatatatatatatatatatgttcacttcctcttgaaatgagacttagaaaagtcttctcccgaaaacccacacttgtgttgtgttttgtgccctaaatnnnnnnnnnnnnnnnnnnnnnnnntttactaattaataaagatcagatttcattttatgttgcatggttcac

SEQ ID NO: 110616 - DNA, 5422 bp, Cannabis sativa
ttattgtctcttgatgcttcacatgttgcttaaatattggccaacatatctacattaaaaaaaatctaattgatgatccagctcaaaatagatatgaaatattaaatttggattgacacatggaatgggaattattattattataaattgtgtattgtgtattggtttgggaatgtgaatgggtttatgtttattatatagatataaagggtgttttttgtatgagagaccggtcatccctgaaaaatatttcagaatgtggagtgggcactccattaccacaaatgattgtatgtgcgcctatttcccttacaacaaatttccaaaaatattgttctcaaactgttttccagagttgtgctttgatcttggcaatgttctcgtggatttcttagaacctaacagtctcagccagagttataagatgtatcctcgaaataccaaattttagtaaattgtgaatgaagctagatctaaatcaaatctcctctagttttctagagtctcgagttgaagttgattaaatgttaagaaacattataatataatagatctatatcatgtacaaaatacctgatgtttcatctagtgcttctacccaatcgtctgtctgagggggtgtctgaggttgcagaattggtgtttccacaggcctttcccactgacttttcccagtggtctcatggtagtagtagaaagcaccacttgaggggtcttttgcttctacctgtaataaagtcaagaagttctagcctcgtaaaaggagaccataagagaatatactgaaaataaagatctcaaaacaacttgaaaaacaattgagttgggctgatattaagaatgttgacagctacaaacccaaaaaaaaaatagatatatatggataaaacaactaaagccccaacacaagaaaataaagaaacaaaaattatatcttaaattttcattgttcagattcaattgtgaaaacccaacaatttgggccacattaaggaaataagagtttgtgaaggaaaaaaaaaacttaaattttttttttggcaaggaaaaaataaacccttctcaaggatgataaacaaaatgaaggcatagaaagtcaataaaatgtatgtaagaagttatcaaggatgacaagatatcatcttagatcttccaaaatccctaattatatcagtaaagatttcatgagaaggaaatagaacttttatatctccatgaaattcgtgacagcagaaaccattaaattctgaccacattccctgctcctaacccccaccagcaagaaaatgaagggaaaaacagaccaaacaataaaaccactttctttgtcagttaaaaatgacagaaaacacataatatttccggtacattcataaaaacaaaatgtttaaacaaagacaacaatcacttaacaatagatactcacccatccaggaggcaaggttgccttttctgtgactttagttgaactagtctccaatttctgaaatcaaacgttaaatgtatgtgttattaagtaactagggataattaattaaaaaaaaaaaaaaagtaactagggataaaaaaaaattaaaataaaacgtgaagaaactgaactaaaagcaatcagatggggaaaaggtagcaaagatatatagaacacatacataaactgagaaaaaaaaatatagttgaattttgtcatgcagggatcgaattgttgagcaaaggtcaccaccctccctccctcccttcctttttgagaggggctattaggagagatgataattaaccagtgttgtccaagttgattagctaagttttatagtcgttacaagctataaaaggcaactttaatgcaactcagatcattctttacgattatttctctactttaccaaatatggtttgcagccttgatcaaactggggtaaatgaaaagagagattgataaaatagaaataaatcaccacaactcactgaaatgctttcttctggctcatccttaaggatgccccttgctcttaacttttgtttaagatacttaggcaactctttaggcgtaggcttatgttctgactctccatcaggcagagaacttttctcatccatttcattacttccagctccaatatttcctggacatcagatgtcacaacccagtaactaccagaatacaaagtagtagaaataatttagattacaatcaataaaatgctccaattccattaacaattcgtactatcaacagaaagattaattcaccaaccaccagcataggcacctccaccagggactccatatccattaccgatttctgtgttacctgagtgaaataaaaacaacaacatagactttcatgggagtacctcaacaataagtatcagatagatgcagtatatatatataagataattatatcaatcaataaattttgcaagtacaatatacttgttatatcccttgagctcaaatacttaatatcataataaagttcagtatttctttcacttttatagtagatttattagaagaaaaaggacgcccaaatagggagagaaaagcataactgtctaagaagaagaaaaaattacatgacaaaattagttaaaaatatcaccctaaactccactcaactacaataagatctcctactcttgacagataagagtaaggataaatagcagaattcttactcattcctaatgtaatccaacctaagcaactctcttcatcactgaataatcattcttatccaaccagcccacagaacagccagcacttcacaatttcatataaaagtttcatattttatataattgacccttagtatgatttacagcataactcaataaacataaatatatagaaaaattctatagtagggacatcacttttctccccattgacggttttgtttttagaatatagagaaactataatctagttattttatatgacgatgtacattatacttataccacgcatcctactagttttcaaaagatttggaatagtttgtttgtggtgtcaaaaatagaattcaaatttgttagttgcacacctacaaaaatatttaaaaaaactagcacgtgtgcaattgattgtttgaatcttattttcaacactgtaaatttttcaaaaattttcaaaaactggtggattgcaagctataattataatatacatcgtcatataaaaaatttaaattataatttttctacatgctgaaaagaaaatgtccttaccctttccctgaaattaaaagaaagtttgaattatcatggaaaatcatctgaaattacatgaaagaaagttggagttatcatggcaaatcatcctccaacgattcaccattgccatatttttcttactcttttagattgtgttgctctaatatttccttctgttgctcaatgcaaattatttaaacaccacttatccccagtttaggattcaactcccttgttttaaacaaagactattggtaaacaataaactacccaaaaaaaaaacatcttgtattggccaaaagaaactaatacaaactaccaataagagaagagacataccacccaataactagaaaattaaaaggataacataatgcaatttggagaaagcatgcgtataacaatatatataaattagaaatagggatcttcacaccaaccttcttcggatagagtagacctcccgcgttttgaagccatttcagcacgatgttcagtggtcatctttaatagatgctcctgtagaatatcccacaaagaaattactttcagagtatgaaataaatcttatctacaaactttggaaagtataaatgaaagatacccaaattgcataccttgatagcactggggtcatgatgtccagagaaaatgtctgagccatcctgaaacgatccatccacacctcttgcctctctgaaaatgtaacaatattacctgattaaacatatactaatccaacacaaaaggaaaaatacaataagttaacatttggacaaacctttggctacgtataactgtttgggttgtgatttcctaccataaagaaaaagaaagaatgaatatctgagtaataaaataaaaagcagagatgaaacatgataaggaaggctatatagaaaaataagcatacttgttcaagtaacacagcatcttgagcagcggaatcaatatcactgtattttcccatatgtactctgttgtagtgggttgaagggaggagatcgggattatggtaatgctctatattatgaaaattgccatcagtttctggatgagttgatgaaagggacgagttattactattctgactcatttctttaatataatccttctcctcaaacattcattccctcactataatcagtctctgtaattttggcttcatcatgacaacaccatcaaagacaaactgttacataaacaatacttgttcatgaatccgtgatggaaactcctattttacaagttgcataataggtctcttgacagaaatgttataatcatctaaggtatgcaggctgatgtgcgccaacttaaaatattcctgccttctgaaactgataatcaataaacatattttccattcataactccagaggcaaccagaataagaatctctggtgcaaaaaaattagaattgatttaatgatttaaacaatggcatctttgaaagatctcacattttaaatgacaagcataacaatcatacagcgcaatggatgatggatgagttaccatatacagcattaaatgaaagtaaaacttaaaacagaataaaacaaagaggtaaccattttcatcatatattattaaggtaacaaagtggtctggaaatgtagagcagggaatttgataaaggagtatgatttgtcagatacaccatttaaggctaaattcctaagttgcaagaatgaaaagtcagccgcatattgtacaaattttcaatgaaattcatctaatcggataaagtacagaaccatcaaaagtacactagataaccttgtgtgtgaaagacggtggtggtgagaataacaacacaaaaaattgactaacctggaaaagcgaagcatagattagcaataaattatggagaaaaattatgtatgaaagaggatgtgtggattagtgagccttcggacttgggagaagaaaccattagggttttgtggaggaagaagaagatgacggaggtggtattgcatacattggacgaggcgaatagtggaaccgagaaaagtaacagcacaactgttcggctcaataagatcttcagggacggtattggtcttgcgggtagctcaataaaatgtgttttttttttttcaaaatcaccttaaatatggtatttaataataaagttataaaaatatgacatttataagatattttttacatttaagattttgtatggtattttttttttt

SEQ ID NO: 110617 - DNA, 6455 bp, Cannabis sativa
tttcgtattgtttttatggaaaccgtaaaaatgtaaaaaaaaaattctctaaacataaaaatataattttttttaacaaaaaatgatgcctcatgtaattaaatatttgttgtatatgttttcttctcttcgtgggtcgaaaatcacaattctcagttttgagattttctttcctaatattaaaaatttattatctagttctcctaatatctctgcatgtccttagaatatccttaaaatagacaataaacttctacaaatagaagaaaatcttcaatttcccttaaaaacaatgtttgtaccttttatgcctaataatctataaaagaaaattctatgtttacacagtttaatatcagcaggtacttaaaactaaaatcatattcaatattagtgatattactataaataaatgatttaagaggaaaaggaagtgagaaaaatgtgatgagagcgctccaagacaaagattgttactgaatttgttttgatattaaatttcaaaagtgtgaaaagacagaagagccccccgtttagagtttatggaacagaagttattgtcgttgtcggtcaccgcgttttaacaaaacgacgagtcgctcgtcgttttgtggtgggctcctcactctgcaccctccatagtgtgattagtgtgttaagttgcgtgggctctacaaagattcggttctgagactcaatatctattcgggtgctgctctttttcatttaaaaccttctcttttctctttttctgctttcaattattagataagaaaattcattttaattatcacaagtcctattacaaagtcactttataattacattctattttaaattatataatatatatatgacatgtgtaaagtaaaatgtaataatttacatttgaattctaaggcaccctttcagagtagataggagaactttaataaaaaaaaaagcatatgtatatgaatgactatttatacaactcctttgaaagagttcttttgagtatcattgcctttgtgtaatagtaatacaaggtaagcttttcatgaaaatgcataaaacttgtaataagatttgaagcaaatgggctccctacagtcctcaaaacattttcattataattagtttctgattaaaaactctaataaacttgaaaaatgaacaaaatgacatgtacaattttgtagagagggcatcaaaggaactaattatcacatcaacgaattgttgacactaattgccaagaaaatgttgcagccacaaaaaattctaaccttgaccggtggtaccctgttagccaagcttctgtgtaataataagttaggctggtatttacaccaatccaggagttagcagcagattcgggactcgggactattaataatcagagtagagaaaatgctcgtatgttgttccactaagcgtcctgttgacatcgtcccagttcttgatgtggtctgatagtgatcctttgtgtattttcacctgatggctctttagctccatcactggtagtccaagaaacacttgaacttcgttcagtttctgttgaaaaatatgaaataggaggataaatctcagtagatgtaactcggtgtagggtaagaaacgatcaacaactaaggttcctagagaaaacttacggcagggttcttcacaacatcctcgtagtacaaaactatgtgtctagtggtgttaaaggataccaaagccgccttagttgctaactccattttcaccagatcattgatcaaagatgtagaattgattactggcttgtatgttgacagtttttcagcctacaagaagtttaatgcaggaattgaagaatattcatcatgataaatgaactcaataaaataaaatagataagacagaaaagaacctcctcggccgaatgtacatgagccttgtgagttccattcaatagcttagcatatcgatcatacgaattggcaagatctgagaccatccgacgtaataaattcttacggaagagaaatattgcagaaacacccctacggttaaagtaatcggctatttctttatgatgctccatcaagccctgcaaaaatcacagcaagacatgagaggggctacaaatttcgtttacccggttactctgcttccttatatggtagagacaatacacacattaaaagtttgagtcaatactagaaagtaactaacagtttccatgataaatttaaatggtagcagtccatttgctaagatgctctagctgcattcataaacctaacacataaactgagcttgaatttatctcatgacccatgagaactaaggttgggttctaagttttgaccttgaacgctgaaagagtctatcaagtcgaacaatgaattgtacaatttaacacaacaaagacttgtaatcaaatttcaaagtctcagcatctgcttaatataagttttgagtatcaatacaaattggcttgaatgaatagtggttcccaatatttcacattatgcagacaaattctcaattttccatgaagcataaattcataattataagatgacattatccaacagttacctgattaagcatccacttgaagccaactgctgcagagcactgatttttcgaagcactactctgccaatccaaattataaacctgatccatagtctctacaatggaagaaatatttcgcctcctatgccaacgagaaaatatctctccattagaacttacattaatatgactatttaagaggctctcaaaccacccacttcccgatctctgcatcgacaagatagcgaagaacctaacaggattatgctcacactcacccctacaaaagcaccaaaacacaaactcagtaaaaccgaaaacaaaacttaacaatcagaactagaaacccctttgattagctacctgctaaaggttttggggttgggataatgcacatgagggtattccagtagcttaattccattatcaagacaaggactttccacaacttggatgctttgatttgaggtaagggtttgaaaattgatctgcttcacacatattgagcagatataaactccacaaaccatggcaaacaccaatactaacatcctcaacaagagggtgtttttcttaggagccttaataatgatagaatcctgccaacaataaagaaaatgaaagagctaaatcaacaaaagccataaatggaagattactaaagagttctaatcatcaatgtacaaagtgtcaaagattaaagatttaagggtacctaagtacaataatttagtatgtaaataagagtaccactactaaaatcctacagaaaagttcaaaagtttaacttttctagactaagataaatagatttaaaatgggttaactctgattataaaataaattattctgaaactatctaagtccagatcggtcatgcaaggaaaaaggaagcacatttctaaagccccccatgaacatttatcttccgtacccacaaactgaaagaaccgactaaagaacaacaatttcagagatttaaacaaaacgcccacaaatatataaaattaatatttaaatatgggtactgcaaaaaggaaagtaaacgaacctggttcagtaaacatatatactcagccattgttaaacaaataaagagagagtgagagagagaaagggagagaaaacggagaaaagggtgagcaaaacaaagctcagacacagttaatactcaaccaaaatctcagtgagcattaaaccaccattaaaccttagagagctccagaagagtaaaggttctggctttcagagctttttctctttgtttcagaaattaaaaaagaaaagaagatagaagatgaaaagggatattgtcagaaagtgtttgtttgtagtatggaaactttttgtgggattgaagaatcgttctcctagtttcttccaccaaaggctctctaattgtatagtggaggagatgagtctagtcttcttgttccaactttatttaaaattaaattaattcattaaaataaaataaaataaatattttgtacggggagatgccgtcatgggatacagtccaagtttttaaagaaccaaaatttaacgcacagcacaagacctgaggcgtgtgaggcggaattttgagtacccaaactatctaatatgactttttgactttttgacttttattttattactttcatttccattatcataaataaataaataacatttgagttaataattgttatttgttttgataattgcaatgtttttttttaaaaaaatcaatttcattttttaaaactctgtttaaataaaatttgaaaacagaaatgaaatgctcctctgagtttgtactaactaataacaacaattcgaaatcgaaaataatgacaattgaaagttagaaacgatattgattacataataaataaaaatgcatttttgcaaatttatttatttatttataatcaatgttggatgattgtttgtttgtacagagaatttgacacgtggaattagtacgtggaaatttcacaagtgtcatgactagactttcctaactaaatttaattaatgaaaaattgaatcattttttttttttttgaagaaaagaaaattaaatcatgttagaataatattgggatttataagtcaatttgagttgaataagctaaaaaaaaaagtttagggctaattttagtcaaaggaaacctaattaagttataatgttatcagtaattcgtgataaggtacgatgagaaatattatcatagtattagaattgttaattatattaattttaatttacatactcattttgtgcactcctacgaacaatactatttatttattgaatttagttttttattttaattttttttttttttgctaaacttattgaatttagttttgataataatattcatgttaatatataaataatttttattaaaaaaaacatgtggccttttcataatagcgttttaatgatcattatcatctcttattgtaatttaagaagttaatgacatcccaaccaatatcaaattcattgctaaaagtcaaaggaccaagatgacatatttggaagaacggcacctatatttttataaattgctttttgcaatacaataatggtaaaaaaaaaccaataattaaaatattaaatattatgaattaggccaaaactttattcaaaacacaatgtaataagacccaaccctaaggccaaactaaggatataattgataaattagtgtaagaagctagtgaactttgatcttaagtttagatttttagagatattcaaactccccaaaataaatagataaacttaatataataattactaccaacctacacaaccatactaccacttataataaaatagaatttataaatttattattcttattctttcacttatggtcttttgatcaagtaaggatgacaattttttgtgataattgaaatttggcttatttaataagagtgttaatactaagaattaatagtgcctaatactagtacgatataatatttaattaatatatatgtaagatttaaaatttaattacactaataataatataatattttataataagtcttgaaaatatatcatattcatatagtagtaatggtataaaaattcaaaattcaaaatgtgtaacttattatgtctattacataatttataattactttcttgagttggattgcaagcatgccctttagattactgaagaattcttgtggttgctctattgttgacatcattgaggattatagacttaagtaggaaattccgatcttgaggtttttgttttgttggtagagaaaataatcgcattttcattgtttagctaaattcgccttggacaccaaagcttcagtttcttaagaatgtgagtgtttccttagttgctcatcctatcattgtgttggatttgctaattttattgtcgtttcattttctagtttgcttaatgaaacatctttcctataaaaataaataaataaataaagataagaaatagtgattaagtagtgtaaaaagtgtatagcttaattaattaatgtatctataaaaagtagctaaaactaattatatgactcctatgaatattaatttcaagtcaagtaacaataaaaagtggctatttatgaagttattcctaacctacaagttaatgatatgcatttggcacaattgacttatttaataaatttatacttagcaaataaaatatgataataatattgcaaataaaagatgataataatattaagggtattgagttaaaatttgaagagtgttttgtggttaaaccctttcaattgtccttccacttatatttaaccattggtagcaaaacttttcaaattacttaactaattaatgatatttgtgtaatttccatttaagtaatatttatctaatctattgtggatctctaaattacagcagaaga

SEQ ID NO: 110618 - DNA, 12726 bp, Cannabis sativa
  modified_base (4734)..(4739): a, c, t, g, unknown or other
  modified_base (7125)..(7126): a, c, t, g, unknown or other
  modified_base (12198)..(12204): a, c, t, g, unknown or other
caatacatcacatcaaaacttttttcaatacaataaaaacttttataattagtttttttttaaatatatatatgtgactgattgacgtgacaactaattttcccattaacttttataatttaaaaaaaaacacacattttaaagtgataagaaaatacattttgaagcccaacgtataaaagttataaattatacagtataaatataaattataccgcctaacagtataaaagtaaaaaaaaaaataacgtagaaagaagtccagggccgtacaaggtccactaacttcaaatgctatatacaacccaggcccaaatattttctttctgtaaattttatcttcaacggagataggattccattaaaaagaaaagaaaaataaaaacgagaaataaaaagagcgcgacaaaagagagcgaaacggggggagtagtgagtaagtagagagagttgaggttgagtatgcttcaactgggtaggatcgtacgacaatggccgattttcaaggaccattactgtgcttttgcggcttaccatcgttctccattctcacattcactaccgcccaacaccaaaacaacacttcatcgtttcgcatcaactagagtgcgttccgctcgccgcaacaacctccgtcgatcaggcggccttatattgcccaagtccccggcaccgtctgatcttcaggttgaaaaagacgaaagcggttcggaatccgatggttccaagagccggaaccagttgaagcgcgaagctcagcgcgctgtgcgttggggaatggagctcgcttccttctccacacctcaaattaaacgtatcctgaggtgattcaagcttctgtttctatctgaaatctccgaaaaactttattatattgcatgcgttttttttttttggtgcatttgagttttttacttttaccttaatcgggattgcagtctggcttctcttgataacgatgtgtttgaagccctaaagctggccaaggtgcgtttataagctgttttcttttttggattagtctattagttttaatagagaatttggatagcttttgtagcggttttagtttgtagctaaggtgtttgatgttttgtctcagaaattgggtcctgatgtccgagaaggaaagcgaaggcagttcaattacgttggtattcattttccttcttgaattttgatttgtgcatacagaatgttccaggtgacattgttttagcagaacattaattgagaagttaggaatttaaaactaagattatcgtagtattatcatcactctgtcttaaattgagttataaagtatgcattatatcattgaatttgctaacacaaattttatcaactaaattataagctggggtttggagagatacgaccttatgtttgcacattaagtaaatttcgttgtcctaaatttccattacaaatcctagggtgatgctttagacttcagaagtgggataccacaagtctttgaactcaccgattcaaatacttcttgatgagttcttggagaaaatgttgatcttagaaggctagagagtgagaattgaaatgtgtgatcaaggttctcaactctaaaagccatttttacgttgtaatatatgttcattagatccaaccaataggattagacctcttaaaggcactttttggggcaaaaacctcaagctgtacgaacgcagcaggcaacacgtcgtatgccaggcaatgcgttgtcctacgacaggtgacgcgcttctcatgccttctttgcgtgtgtgcgacgcgtttccttctaggaaacgacaggcctctagagccatccatttctcaaaaagtgactttaaacacttccaatgctcccgaactttttgggcatgcttcaatcctttattgtatcacttctgatcctaatttttttttttcaaattcctacaacaaaaggtcaaatttcactcaccattatgtgaaatcaatatatattttacatttgtaataccacttaaccataccaatctcaatacttataatctaatgtacggatttaggaaaactactacgcgaggtagaaccagagttgatggatacattaattcaggctacaaaagatggtgaccatagtaagctacagatattagttggttcaaggacaatgaacgatgaagatagtgatgaagtgtatgaagaaactgatagtgaagaggacgtggaggtgggctatatactattctatattattttatttccagcattagggttgcaaaaacaaaacttttcatttgatttttcaagcactggtgcaggaatttcacattgatatagcaaccagatggttggatggcttagtcaataaagacattgagataacaaatgaggtttactcaattcacagtgttgattttgatcgtcaggtgagttgtataatatgatatgattttcatgtgataaaagtatcttctgcatcattgataactatctaaatttgaagttaataagcatatgctggttggttagtaatgtaaaatttttatcttgtgtatttatttttggatgtttaggggacctcatccaaggaacaagtatctggaattagattagataggatctgtttgtaaattgttttagtttaaaggctgcagtttgacattttgcaataatagctagcttgctgattgagttgtatattgtaagttagtcatacttgagagctctgtattcgttagattgtgaacagggtttgatctgggacttggggattgattgtttcctgggaaaacttgttgaaaactgaatcattttgtttggtgagtttcttgttatttgtgagagctttttctttttggaaattaggatccccaccaaacccctacaatatttgggaccatgaaactatagcaatttctatataagtattcaggagcgactcgaacctcagaccttgtggggcaaaccacatgtttgactatttggactacccttcttgggtgagagagctttgagagtgtattaagcaacttatagggaattagactagggtttgtcctgccttgtatgtagaaaggatgtatatttctgtgttccattgtttcctccttttcttctgtctgagtttggaggttcttctcactggttctttgtggtagataatttctatttttcattggtcttttcgagtgattcgtgagaaagattaattatttatttcatgcactctgttacttatattaccagtttgtacacaggaattgcgtaaacttgttagaagagtccacgaatctcaagaaaagctcaagaatgctgttgaggaaaataagggggaaatagatgccgcgattctgctcgctagaagatctctcaagcgtttccttcttgtacttgtgaagcaaatgccgagtgcctgagtatgtgattgagactccaaatggtattctctatgtgctactaattattaatttgaaacgatgcatctgttacaaacttacactgtgcctccattatagctgaaaaaactacaacaaagtgttaaattctcactaactaaataactatttatttgcaaatgcatttggctctgtgctgcaagtattgggtataggagttggtttctatggtattaggtcaggtttttatttgagtctcagcttttaaccttgaattttattccgatggcatctttattttgtcattcactcttattttgcatttttgaaggagattgttgatgttttaaaagtcgtcacaaaaaattctgctgccactatagttaggtgttaatattaactgataaacagacagctacaaaaggaaatttggaataaaaaggggctggttttatatatagagctgttattaggtatctttaaagtatctaaataccacacgaagtgacactttattagtagattttttttttggccaattacttcattagtgattaacgataccaattaccaacattacctaataatattaaaaagtgtgagacttgatatccaattgcacctatagtgataagggtatgtcatattatgtattgttgggcagttgtgcaccttaaggtgccccccttagcgttaatcttttatttatttatcagtcactttaccaaatcaatgctagtgtgtgaagatggaagtgtggagtgggtttattctaattataagttttaattagtgtacattaatattgttaaaaaagtgagaaaacaagttcaaaatgtaagttttgatatttaataaaaagttgtacattagcgtagtatctacaaagagatgaggtgatttgggctcaaatagtcaaattctaatatgagcctgtaagcgaggtagaatttgaaccctaatatgaaaaatggtgtagttgtcgtttagtttatagtctgactataggtgtaccaataataatagtaataggatgattatcgtgattaaatttgctcctattcttttgggtcactctttgatgcaaggaagagaaataaaataactattggtttttttttttgaaggacagatttttattaaatggttagacggacaaaagtcccaaaagtcaggcaaaacaagctacacaaaaacgaagatgatccaaacaacagtctcacaatggaaatgacccaaacaacgacataaacaagtcgattattacatcaaaagacaaacctacccctaactatttgttgttctcattctcattaatgtgtgatctcttctgtttccatataataaattaaattattattattattannnnnnttgttgttgttattattattattaatataattattattatgatgcttgaatgttgaaccgatgatattgataggtaagaataaaggggaaagactcaaggggatgctacaaaggggcaatcgtataggatttgtcataatgaaaacagcaattttttcctgataaaataagcaatcctcctgcctgacaataatggtgtcaagtgtttcaaattttgcctactttttgcatcagctgatgtgattttaatatttggccatacatattaagtcggttttgacattgttatcacataataattgagaagaaacttacaaaacaagtgttgccattttttcttctttccaagtactttaatttatgtaagcagacagtatgatttcacacattctatattctaataaattcccttaggtgtgtattttaatactttcgaattacgtcaatttgcatctacttttggagtgtaattttttggtattgtatatagtactttcttactgtttctttcttctattttataacagctttaaagtcaaaccttaaacccatctaaatttccatagctatttacttccttttttggggtgatttaaaaaaaaaagtccataagtatcatctcaaagcttcaaaattttggtgcctgctcaccaaaatacttgactagtgactaaaaccaacgtatgttaccaaggtcattggagcttctttaacaggtcttcagatgcaaatacagacaagggtcgcagttgaaacaggtaagtatatacgcagcctttgtcatgccaatttgcaaaagggatattttattgttcattgcttgtttttattaagaagccagctgtggtgttaattacttttttccattatcatgattaagataatcattaaaagggcaagttgtttatgacgatagaaagtgaaaaactaatataatgctcaatgtggtccatatatatacttggagatattagagtataagaggtcaggctaataaggggtaagaatctatttcatttccaatccccaccactgatttatatagaaatacaatgccactccctttattatatgttgagtattgttatttggtagtagtagttttgctggataatactatcactagcgtttatatttcataataattattaaaataaaatatatatttttatttttaaatatttaactaattaattaattatttatattgtattattttacaaataagataggattgtcagaagcattctagtaagctgtagattttttttttatttaagatttatgatatttaatttgcgctaataatgatacgatatttcacggtgatattgaatgcctgtagtagttttaaacaatttttttgtgaggcaaacattttttttgtcctttctagcggggaatttggtataactgaagtagaaaacagagatactaataaaggaagtacgtaaatcaatacaaaatatcctcaaataatacgtggttgaattatatatggggctgatttttttgtgaaataaaaggacataattattatgtatatatacatattaaagccaatgataagattctagtcaagatgaacatttttgtttttgttttaatagtgctgtaaattgatgtgtgttgtataagataataagaatgcacacaaagcataaaatttatagagagtacttctactgtctactgttaaagattttaattcttatttcatcttattttttttattggggacggaatatttatttataaaactattaaattacgtaaaagtaaaatattacacattatttattaatctatatagtaattattatacaaaaatacaatttaaaaaattatacaaatggcactgacatactaaaaaagatacaaacacatattataaaatataaaatattaataaaaaaataattaataaaattaaacgggtctctatcggaacgaagagtgtcattcctgtccccacctgtttaacatttggggacaaaaaatgattctcgttcccgtctcgttccccatttagacagagaattcctgctgggcgggtccttgcagggcccatcctcttgagaaaatgtacatccctagtgtcgtgtcgtgttggtctgacccataactttttgtaattttcaaaatatgagttgtgttgtactgtgctataagaaaatatgaatcgtgtggtgtcgtgataatatttttaaagagtaagtctaatagtttgtgctatgttttactcatatatatatatatatatatatatatttttttttaaaggtggttagcttgtttttatatctaggttcgagttcgtattttagtttttcacatttttttacaacattgagctgattactaatattaatatatatatatatanntatatatatatatatttcttcgattatatttatataagtttttaatagtattttacagaaaactttataaaaaaatatattaaaattaatcaaatttaaatatttaattataaaaactcaattttttaaattacactctacaaatgaattaatacataattttaattatacattctttaataattttaattgtaaataattataaaatattcatctatattcaactaaatttattatattataatatatgtgcaaaaagaaattatttgtaagtagggtacataattaatatattgtgtctgttaatataattaattatagaatttatcatatatataatatattcaaagaaataagtattttactatagtaattgcataatattcatattattattcaaagtttaaattaattgaagctaactatttaattatttaattatattaaaataatatttatatttttaagtaattcttaaactagttaataataaatataaatatttattatttttaaataaatggtattttattaaaaattagtttataaaaaagtatacagataaattcataaattatgtacgtttaataaatcaatatcaatatatatattgataattttgtcaatatatacttaaaatttaaacatataaatatttatgtgaatatttgtattctattatcaatataatatatttattaaaaatgcatatattataaaaaatgcatatattttttttttcacaatttacatgtttattgtataaatagtattaatatatgtttattatttaaaatgattgattattgattatttatcaatttattaataaaataaatattcaaattttatcaataattttttttataatatacttagtataaaaaatgaaaataaattttcactaattgtatatctaaatttaattaatttatgatgcatatattttataataaaattaattaatatataaaatattataatttttctaaattagaatatacaagttatattaaattatataattattgtaacttggtagaagagatcgtaaataaagtcgttatatatgtcattgccaaaatgaagtgggtcctacttgagaggagagtgtgggtgggagacaaggggataagataagatatcatttctgactgaccaattcgatacatttaataaacaggatgccgcctcgcctcatgctcttccttttaatttttcacaaataaaaggacattcgtaataataataataataataataataacaaagaaatattaaaaggtatagtataatattattattggtataatttaatattaaattttaaatattttatttttatagatattataaagatgataagacaatatttcatcgtgtggcatgagggttttttatggtaatgctctaataataatactcgttatcaccattcaaataacgttcagtatcaaatgttattatatttaatttaataattattataaaaaaattattaactattgacaaaacatcatttttttttagtatgtccaacaatttttataaatttgagtgttataacatgaattacggaactacccaatgaacattcaaaccatttatgccaaatagagaatatatggacacaatgagtgcatttgtttgtagaattagagaccagattgtcaaaaattaccgcataatatatggtcaattcaatattattcattagagtgagatatcaaataatcaaaaacaaaaacaaaataaacttgatctctctctctctccccattaattgacttgatgaattagagaaatttaattagccatcttcgtatgaatcataaaacccagccaataagacagcttctgaaaagttttatttaaaggtatgattgggcaggccactctctgtcgtgcaatgctagctaaccaccagtctaatgtggtggctactggctacgagatatgaaaatgaaatatcaacttatatattcttcaatatataataataatataaatcctccttttatatagcttataacacatttttaggaaaattcaatctatatttgataggaaatatattgaaccagtgtatgtgtatgtttatataatagtgacatttttgaaaagagtagtggatttagagaattaatgcatggttgggttgggaatgtgcagttgttttatggtgagactatattatgttccactcgagaaatctcttcaaatatttcttattaattaattaaactaattcaaaagcagttcaacgattgttatgtgggtcatacatacatattacagtctaaactgttgaagctaaccttaactactctactgcctggctaactcaattaatatttgactaattagtaccaatcaccgtggtttgagtagttggtattgggtgttcaaacatcacacttcgggcggtgtcaattttgattattttgttttttccaaatcaaatcgctatatgtagtttttgtaaaccgcaatcacactataagatcttaaaatcacattgtaaaaaatacagtacaatttaagcggtttacagtgttattattatcaaccattatattaaaaaatttaaaattaatttaactaagttttaacaataaaaaatcaaatcatattgtaaaattagtatttttgtattatatagtgtggtgaagtttaaagcgcgattattaaatttaaaattacaaatcataccgcactgcacggtttgacgaaaatacaaactgcaatcataccgcaaatgattttaaactgtatttttttatgtagtgtagtgtggtgcaaactgtttgtacaatgtaaacgatttaatgtacacccctagttggtactttcaattaagcttaagcttaaggtcaggggttcgagtcactttgtacttctcttgttggtggtggtagtgtctccctcagatggtggtggaatccaatttgctttctttaaggttgttcttggatagcaggcaagccatcacagatataatctaagacttgtcgacttgtagttgttttattttaatttttttttttcatttgaagaccttcagtgtccattaattttgtccagattttattcacattatcggtgtagcattgtcaagcacaattgtaaataagcattgctataaagagatgcacccaccaatggtgttcagcactatccagagtattttagaaatttttaagaatttagtaatgtaataaaattacataatcgttaatgtataattttgaggtttaaaagaattatgtttttatcaatgtataatcatgtttaaatataaatattttactaaacaaaaattactctaagcttttaatttaataaaattagatttagatatagatttggatatattttattaaacaatttataaaaaatttaaggtttgatatttttattttaacaatctgcatgaaacattgaagtattctgtaaagatttcaaaatttatacttgatgataataaaccattaaattaaatccacgtaattttatgggataaattaagagaatttaatttaatatattattttaattaattatagacataataaaattcttgtcaggtaaaattattatattcacataattaattacaattcatgtctattatgtaatcctaattaacttaatatatataattttatataattaaaaatgttgtggctactcctaattatttaaaattatataattcactagacactagtataaacatactggagatgaaaattttactaaacctaaaattgtctgtgggctagaatttaatttaataaaatcagatgaactttataatagatttaatcaaatatttagtagatttaatcaaatatttagtttagaaaaaactaagatttgttgtctatcttgattaaatttttgataacgctattaaattaattttcatgactcttgtgaggtatactaaaagaatttaatttaacatattatcctaattaattatataaatataataaaatctatattgggtaaagttattacacttatataattaattacaaattatgtccatgaaagtgaatttttaattaatatgtaatcttatataattaaagatgctatgtttactcttaattatttaaaattatatttttacttagacattaggtattacgctttacctaaaagtaatttcgttattagcataatagacaatcactgagattaatgctcctagtgtgatcatccaaaaatcattacaaatcgttctagatatgagaatttttgtcccagtttcatagtttcttatttcaaatcacaaaattatttatgttttattcatattttattcattttatgaatgtttaatgcatattttatgaacaatttcataaaagttaatatactaaataaaatattcaacatatcttaatttttgaatatatttgtaatttatgtatagcatataaatcatataaaatattatttaattgtactaataataaatttacaaaataaatataaaatagtacaattattatatgataataaattaaatgcaaattccataatatgtaattaatgacaaatttctcaaaaattattaatttagataataaatcacttaaatttggtaatacatatttagttgcatactaattaattgtaaaataatttttttaacattagcacaattattacatgcataataaaaataaattatgtaaaaaataccaaatatataaattttgtatattttaattaggaacactttttaatgggtaatacctattgatgtgtactaaaaaaaattaataatataataatctaataatcttttatagcaggttaccaacaatatttttttttaaaaaattatatttatcttttttaaaattggaaataatgattacaaccaatagcatggaaaatttataaattatttttagaaactaattcaaattactatcttcttattttattgagggtaaatattattttagaccatgtgttttgcaaaaagttactaatttgactctctgttttgttaaatgataaaatggatcctgtattttctaaaatggtannnnnnngaccctgagcttaatttttaattttttttttaatgtaaccaacttaaagacaatccctaacatgaacagataaaaaaaatacaaacagttttgtcataacacatttagatcggattattattaaattttattatgacaaaaaatcagttcaaggtcctataggtaccattttagaaaatacacgatccattttgtcatttaacaaagcagagagtccaattggtaacttttgtaaaatacagggtctaaaattgtatctatccttttattaaattgtgaggtcattaatcattaatttatcattgtaaaactaataatcacttacatgtatattaatgtgttttttttattaggagacagaaactttatatgttatgattggaaaaatcagtaggcaaagataaattgaaaaaataagttggtaaagataaattaaaaaaatatattaatgtatattaacgtgtaagcataacaagcataataagcactaggcaaaaataaattggaaaaattttataaaaa

SEQ ID NO: 110619 - DNA, 3101 bp, Cannabis sativa
tcgtatgatccaaagcaaggattggaatctttgactgttgtaccgatttcaaaggcgcaggctcttcaaaggaggtatgaatgctgagggacagtatactttgtgtatgctcaatatggtatttagttgtcttacacttaatagggtttatttgacaatcaccaaataaagtataagttagtttgaaattgcttattacgcttatactgatacccttaacctgtttagaacccaacaatctgtcacatctataaatttcctgcttgtacaaggaattgcttttgtttatcatattgtcgaaagtctttacatttttcattgctatttttgattgggaaactaatcatacattgttggaagatttcacctttatctctgttttgttgtttggagaccattcatatgtttgccctttcgttttaatatttgctcgtgtatgtgctgttattttttagcttcttgatgtcagcagaagctgcaatcttttgtaatttaacatgtggagtctagtatctttaaattagtcgttgttgggaactttttttttttttgagctatatagctatgtagttaagatctaaattgcttgttttgctttggaggagttcgctaagctactttttctgtgaataattttggacaaacaatgatgtattagtacagtggacgtgctgggcgagaaggggctggaaagtgtttccgtctttacccagagagtgaatttgacaaacttgagaactcaacgaagccagagatcaagagatgcaaccttgctaatgtaattttgcaactcaaggctctgggtgtggatgatatcattgggtttgattttatagaaaaaccttcaaggtgcagtgctttgtttcgtaccattattctatacttttgtttcataccattattcaaggtgcagtgcttttttttttctttttcaaagaactgtgaatgtatgtagcttatgaacctgcttttgatattagttatgggtattagtttttagtttataattttggacgataaaaatttatttttatgaatctggcattttggttttcttacaaaattctcattgttatttttggatgaatttgtctagagttgatttttgatgcacctcagacctaccacctatggagtacaatatttaattttgtggaatttaatttatatgtatatgtattgatatatattcttttcatatatattggcgtggagggggctatttgggtgattggtaaactaagttaatgctgtcaacttggtcgttgttttccaacttttctgaatccataagatctaaattgatatatttaagcaggtcagctattgtcaaatcattggagcaattgtttttgctaggtgctttaacagatgaatgtaaactctctgatccagttggtcgtcaaatgtcgaagcttcctttagatcctgtttattcaaaggcccttatcgtagccagtgagttcaagtgcttgcaagaaatgttgataactgttgcaatgctttcggtggaatctatgttttatgctcctcgggacaagttagatgaggtgcgtgcatatgagatgttattcatacataatagaacaattctgccaatgagatgttattcatacataataaaacaattctgcctatgattctgataactcagtttttctaggctatttgattagtaagtaatgatatatgcttctttatataaaaagataaaactattacacaaacaagttgttgattagcaaatctttatcctcttaagtactttctttccttttaaagtttttatattaaattatgatctaatattattgtatgtatttgttgtatgggataggcaagagctgcaatgaaattcttttcaagtcctgagggagatcacctcactttgattaatgtatttcgagcagctaacgagtttatggagaagaagaacttgacctgtggtaaagagaaagctgacaagatcctaagaaaatggtgcaaggaaaacttcattaatagtcgctccctaagacatgcccgtgatattcacaagttagtatgcttattctttgcttaataatggtttttacatttatgatttcttaagtgactccaaggtcaagccatgcatctgtgtcttctctggcagccaaatccgagaacatgttcaacaaatgggtcttcgtattgtctcttgtggagacgacacactaaacttccgcagatgtcttgctgcttcattcttcctcaatgcagctctaaagcaacccgagggaacctataggtatcaacttagcatttcttttggaactttgaagcctttattttccaataaaggcaaacaaggtcatctactagagctctttattggccaaggttgttcaagttcttgtatttatttatttttctatcacattttacaaaatggcaggactttggcaagtggtcagatggtgcagatccacccttcttctgtgttattccagaaaaagccagaatgcttaatctacaatgaactaatccaaactaaccataagtatatccacaaaataactagaattgattacttgtggttaactgaactggctccccaattttattctatgcagagttgagcttctgtaacatcaacacccaacaggtaaaattctaattgccaactgtgaaacttaatccatggaatctcacttggaattttgatattgatcatgcatgttcatattatattccagtcatttggccacaatgggattgtggaaagcttctcaatcatgtccaaacagatacaagaaaccatcacataccacatacaacactgttttctttcagcatcattgcagtgcggtgacattgcaacgggccgagtttggtatttccagttaggtgttgaactcgtttatgtgcttgcttcaactgtttttcaaaagttgagttaacaatgcaacattattattatttattgttagtgtttaggtggtttaaagaaggcatcctttcacataaggtgggttttgtagaaatctgaaaagagtaacctttttatgttttaacttttattaattttaaggttatttgtgccataaatatattaaatatttttcatttttttttttttt

SEQ ID NO: 110620 - DNA, 2979 bp, Cannabis sativa
  modified_base (110)..(136): a, c, t, g, unknown or other
  modified_base (2668)..(2669): a, c, t, g, unknown or other
atttttaaaattaataaaccattttatttttattaataaattaatttatttttaatataaataaaaagccacccatgaatttctcaaaaaaccaagaattctgttatatnnnnnnnnnnnnnnnnnnnnnnnnnnntatatatatacatttatttatataattgaagcagtttttcatgaacttatcttaatcgtaaaacaaagctagtgaacttttatgatggtttggtaaaccggtttaattttttagtcataaaaaatgtcatgtggaatatttatactagtggttcacccatttccggcgggatattttgtcatcgatttttatttttttttatataattattattgttagtttttattagatttcagaaaaagtaaaactatattatttatattatttcaatgttaaaaacgctacctcatttatgaccaaatatccccgagatgtatttttactatataataactaaattactttattatttttatacattgaaccatttttctgtgacaaactttgaaacaatattattccacagaatttgtggtagtaaattagtagataagagatatagctaataaatgagggctcatctagaagataagatcttccatcattaatacttagtgtctttgtagttcagatcaaagagagatcaaaaaatcattcacatcaagatagaatagttaatatgatcagcatatatgtatataatagaatgttaatacatagaaatgatatacaaactgcatagagtgagatcaatcaagctagaaatcaaatagtaacccaatattatatgaatatggagaagaatggtgtgatgatgatgatttgtatgaaacactacaagaaatatcacttttgccagtatatttttgtactggcaaaagttaatattgcgctggtaaaatagaatttacttgtgatgcattggcaaaagggggttggcgaatcaatgttggtattagaacttttgccagcataaaatgaaaagcgctagcaaagatgacttttcccagcacgtaaatgcgctggtaaaagttagattttagccactgcaaatgtatgctggtaaaactttgacctctttaccaacgcagtttatgaaatgcgctagcgaactgtgctggtaaaaataacatttcttgtagtggaagttgttggtgttgtgattgttccatctcctacttttgcaatctcatcttcagatcaagatggtgtcatgatcaacggtcaagatagaaagatagtgaatatcatggatcgtgattttttattggaggtaccattgaaggaaagggtgtcacaaaataatcattgcttgggtaaaggttgtgctccttggagtccttgccaacctcgttgtcattgtgagaccattgtggcttttaaagcggcagaggcagtgactaacttattggtcacatttacaaaaacttttatttttagtcacaataaaatttgtgactaaaaatgaaaaatttgtgactaattataaattatcatttatatgttgtgaataaaaggtacgtggctaaagatatttgtcacaaaaatcacaatttcttgtgactaaatctgttttttggtcacaatacttgttataactaaatctaaattattgacaactggtatctaaatactatgtcgtgggaaaattacgagtaaatgtgcagaatcaaatcaaacaatcaacgaaattcaaacaatcaaacaaatagtaaagacaagattatcaaatcgagaacaactatcgtatgaaaagtaggggcaaacagattattaaaaccagaaaacagtaaatacagaaaataaagaaattaataccaagatatatactggttcaagtcctatagatcgatgtgatctatgactctactccagttttggaacaccactgtaatccttctttattgattgagcaagaatagctacaatatagtgaagacgagattctctgttgagttctcactaattgtttcaactctcacacttacacccaagagtcttcttcatctacagaagattcttcttacaaaatccatgtccaatctctctcttttctctgcacctctctctctatctctctatctctcaatctcatctctatgagttctcaaactcgactatattgcttctctaaagggataagtgaagctggtatatatagacttatggatcaagatcataaagttggtagctacaagaaacgagattgttaagttagttaaaaataactaacttaaccaacttctctttgagcaaagtctccatgtcagctaaagtatcagggccttcgggaacgtaaacaaacttttgacctcgcggacaaagaatactcgctgaagacgattttgaataggatagagtctgctgaagttgactattcagagataatcattccatggtggccacaactagccaacaagatctccctcctagagtgaggctatttatcctgagaactggactcggagtggacatgatagacatccgagaactcccttctgaactcgactatcattccacaagactctttccgggactaataaccgtgagtaagcaattttccaaaaatgacgattacagagaccttttcatttggaagaactataccacatatgttttaatcacatgtaactttttattgtgactaaaagnnacatttagtcataaaaaatttatgatgtgactaaaaagttatcactaaaggtagttttttttgtagtgtctagaagacgaatcaaaacaagagaagtgatattgagcacgactttaaccacattcagaactttgtgtgttgcattggggcaattcaccacatgggaccgctacctggaaacaacccaaattatgtataaaactagggaactaatccgcgcttcgcgcggtttttataatagttttaaattttcgtaggctaaatcattgtataaaattaataatataatataatgacaacacaaattttt

SEQ ID NO: 110621 - DNA, 2199 bp, Cannabis sativa
aaaataaatgtaactatgatggttacaataaaaatgtaaccattgaatatatatatatttatatatatatatatatatatggaacaaaacactatgtcttattttaaaaatttcttgttgtacattgcctatgtcttattttaaaaattgaaacccttgatgactctgaatttttttggagatatatttggtaccattttcttaaaaataaacactatttatatatatatatttatttatgtatatatacatgtatgtgaagtgaattatgatatgtaattttaatttagaaatggagcatatcaaaaatcaagaattgttgctcttaagagagagtttgtttgagaatcagttaggccctgtcaagtgacacgggtggacatcaaatatcaacttgttcctaaaataagtgaaagtggatattggtagcggtttggtgaagatgtctgctatttgatactctatctctacatatcgcacatcgagttgattggctgacactcgatcctgcacaaaatgaagatcgatttcaatgagttttgtgtgagcatgaaagacaagatttgaggctaacgagccagcactaaggttgtcacacgacaacataggatagttactcaacgacaaagataattcagtgaatagattgtatccaaatcagctcagatgtggccaaagcaaaggcagagataatttgaaactagaaaacatgggagtgcagtgaggtttggaatccagcatcttggttttgattaaaaaatctttggcatacttatgttgagtcaagaaaaaggtggaatcatctttgagatcctcaaacccaagaaagtagctgacaggtccaagtttctttagagcaagcagattatgcaacttttcaataatttgattgacttgagcttgatctgcacgagtgattagtatgtcatcaggatacataaggatgagaaaaagtttcgcattagtgttagtgaagaaaaaacttgtgtttgatttcaagttgaggaagccccactatagtagagaagatttgagcttatcaaaccaggcccttggggtttgtttgagtccatatagagcctttttaagtctacaaaacatggttgggaaaggcagggtctacaaagccatgaggttgatgcatgtaagcagtttctttgagtttcccattaaggaatgcattgtttatgtcaacctgctaaacttcccaattattagcggctacaatagttaaaataatacgaattgtgcatggctttattactggattgtaggtttctatgtagtccaaactaggggtctgttgaaaaccctttacaaccaaatgggtcttgtatctttcaactatgccatctttgttgtactttatctaatacacccattattactgactaggttttgcttctttttaaagaaactccacattcattgctttatttcacactagacttgcaagagaaaccttggttgttggtttagtaactaaagaggtggtggcaatattagattttggtttaaagataccaagcttgaatctagtaaccatgtggtgaagattttgtgtgatgtttggtgctaaagcaggggaatttgtgctggaacttgtcgtaacgactgatatttggagatagggagttttttgagttttgagttaaggacatggagttgtttgatgattgattgataactcaatggtggaatgagttaagatagagggagttggggaaggggtggcaggggtgcaaggtttttaggcatagtagttgtaggaagtgtataagcacatgtctcaactatagtgggagcaatttgagtacatgattgagaagtagtggtaaagagatttttgtatgaaaactcaaattcattgaatgtgacactacgagccacatacaccctaccactaggataaaaacacctgcaacctttggagtttagaaagtagcctaagaacaaacatttagatgatcgaaaggaaactttgtgatattcacaagatcttaatagaagaaaacaagaacacccaaaaaaattcaacatattatggtcaggtgtttaatgaaaaaacttttcaaagggagagactaagttgagaacaatggagggaagcttatttattaattaagttttaaatgtaaaggctgatggaaatattttaccaggatctagatttaccaacaagtatgtttcattaacatc

SEQ ID NO: 110622 - DNA, 4560 bp, Cannabis sativa
aaaattaaaacataaggggggtttgccaccaaaaataaagataagggggttaagtgtataaaaatcaaaacataagggggtttcgccgcaaattgctcacaaaaaaaagataccatgttaagatttttatcactatttatcataataatactattattattttttaaatggcccaatttgttttctaaaaaggttattattattattactattattttctcaagacccattgatttaggatgggatatggtatatgtgatttgtaagatttatttatattattttctaaaaaagttaagtgtttaagtttgttggtgggtagacacatagtactaaaacttagatagtaagttattaatttaatgcatacaaattaagtagtgttaatttttacgtgtgaaattaaacaaaaatatgttattattacttgacgtgattatgatgctaattataataatcaatgaacagagcaaatggaaattgcaaaatcaaagaaagaaggagaaatgttgaattgggatgacttgcaaaagatgaagtactcatggaatgtggctcaagaagtgttgcgccttgcgccgccacttcaaggggcttttcgagaagccatgaccgatttcgttttcaatggatttactattccaaaagggtggaagctttattggagtgctaactcgacacacaagaatgctgattacttccctgaaccagagaagtttgaccctagccggttcgagggtaatgggcccgccccttacacgtttgtaccattcgggggtgggcccaggatgtgccctgggaaagagtatgctaggcttgagattttagtgttcatgcatcacttggtgaagcgttataggtgggaaaagattcttcctgaggagaacattgtggttgatcccatgcccattccagctaaaggacttcctattcgcctattttctcacagttattgatatgattatgattatgattatattaatttattgctatcaaatgtatcactaccttaaattggttggttttttttttttaatatttttgtttgttgttaactttttttttttttttgggtattgtttggagtgggcctaaatggtatgtactatgggtctatctataactaatgtatatgatgatgatctattggattaaagagagagagatccaagaaaaatttaatagaaaaaatattttatttcaatattaattaatgcccatttcattacaaaaagattatacaaatacttaaaagttaaaacgatagcgtttggatccaagtaaatgacctatgatttgactattaaaagcttaaacgacactaaacaaagacaaacgacagctaaattaaaataccaacaacgactaaaacaaattagtctttattactaattatcatatatatatatatacaattagaataataattacaatacattaagatggcgtttggtaatatttttttaattaattttatatttttaaaattagaaaagtaaaaatatttttcaaaatcatattctataaaattgtttttacttttcaattttttaatttagaattaaatttaaaaataaaaaataaagttactttcaatctttttttaaacatttgttttaattaatattttggactccgactagacctgaattggatccaaatccaaccccacccttgacaccgaactaggccctaacctaaacccggacttgaccccagacttagacccaacataaataaaatcaaaaaataaatatgaaaataaactttacagagcacacttttgttttctatctctcttgtgtgtagcgtgctggccagccacccaggggttttccgaccaccccaggccaaacagaccacagaactgaaccccacgacccaaaaattcccaaccctgatccaccctcttcacacactctctttcccgatttctatctctctctttcttgtgtacagcgccgaccaaccaccccaagccaaacaggccacggaaccaaaccctacaaccaagaaaaccccaaccctaatcccccctcttctccctcccctttgatgtgtctctctcgcccttgcaactctcaactcgacatcaatgagccacctctggtggcgattggccaaaatgaaggccaccttctgatttccctgaattgcccaaaaccaaaacccccattaggtgttgtttattttgtccctctttctctccctttagttgctagtgttttgctatgaagaaaatgagactgtggtttgtcaaaatgggtaactaagaaacaaaattcggatggagagatggtggtagtgtggtggttggtgataatggtggtggttgttaaatatgggagtaagcaattcaatagtgcttaggagtatcaaagagggagtaggaagtggatgtgtattgggattattcttcgcatgcttattgttgttgtgattgttctgattgctactagttttagttcttcttaggggttttgaggaagaagatgaagatcttacttaactagtttggatgagtagagaagatgaagtttgggggtaattatggttttgaaattctttgtttttttttaagtgttttactattttttttttcagttcagaagtagaagaaaagtaaaaggaaaaaaaaaaagaaaaaagaaaaagaaaagaaaaaaataaaataaaataattttttttatataatttttaaattatttttataattaatattacgagaatcactaaaaaatttgtcatcacatgtacattgtgtttacgcggatagtccactgtggcacttaatttaaatttttggacagaagtgtaaaaaaaagcaaaacataatggaagttcaataggttttgccatcaaacttttagcttatgtggttaagtcttaaaaaaaataaaattcaaatagttttgctcccaatatctcaaataaatatgattggtttaaaaaactcacaatattaaaataaataaaactttactatatatattttgagtacactaatcattatttttaaaataaataaaattcattttaattaaatataattatgagtaatttacagcataaatatttaagtttaactcccagttgtaaataaatacctaagtttaatttttgacggtaataatacttaagttataattttagaacttccttaagtatctgattgttaagtgttaaataaaattgctacgtggtaatctctaattggtccaagttatttttaaaaaaaataaatagtttaaatataccaacaaaaaatgacaagtatacttaacatttaacggtcaggtacctataaagtttcaaaaatataagtttaatattattgccgctaaaaattaaacttaaatatttatttgtaatcgaaaattagacttaagtatttataccaaaaattactttataattatttatagttggccacacttacaaacgcacgcatgctcaactccatcatcataatcataagacaactactcatgaatattggcattggttggatgttgtttgtgagtcaagtaaagtcaatatacatttatatatatagatgtttgtgttttgatagtttgtggtttgatttggtttggtattattattaatgatggtagtagagttagaggtggtggagctcaaggtgcatatacactgcaaggcttgcgagaaagatgttcgcaaagccctttgcaagatcaaaggtaacatctaatcctctcattctctctttaaataatatgcaaataattttttaatgcacaaatgatacacaactataaaaatcgttacaaattaatatcttttaatttcggttacaagttacttattttttaataaaaaaacttgcctatatagctattaattataggtatagttgcatacaaaaatctatatacagccattaactttaagaatgtatatgtatattctcatagttcgtgtacgctatagttatttaatatcatttgtatattttagaaaattttaagtagtttataatgtcgaaaataagattttaatattttattacacgtttgattatttttttttatatgtgtggtaaataactgtttaaaacttattttcagtattgtaaattattttttattttcttaaaaaatttcaagtagtacataattataaaaaatacaaaattaagctgtaaaacttttgtgaatgttaaaacaaataaggatctacctaaataagactttagaggctgaaataccaaaatttctcactttttatgactatgaattatgatatatatatataggtatacttttaatgggtataaacgagtaatattagaaaattttgagtttttatgtttaatttttatatttaattaaaaaaatttcttatttttatactggagttagaaaaaaaattaaaaaaaaattaaaaaaaatgataataaaaattgaaagtcactcaaaaatgttttatataaacatattttttaggctaattaggatttttgcctcctgaactttgacatgtaccaaatcataccccctgaacttttaaggtcattaaaaatgccccctgaactat

SEQ ID NO: 110623 - DNA, 9117 bp, Cannabis sativa
  modified_base (40)..(49): a, c, t, g, unknown or other
  modified_base (8975)..(8989): a, c, t, g, unknown or other
taaccatctagattctttctggaacttaatttaaattttnnnnnnnnnnttcctatttaagttgatatttagttatctacaactaaccaactttgaatatcttcgtggtatactcaatatcttcgtggtattcacatcttttactgtgatctctcttatgcatgcccccttgtacatcaatgggggacttcaggtagtgaattgagttgcacgtatccttgtagatattctctcttgactcgatcaaattagtatactggggctcgtatcctttgcttactttttttaaagcctcgctccaggcttgaatttctccatccctcttattttgtgactggcttattcctacttctggaacttttgtttgttggtttgtctacttctgtccagaagcagcactatatccagtctgtactgcttcaaactcagagaaactcatttgtggaagtgcataccctgaggcagcgggtccgtaaatggtttgagttttgtattgggttcctggagggactatagatggaaccaatagttgtggcgcagacgtggaattgttgacattgagtgatggcgccagagccacttaaaaatctctggtataggcttcctccaaactaatgaagccttgggcccttatcaagaaatctgacagtgtatcaaacctttgtgtttctagttcattcaaaaataaagaccctgctgcaactcctgattgcagggccaccaacttcatatcatcattcacttttgtattggtcgtcgccttcatccgctggatgtaagccttgaggctttctctgggttgctgcctgatgttggtcaacgaattgacctccatgtcaaagtcttttacagcaataaactgcttcgtaatatagattgtaagtccttttagcttcagatggaataggacgataatctcttccaccaatcctcgaaaaatttagataatgtaaaaaaatgcacaaacattttgcatcatccctgacttgcgctacttgaatcaacttattgtatttagacaagtgggctctcgggtccattttgccttcatacaattccatttgaggcattcagaagttgtccaatagtggtgcctcgatgattcttctcatgcatggtttgacctcctcgttttttgagtcagatgcagcttaactatgttttcagaccaaacagtccgtgagttttgccaatgtagctatttgatcttttagccatcttgagtggtcgttcgggagctcttgtacgcggactctatcattgatactatttattttcaaatcgcctctgtgaggccttgccttctcaccttttgccttttctatttttgcattcaagctatcctgaaggtccattgttgacatgttgtcctctaggtctaggttctttgcttgaacgcactggttaatagagtcataggggaaatttttccatccccgaacattgggactgtgtacttgagcactctacccattgctccacacgactctgccctgtagatcgatcagttggcccaaccttggggcatgagcatccctttctctttgctgggcttggccaactgtgtatctgatgtttcatggtgcgttatttatatgttttcacggagggtcacccatgatgccttttcctttatcttttgctggggcagacgacccaacttgagggttattaactagtggaacgaggaaatcttcctctgggaatttagcctgtaactgtgtaagagtttcttacaattttcttaaaaattcctcctggtcaaccaaccttttccgcgtatcagtgagttcttgtcctaaacgtatcactttgggatcatgctcgtattactcgtcttcatattctttgttgtaatttttgttatgaccatttttgttatgtcccccacgatgttggtattttggatgatgatgagtgcctacctccaatgtttccccatcccccacgaaaaatacttgagcagtcgtttgggggagctagttttcatcgttgttggcagcgtcgtctctaccatctcaggcaccatctcaagcaggatctcgtgcaggtcatttggccactgcctttcaagttacaaccatcgttgtagatgacagctttggtaattctttcctcaactctcaatgaaagcactaaagtgttgactaagattttcgatttatataaaaaaaaaagcttaagaaagaagtaaataaagaagaggagatcaagatttttacgtggttcgagtgttaaagaactttagtccacgagtcaatattattgagctagaaaagcttcaaagtatttcttacaagtatttatgccctagttgaggaaccctaattctcagttcttctctcaagaaatcaatttcctaccctttacatgaagggataatgttatatttataggggagaatcaagtatgggcatacccaaacccgatagggtttcttaggatcaacttgtcctctgtgggataaaatacaattgttattgattttgagccacttgtgaggcttgtttgtataagcagagcaacggtcgaagaggccatgtggcgtgtgcaactgagtccgtaccgagaatgtcagagtatatggcattggataaaaatgtgatctccttttggtagcatatgtgccccgccagtatgatgtaggggacacgttttgacactgtggggccttgtgtccggagggttccgagtatggatgtccgaatgctacataaatgattctttaatttctcgctcccaaattgcctctttggacttgtcttgatagactcttagcttctgaaccgaataatttttttttggattagggagattcgtccttggcaggtctaggagttaggcttatgtccgaatcagggccctaacgtgacttggtcatttaggtgaatagtatacgagatcgggcccaagtttgagccaaccttgactggcatttggactttggattctaaaaacccagataacaacaacaatattatcaaacaatcttttttaaattgttaaaatattaaggaacattcacctaaaatactaattttaaagtttcaaacacttctatgtatgatttattgactttgctcaaattatttttgttcaaagataaaacaaaaaattctatagaattttaaacataacaatgtgtttgtgatgctccataagcttttacaatgcttaaagatgcttttatggaaaacaaacttgatttttaggaaaaattgatgattaacaatgcatttgtgatggtgttttgaaaatttgatttttaacgcaagaacgatatttaacaattcatttgcgatgggttacgataaaatttgataaaaattttggtaatacaaaacttttcacttaaatatcagtttaaagtgattttcttttcgttttaatttttatttgtacattttcttcttcgagatatacacgtcgagaataaataggtccttaaattttagtgtgattttaatttattattgaacccttaaacattgaaatgaatctacacactctctcattaattaaaatttattgttgtacactccaaatttggactttaacacattctaaacatgtggatctaagaaaattaccttcgaatagaaatggggcgtgtaacggacaaggtgagtgaggactgaggaggaagagagagtgggactatgggagagggagagagatcaagccatggagtgagagaaaaagagagggagaaattagagagaatgagtgaacattggttgagctagaaccaaaaccagaacaagaaaaataatcaaatttagaaaatattttttaaacaagtgagtgagaaactagatgtgtcatttctttttggggagggggcatcaaaactaaacgacatgtcgtttactccactatcgattggaacgacgtcgtaataacacaatagacaaaacaaaacctcgacaaatcccaagtctttgaaagtgaagtaatcgtagttcgtagattcatcattggttggttgaagccgtggcttcactgataattgagcggtcatgaagattcataggcagggaatgggtttgaggttagatctgctcgtgtttatgtttgttgtttcaatctcctttctttgtcggactgtactctccgatctcgttctctccaaggttgaccgacgggtaagtctacggttttgttttagatctatggatacgagcttgtaatgtttgtttactttcttcatttttattttgttgggtcgcaggcagatttgagatcgcaaatcgttcgtgtaatttccacactcaaggtagtactcttttttagttactgtttgtaatgttaaaccttgacctgctagctaaaatggatgctgacccaaaatctgaaatgggatttttgaatatgatttgaacttgagcttggcaggtggagaatggagggtccaatttggtttcggaggttctgttggctttccctgataaacaggttaaatatttggcttatttgggtgccaccagtaatggtgggaagggaaaagcaaaagatttcactaatagtttacctgtccaagttgcccaccctaaagacatgccttcatccttaacattttattcggtgactctaccaaagggactggctaaaggggaaagctttactcttgatgtactggctgcttacactcatgccttgcagccatttcctgagaaaatttctcaggctgagatacagctcctagtcttccaagatagctcatactttctctctccttatgctgtcaagtttcaatcactcagtgttaaattacctgatgctagaattgaatcgtatacaaaattagataataccaagattcatggctcagagattaagtatggcccctatgagaatcttccccccttctcgtactctcctattgttgttcatttcgagaacaagcaaccctttgctgttgctcgtgagttggtgcgagagctagagatttcacactggggtaatgttcaggtgactgagcattacaatcttaaccatggaggtgcccaactcaagggggaattttctaggtcagacaaaatgttttcttgtagtgattgcactgctggtcttgggatttgatctaacatctccttatcttttttgttgcaggcttgattaccaatcccgacctcatgtgagaggtgcatctgcatttaggcatcttgttgcaaaattgcctccgagaactcgctctgtttattatagagatgagattgggaatatttcaacttctcatttatggggtgattccaaaaaggtagatagttattctaaataggaattgattttatggggttttcatacaatcttactcaattctttccataattcagacggaactagaaatcgagcctaggtatccattgtttggtggttggagaactgcttttaccattggatatggcttgccgcttcatgacttcttatttgagtcacagggaaaacgctttcttaacttcactttcggttcccccattaacgaccttgtcattgatactctcattgtgaaggttagtgaaatgaagacagtttgattaattgtgtattctcaaataacataagaaggtgttagatcagaatagtgaatagaatgtaaagcatactttacctttgaatctggtactatgatgtcatatgtaaataatttgattagcatgataataggtttctatgtttgtgactggaactacaggttgttttacccgagggctctgcggatatctctgtgtctacaccatttcctgtaaaacaatcacaagaggtattaccagactatctttggttatcattctatattttcctctcatcacctgttgaatgttgatattataatttggatgtgtttattttctatcaagtgaatgacgctgttattgtcgtgtttattattcaccgcagacaaagatctcccacttggatattgctggtagacctgtggttgtactgcaaaaaaccaatgttgtgcccgagcataatcagtatttccaggtaataatactgctatacgtatagagttgcagggcatgtgactcagaatttcatgaaacttactgaaataaggaaaattttctttgtataaggtgtatcaaactagtaaagaaatttatttatactccacatggctcatctatgatagcggatagtctgatatgaaaataattgttcatattttcttcgactactcaagagagcataggtaagcttgtgtgacttcaacattatattgcactttgtttttgcaggtctattacaagttcaacagttttgccatgcttagggaaccacttatgttgatttctggttttcttttcctatttcttaccggtattgtgtatatacacgcggacatgtcaatctcaaagtcatctccttcttatctagctaaacttcagtgggatgaggtgagcggttgttccactcaatatctacttaatagtttgtgttaattatcagaaaagtgccaattatgtgggtgtgttgttttaggtgcgagctgcagttcagcaggtccaaaatattatcagtcgttgcataacacttcacgataaactggaagcatcattacacgatcttgcaaggactggagatatccaagcctgcaaagcagctcgaaaagctgctgatggttcgttgaaagagctcacaaaagaactgaagccattgttggcatctctacaatcgtcacagcaagctgctcaaatattgcccaaggtttgcttactttgtcttccattgacttcgagtcgagttttcgttctcattgttcaatatgcatataccctttgcttctagcacctgactttctaatcgtggttggtttttaaatttggtttaaataggtcgaggatctgattgtcaaggagaaagatttacaagagagattgttggcaaaacactcaacagttgtggactgctatgagaaaaaaattggaggaaaggaaattgagaaccgggttgctctacatcagcagaaaatcagtgtgttgtggcaggaagttgacgatctgctggactttatcgatgagatataagaattcaacgcagagaggacagtcccttacaattaaagaaaaagtgtgtgttaacttgtgacatcctcaaatatatcagataggttttcaaatggcaagaactaatttcagtttgagtttttattaatgtcttcagagaactgctgagttttttctaagctctctttctgttctctttaggattttagaaagagaagaatgctactctgttgaacaaaacaatctataatctaatttatattttacgaacatgatggagttgatttttatcagcaatttataaaataattacttccaaccataaaaacttgcacaaaaatcagcaaatttgctctttacaaagaatatgaagaaagaaagaaaaaactcatggcacaaataggtatcactttcaattgatctttacaataaaattttgccaacataccccatacgttttatggtaaagttttctccatgtttcagttaaatttgcatttctataagattgaagagagaaagaacaaaatgaaaagaactaaactcatgacatagatacagagacagtgatcactttcagttgttttgggatgggttcacttgtagaagctcaatgtttagttcaaaagtagctccaggctgcaaaaaaacaaatgtaagtcaccattcaattcaagtgaattaatagagatacagaaatgaaacaatagggagcttacagggatctcattactccctttattgccatagccaagctccggcggaactatcacagctcgctgtgcaagaaagacacatacgaacaaaggagcaccgattatgaaggaagaagagaagagaagagaagagaagagaaggtcgtaagaataaggaatgcttaagaggagacattaccggtgtagcttaaggctacagcaggtgttgccccatagtgataaacaaatatttggtagctaaccttgcctcctactttcattccttgtgtgattgagtacaatgctggtggaggcttaggtgaagcctgtgctgaaaatagaccatttggattatcaacaaaattacgcttcctctctttccctggtggatctcctactttgaactcgtatggctaattttgcatattaccaccaaccaattagtcttattaaacaaatgaactcaaaaatgatatttaaaacgaaagtagtaaataccaaaatgagagattatagatagataacctgagcaatagcacgattcccagccaagagtttagattctcgacttgacaaagcagtaatcccacgatacaagcagtcaaaatgaacctaataatcaacaaagatcaaagctttatcaaattatattttcaataaccctttcccctccaaaatataataataataacaaaaaaaaaatcattattcatatatgtgaacctgaacagttgatcccttctcagcaattggaccctttccctcaaccacatcataatatttcaatccattatcaccttaaaattcaaatctttaatcaaaatcaagtactattaagatagtaaagaaagaaaggggggttacttgtagtagtacttgtttggtaatcttcaggaggaatgatcttcctgctacgtctctctctggcatcagctcctcccattggaagggtcaaagaaaagactgaagacattccaagaatggcacatcttctggaaatagaaatgggtatgggtatggctgttgttgaaaccacaacatgttttggttcctcgcattcaaaattaccacaattaagcttcactatcctttgatgcaggcatcttagtgaagaacaagaagtagcagcagcagccatgggcgttggaagttggaacactagaacaaacacggcagagcagactttgaggtatttatatccctatccatatatattacaattttctaacgacttaccaaattacatgtttatatatataaatatatnnnnnnnnnnnnnnntatatataaatatatatactagtagaatgccacgtgcgaggcacgtatattaatttttatgctaggtgtgtcttgctttatttaaaaacaatacaataaataattaaagaaaaaatattattaattat

SEQ ID NO: 110624 - DNA, 4185 bp, Cannabis sativa
aaaccaaattagagcactaaaaatgaaaaactaaaattaaaaaaggtgtaattatcacaccctttcttccacaaagtgtggtgagtagtagtagtagtagttctattaaaattaaataaactaaaaattcctacaaaatatatgttaaatgtgttacattgaaaagctacaatttcacagattatagtttttgcttgtttgtttgttggtaggtaccaaataaaaataactaaacaaacaaattacagacaaaggggactttgatacactaataatatgcatgtaaatccacaaataactcaaaagggtaaaagaggaaataaaatattgttatacttactaatgctaatactttcttcatagttagtccccccacaaactctactaattccaatcttgttttcatcaaatcatatcaagcttctacttctttcccacttgacttagccttagtttcatccttctctgcattgccttcttctccttcttcctcttcttcttcgtctgcctcgtctgctagtttcgtaagctcctcttgaatcatcaactttatcgatgatttcattggtgtcagatcagcatcgaatcgctcagctgaaattattaggccagttattatcagttcggttaggaggattcttaatcagaatttcaactttgaaacccgaaagatggaaaaataaaagtagatagggaatataccgagtagcttcaaaatgtcggtgaacgtagcctgcaaaaatggaaaagagagaatcggattaaagttgcattttacatactttgcagtctgtacacaccgaaaaaccatttctcgaaaacaattatgcattctaaagcaatatatacattatagtatagatgttataagagaaagaagctatgataacataattaagcattcttaactgatactatgattgactacttactgtgttaaagtcgacttctttgaggatttcgcatattgaatctctcagctcatcatcacttggcttcaatttatccttggtcttaacctttcctctagaggattttttccctgtgaataaaacaagagaatttcattttagtatgttgtttgagatataagagaaaggtaaatgataacaaagaatgtatgcaaggcacccgcttctaaatttaagttcacgagttgtacgagaagacggtgtatattatgcatagcaattacagtgaagaaaaatgcgacatttttcttttacctgatttctccttaggagcaggttttgctttagatggggctttcttttcacttgttttcttccttgagaatacctttggactcgcatcgctctcatcgtcatccttggactgctttgatgacttctttggtttttttttaggtggtggggggctggacttaggtgaaacaattaccttcttgcttctagatttttgagcagattctttcttttggggagttttcttggaacttcttttacgttttttaacctcttcttcagattcctcttcttcggattcctctttctcttcacttatagaatgctcactaatctcatcttcagatttttctggaagaccattttcgttttccacctcattttcttcatcttcaactactttgttttcttcatcttctttgtgttcttcctcttctttgtgttcttcctcctcttcttcttcatcttctgattcatcttccgaatcagatccatgacttttggcttgtgcttttgaagtgtcctcattctttctctgataattggcaaacaggtaaacaagtattttcagagttaaagctatttcaaatcataatgctaaatgatattagcataatgaagatggatgagggaaggcaacataaataaataagaagtattaggctccaataagaaggttgtaatattgtgctccgagtaagattgaaaataacaccttaacagagcgttttgcagatgagctccttgacgaacttcgttttcctcctctcttacgctttttccctttatctgactgagaaacagaagatataatgctttagatgttgctatttacagagagaaattatgatggttgaaaatggcaaaccttttctttttcagaaagtagcacagttgtagtagcataaggggccaacaaaaaatccatcagctttatgacagtatcttcctgcaaatgcatacccgcctcattattaacatgttcactttcaccaaaattacttaggaagattccaatctaccatagaatgattctttcttccgagaatgaaaaaaacaagatccatcaactaaatcttatttactttttacaaattacatatatggaggttggagacctgaacaaccagccatacaaactctttataacccaacctcttgcgttagcataaagtggcaccttaatttatctacactaaacttgtccttgctaaaaagaaatgattaggaaagctaattgaagcagcagaaagtatataaacaaaccttacgagttgtagtcttgacaattggtatgtcaaacaaatcacagaattccagtaatttctctttgttgcatttatcaagtttttcctttactttgttcttttgcttgtcctacaacaacaatggtaacacatgagaagagtgttggaggcttcaagatctacatcccattgcttcacagtaatcatttttaaacaaataagtaatgaatgcattagaaaactagttgtacaatgtactacaatttgtcaaccaatgatccgcaatttgtatcccaatttcttttagtttatgcatttgtttacctcattttcatgccacacaaaacctgaaaaccgagatatattactcttgacctgaaattgctgcagcaaaaaaaaaaggaaatgagataagtttattaccctcaaaggcaaggcaatctgtccaccaacacaaggaagttgaaaggaaaagtaatacgagaaaagcaagagataaggtcgtgaatacctttcctcttctgccaaaaagaatcgtatgaagtaatttcaaagtgtcatctgtttttctccttgaaaatttgaaagccactgtagaagtaaaggttttcaaatgttaatataagtaaactcagatcataaacatggcgtatgcacaaaacaagtctgctgcacagccttcgcaactaacagatgccaggaagaagcaacaaatttcaaaatggtccacgcactatgtacccaatttgaggaaaaaataatgtccacataattcctaaaaattaactataaatttaagtgcagaaacaataccattgggtatatctttcagtggtgtacccttgccctgaaattgaacgagtttacataagtcaatgatcttttggaagcaaactatgatgttctagcaccaaaaaacaattaatggaaataaaaatggacaaaaagaaaaaggaatgaacaaaacctttggaatttggaattccctgacagattctttatcaatagttgccaccagcctttcaactgatttgcgctctcgtacagggcgatcacttacaggagtttttggctctttctccttttcctccactaccttcttctccttcttggttttctctgacctcttccctttcacaggcttctttgatcctttctcctcttcaggctcttcagttttctcatccttgtcctgctcttcctcctttgacacatccatcttctcatccgcagcttcattaacttcatccttttctttcttctcttctttttcagctggactagtttcttcctttaccagctcagctttaggttcccctacttcttctttttctttctcatctatcttttcatctcccttggggtcttcatccatcttctcagcttcatctttattgtcttcttttttatcttcctccattggcttaggttcatcatttatttccacttccttttcctttggctcatcatttgctttctctgccttttccttaggtacatctttcgtttccaattcctttgactcctcatttacttctatttccattcccttttccttttcctttgactcctcttttacttctatttccttttcatttgccttgtcgttcacctttatttccttttccttttcacttggcttgtgattcacctttacttccttttcctttggcttgtcattcacctttacttccttttcctttggctcatcattcacctttacttccttttcc

SEQ ID NO: 110625 - DNA, 6093 bp, Cannabis sativa
  modified_base (6048)..(6048): a, c, t, g, unknown or other
tccggctccatgttcggattcaggtccaggtccaagtccgagacgaggtctggggccagattcgagtccaggtcagagtctgggtccgggtctccatcttaagtccggcaatcgggtctggtctcgagtccgagtcgtgggtctgggtctgggtccagatcccgagtctcgagtccgggtctaggtccaagtccgagtcccatggtccgagtcggagattggtgttgacccctaatcctttgtaaatattatgatgcaagctaatacagaccattttttgtgaattgaataatacaatatacatacattgtattaaaaaatttagtcgtaattaatacaatacattagtttatccaaacatagtattatttattatttaatacaatacgacccttatacaacataccaaacaaatccaaaatgaccaatatagtcaccctatagtcatatatggtatctatattcactaatcttttatgcctttttatttttatttttatttttatttttgaaacactattcttttgtgccttggatcacaagttatacgtatgaccaattatattagaatagactaattatatcttattttgaaactatagatattaattaatccattctaataaattatttgaaaattttgcaacaaaaatccttatatagctcattttgttgcattttaatcactaattacatcttttttttttgtggcaaaaatttttatattgtttattttgttgcaattaaactcttatctaaatttttgacagtaaaaattcttatgtagttcatcattagtagcaaaaatttcaaccgttatatatttgatacaatattagtctcttaaactgaaaacaacaaatgaactaatattataacaaaatgacttttgccactaaagatgaattacataatataaattacccctaaaaagattatctagggatttaagtacaattaaatgaacaatataagaatttttactactaaaatttatctataaaaatttaagtataacaaatacttatatagcaaatatctcctattataatagggttaatataacttagtgtcacactctcctacctttgcaaaaaaggtaatatcttttaaatattaacatcaactttctatctacataaataaatatcataattaaaagcaacaataataataataactcatggtccaccatacatgactatacttgtgattgtatgaattttgatatcttattcaattgaaatataaatctgtttagacaattttgtctaaaagaaaattacattaaatgtaggagtttttttggtagtgtcaaaaccgtaatgaagtttatattatataaatggttacttcaaagtaataaataatctagtattgataatgacttattaggacctatttctctctttcattagagaaattaactaaccctctcatattttaggtaaaaaaaaaaaacaaataagtcactatttgaaagaatattacactaagagccaaagcaaaaaaaaacaaaaaacaaaacctcacaagtcaatatcttgaaggtttggtttcaccagatgatgggagatttctcatcattacctctttttgtttttcttccttccctttacttgcttttctaaacttttaagcctctggctgataaccgaggttgaagaaattcttcggtcagtaagctttgttggttcagcagttgtcgagatttgttcctgtgtcattgctggaaattgtttcgtctgtgaaactgacgcaggttgtttcgtcggtgaaactgccgtagattgtttcaatgatgaaaacaaagatgcaaaggtagttggggttgattgttgggaagtgcttgcctccacaactggtacttcaggaataccaagaaacttcttcacctcgggtcttttaagcgctgcccaaaattttcacaaacagaaccggtcttttagtgtgcacaacaatgaaagcttcccacaatacagaatacataagatgcaagaaaatcgctctttattgccccaaaagtggtttgaaaaggacttaccaagaccataaaaaagcgaaaagatgttggatgtaatccagtaacagaatatagcctgcatagtcaaaatgggagtaaattcatcattctgtccttaatgtaacactcttcatcaagtcataaaattagtaaactcgggagtaggacatttctgcacatggctcaagacaaggtggttaaagcttgaaaaggataccgacccaataaaatgtacttgaaaatttacctgtggaaaactagctgtgaatggaatcgtcgcaactgccaaaccccttgaaacatttttcatagtaccagcaataggatttccttccaaaccttcttgcatattgcactggcgaaatgtacgaatttagttagttaaactcgttaagagtcccctaaattacatgttaataggagttaacagaattcgaataagtaagacatccacctctactgtaattaaaaacgacaatcctgtcaaaactggaagtacgtataaggcgtctggaattgtgaggtcaacaaaccagaacgctccaccgcttttaaaggatggcactttttctgccatattatttatctggaaaagatgcaaagttatcagagatatttagacaccaccaactcaaatagtttcatcattcaggtaatcttaagggagcaagatgtatcttactgcaaggaagaaactgatgaagacaggaccttgaatgaagagaccttttagtggagtaaagggactaacaccatacctacaatgcccaaagaaacaacaaaagttatatcattataaataaactgtaaatttgttcaaattttcctattcttatattcagtaagctacgattcaggattcaaataatatagaagtaaagattcaaagcccagagttgttgggcttatacactaagcctttagcaataagctacacatgaaaactagtcacttactcatgaaaaatcttctgcattctcttttgaccctcaatggtacttatgttctgaaaaacgaaaaaaaaaaattattaaatggcaatatcttgaagcatgtaaaactaaagttcacagcagaaatataagccagagacttaaagcttaatcgctagtaggttatcagtggtcagagaatacaaaaaactattaacatctagataacccttaaacctttctaagaaaacgaaaactttagtatggtttggacatatcaacaaaaatgaaaaataataataatgaacaataaataaatctaacatcagacttgtatatgagttgtgaagtaggaaatactaactttcgtaaaaaacatgccaactactaaaaaaaagtgaggttgtttgagcttaattagtaaaacatcttaccccctcctgcatttgttgcttaacatcctccaggtgaggcctcataatctgcaaacatcccacccacaattataatcacaataggtatgcagccataaatacaagaacaaaaacaaacttgcagcagacttttcttcggtttaatccaaagctagactagagtatgactaaatttaaataaagaagatttgtgttgtcttctgaagcaagtaaccaactgtatctatgaggaattcaacacggtcataaccatatttggggaccaggaaattatagcaattgctatttaggtactcaaacctcatggaagcaaaccatatgtctaaccatttgagttttgggagaaatacatgcttaataagactacaaaagcacagagcgagaaaactttggacgataattaaagatgtgtaaaacataaacagacagcaaaaagattgccatcaaaagaaacttgaagcaaaacacaatcatacacctttgagtttacaacatacttatatttttaagctaggctccctatctaacaaaacaataattgaagaccgcgaaactatagaaattgctatgtatttacctcgagtttacaataataaagtaggaagaaaactggcaataaacatgaaaataagttcataagaaaatgtggcatgaaccaacaacaaacataaacttacagatagcttagaggtagctttaagttgatttattaaaagtggaatagttgcccctcggatcataagcgttgttacagcaattgcagcccacctgaaaatatatacagatttcaaatttcaatatcatcaccaaaatagaaaaaacaaaaaatgatagccttaaattgaagaaaaaccaggagatattgcacctgtgcaaatatgtacagatcaaatggaaccaaaaaaatatacacacatgaaaaaaaggaacttccacagcaaaccacgatcatcacatactgttctcttaactctctctaacaagtaaactaaaatctcaacttaagacaattagtcataggggcgacaatttgtgtcacgacacgcgaatttgacacacatgaggttttgtgggtttaacacgacacaagtattatgcgagtcgtattcgtgttttatcaatttttcgtgttacgaattgtactcatgttagccatataaaataaattgaaaaagtccacatgacacaatgacacaaaaacattaatttagcttacaacgccaacacaacataaacgtgggttcaacaagacacaaaattatgtgagttgtattgtgtctgtgttttataaatttggcaatttttctgtaaatttaagatctcaacacgacacaaattcaacatgccttcagacatttttttcatcagcaatttcaatttttaataccctattaccataacagtacaagaattaattccaaactcatatataaaagaagaaagtcatctcaccaattcaaaccaccataagtatgaacagcatcaatgagatactgcaacaactgaacaggcaagtaagaatcagcagcagcaatggcaacttcatcaaccgcagggacctgcgaagccgcaacctgtacagccgcatcattgagaacctctgccacgtcactcactatcccaaagctaaccgaaccttcatcaacattcgtcgacatataacggtgaaaagcaaaaccagagctagatgatatcaaagctttcgaaaatcttcgatcttgacaaaacccaccaaaacccccacacccaattttactaactccatttccaaaaaaccttttctgtgaagaaaattctccattaacgggctgaggcttccgatcgtcgtcacggagaatatgaaaaacagagggatggaatttccgagctacgatagtggctctcgtcgagagactacgacgataagccattgctgtaattgtaaattcaaattatttaaggaaatttcagatcttgttaaaccctaacataaccctaaaacctcagcttaaaatcctgattcaatgaaaagtagtaatagttgcagaagatttttacctgaacgaggaagagggaagcaagttcgagtcttggggcttcgaatgagtagatgagtgaggaatcggaagctgacgagttgggcaactcagtccgattgtattggaagaaggctgtactcgccggtaaaaggctttagggctggtcttgatttctaagctcaggcccaactaaattcttggcccatttgtggtccactattattggaataatttcataaatacacaccaaaaaaaggattatttcacaaatacacaaaaataactaaaagaaattacaaaactacagttatataaaatttaaatatttttacgatttatatgattttatttacagaaaatatatctttttatgttgtacttgttaatttgttattgattttttattctctgtatgtaatctatgttatttttctgaaaccttcatgtaattttttattatcttcatgttatttttataaaaaaccgtaaacctaaaaatgtaaatttttttacatacgatgatcgtacgtaaatttttcttttaattgtaatatttattgcataaataaaccaaattttttcatactgcagtatactgtgttaagtttcactagtgttctactggtattttttagttgttntactgttgttttgagttgttttgttttgtgttttactggtatttt

SEQ ID NO: 110626 - DNA, 2021 bp, Cannabis sativa
tattcacatagacacatacacatacacataaatttaaatatatatatatataacttatttattttagtaatgaatacatatatattttagtgtaaatttaaaatgagtacagatattgacatatatgtatattggtttgatttatatataaatggagatggaaatagattattattgaagattaagaaataatagtcttttttttttaattttttttttctatgaaattaatgttaaataatttatcattaaaaaaaataaccaatccaatccgcactattgcggattagattggatttaaactgttatgcggatcggattaaatccaaaatataaaatccgcacttaatgcgaattgaatgttgtttgaccaaaaaatacggattgaatcgaatgagcactcctacagcttaatttttcttggaatatgttaacttatatcattgagctgctatatgctaattatgaaagagttatataatatattggaaatatatggcataaatatttattttatttgtcttgttgttaataagtaattaattttaaaaaaggcagcattaaattcaaaattttatttttttaaattttcattggtacccactaactttttcagtactttggacacgtgtacaactcaaattattcatttttttcattctaacctaataatattaaaaaaaaaaaatgaaaaaaattatatctcattttttttttgaagtaattgtaactaactgaaaagggaaagaaacgtccaaagttacagctacacaaccgagtggagaaaactagactctccaaatcaaatctttatcaagctgtaatgcattccttgcattttgatgagcttcatagtttatattcctagagatatggtaaagagatgcatttgggaattgggatagagattctcaaattgactcaacaagactggaaagagctgaattgttcttccaattatttttaacttttgagaccaattgagagcaatcagattcaataaggttgagtggaaggttgattgcagagcaccatctcaaggcttctaggagggcttgagcttcgacaaagagaggtgtagaaaagcctacgttagtctagttttgctagttcttgatagctgcacccaaatctgttcggagcttctttaaatcaagggttgcatctacacttaacttgtagttgccatgttagagggcatgggttaagggagaactgactggaaaatggatctggtctgagttgttgccctctaacatgctagactttggattgagattttgagccccctggtagtcctgtgacaaactaagaacatagtcctccacatcaatgaggttgttagaattgtgattgaaaagagcattatttctctagttccaaatctgccaagacaaactgataagcaaggcaaaattctatttgttaagatgctcaagacctcttaaataatattttttgatgtcacacttatgattattagtgttgaattggtggagtgaagatttcctccaaatagacttagccctaggacaatctaaaagagcatggataaccatctcaactttgcacttgcagtaggaacaaaagggttgctaaggatttttttgttaaacaagttcagggcacacgagaggacatggttaaaggctttccaagtgaagtgtttgatttttgggggagttttggtgttctagacttttttccaccagtgtttaaaatagtcaggattggaagatgagggaaaggttgaactggagttgaaattggcaaggtgataggctgaattgacagtgaagataccaaagtgatggtgcccctagatgaggttgtcatgcaaggaggagtcaatgggaacctgaagtattgcattaacctgatatttgggcagatagtgttgaagtctagctatattccaattattatctgttatagtgagatttctttcacctagaaactcgagaccagactcctatttagaggacacgtatattcagatttccaatgaaagttgaattgtc

SEQ ID NO: 110627 - DNA, 5794 bp, Cannabis sativa
  modified_base (5533)..(5536): a, c, t, g, unknown or other
acccgcccaatataaagattgagcgggttatatttttgtcggattttttagtttgtattttttgtcgggttatctcggtttggtttgggtcgtttacaaaagtttatgtacaaccctagtaacatgaagttaagttagaagtgaggtgatccatttgagttcagtaacaatatttgctagagctctgaactcactttctgtagttgacctgacaacaacatgatgcttctttgtagaccaaaataagatttcctcccaaaaacacaagttaactacttgtagaacgtttgtaatccacacaacttacccaatcagcatcagaatagctctcaagggtcataacaacaactaatttgagtaataaatcatttgaaatagtaccttttagatactataatagtcgtttacaagcctcccaatgtgtagttgttgaagcttttatgaatttactcaatttttttatgataaatgcaacatcaggccttcttaaagtaagatattgtagggctcccaaggtggatctatacaatgttagatcttcaaaaggatccccttcctacaaagaaagttttgtggcaacactagttggatttggacaagattttgcaccttccacgtgaagtttcacaagtaggtcgatatatttagtttgggataagtacatgccaacactagttctatatatctcaacccctagaaagtaatgaacttcccccacattcttaagagaaaaggccttgtttagatcatccacaagtttgcaaataagactgtcatcgggacctatcaagagaatatcatccatgtagactaacaagataatcaatatagagccagagccatagacgaagaaagaagaatcagattttgaagcttgaaatccccactaaagtagactagttttgagcttctcattccaagctcttggagcatgtttgagaccatcaatgaccttttttaagcaacaaacatgagttggttgagtagtatcaatgaaacctagagactcttacatgaagacaattttagtaagctcttcattaaggaaagcactagtgacatcaagctatttaactgactaatttaaagagacaaccaaggaaataacagttcttacagtaattggtttgacaactggagagaaagtttcttcatagtcaatccaaggtgtttgtgagtagccttttgcaactaaccttgatttgaatctgtccaaagattcatcatcattcaacttgaccctatgcacccatttatttcctataatctgcattgcagggtagtaaggaaccaaaaataagtgtctgcagcttttagtgctttggctaaatcatacataaaggtgaaccatttaggatcctgtaatgtaactttgagggactttggttcagatagtattaaagattctggaaggggtgcttggtagagagataagcctttggtttaataataccattttgagacctagtgaccatgatatgatttcttcttgcagcagtttggaaggttttagtaccattatgcatataatcactaatggtatttgtttgtgcaggttgagttactgcatgttgagtttcttcaggttgagttacagcaggttgagggtgtgggggtggagttgatacaggttgagtgttttgaggttgagttgctgcaagttaagcttgtgcaagttgtgttgttgtaggttgagtgttttgggtttgagtttcagtagattgtgtgttttaatgttgagtagcagtaggaaggggtgttttggggatagtagggttatttgtgggataagtagtgtggtttacgacatgagaggtgataggtggagtaatttcagtaggtcttgtgggtggtgcagcaacattttgtgtagcatttgtgcatggaggagcaggctcagtggaaacattgtgatgcacagaatgaagagtattgttagcacctgaacaagttgaaaaacttgaagtaggaaagtaactagggttatgagcaaattgtaactgatgtgatagcagttgtgaagagacacatgggtaacacttttcattaaacactaggttttgagcagtgtacattcttcctttatcattttcacacaaataacctttatgaaaggaagagtaccccaaaaacaagcattgtcttgacgtgaagtccaacctatgtgaattataaggcctcaaataaaacatgcataaccaaaaggctttagtatagagtaattaggttgtgtaccaaataagcattcaaaaggacttatattgttaaaaataggtgtgggcagcatgtttatggtgaaagtagcacattgaaaggtatgccaccaatatttgagatccaaatttgcttgtgctaatagagttaaaccagtctcagttatgtgtcgatgtttcttttcaggccttctattttgctcatgcgtatgtggacaaggatgagaaaatagaattccttgatcatttaagaaccttgcaaaagttttgtattctcctctaccatcaacttgaaggtatttgctaaattacttttctatcgcgttcttaaactgaatgaacatatcaaatgcttgagactttaaagataaagggtaaatttatgtaaatatactgtaatcatccatgaagaaaatgtaatatttgtatccatatctagattgcagcctgaataactcgaagagattgagaggctttgtgagtggacacaggaaagggtaatttataactcttaccatgttgacaagcattacaaaatgatagtgtttttaaagagcccgagtgagtgagataaggtgggaatcaatttacttagtgtagaatttgcaagatggcctaacttgcaatgctaggtattaagatcagaagatttttcagtatgatacagaataggcaaagagaaagaagagcaaaatgtttttattgatagctgaattagtacatgattcattttgatctacactttgatttacagaagtaaatgatggagtataagaagaatgattatgaacagctgtagtcgtagctaaatgacactgcagagaggactttggctgaccaggttcatcaccaaggaggtaaagaccatccttaagcttccccttgaccagaacatctcctatttccttgtccataacaaagcactagtatttatgaaattccaaaaatacattattatcattagtcaatttagatacactaacaagatttttagtgacaattaaaacttgtaagaccgagtgcatatgtaaaaggtaagaatataaataagatggtattgtagcagatcctatgtgagaaattaagagcttcataccatcccatactacaagggtttcttggccttgatagggaactgaagtgtcaagatttgtgctgtcaaatgcgatatgatttgtggcacccgtatccacataccatgaatgatcatctccaaaatcttggactatggtggaagagtgtgcttgaggatcataatcaaaatccaattttgtgagatcagcacgattgttggagccacctagtttggagtaatccaatttttgtcaaagcgatagtgacaaactggagttgtatgacctgatcgcaaacacatttgacaaataactctggtgttgttgaatcgaccaactcctttaccacgaacaataggaagatgtttattgtcaacttgagttgtttgagagttagaaaatggtcaagaacccccaaatctgccatttccaaatgcgagatttgcatgcatttggatagataaatctgtcatggcgtgatgatattcaaggtaacctttatgggaaaaacagcaatgcttgaacttcttcaatagatagagcatcacttcttgaagttatccttaaaataatagaattaaatttaggaccaagtccattgagaagttgcaggacgatatcttgagtagaaacaagggaaacaacaattgtaagggcatttgtaatggcctgaactttgtcaacatattttgaaattgtcagaccacctctttgaatgtgagagaattgtcccttgagttggagacctcgagccttggtctgtgaagaatttttttgttcaagagccctccaaacagtgaatgaggttatgaaattgacaactaaagcaagaatggcatcggacatggatgatcttaaccaagaaagaagcagatgatcttcgcgacgctattgatgatacttaagatttggagctccggtaaccaaaaattagggtggaggaacccctgtgaataagatttcataaaaatcatgactaatgactgttggaatcacttgaaattttcatgagagaaaattgagacgatcgagttttgtagtaagcgaagaactaagagaatgagaaaagggattccacggaggagcatcgacagtaaccatgggagcagcagtggaagcaagggaagtagccatgggagcaggagcggaagtaggatcagaggtagatgaagacattgacgctagtcaaaaacttttgataccatgtagaataaggcagagcacaaacaaagagtaagaataaagtatagcaaaaacttgaactctgtattaactatatttgtatttataagccacatgatacaagaaatcaagatgataaagttaacaaattcttataaaactaatcaagatgataggctaacaatttctaattttttaaggaataaattttaatcttaaaattaataaaattaatgtaattataatttaaactttattttgatatttaatttaatatttcttactatatatatatattgtatactttaagtttaagattaaaaatatgtttttttttttaatttaatttttagatttttaataattttttagttaatttttaatagtagtatgattcctaatttcttcatatttactattatcactcattacgtcaaatatatatatggaatactttttaatgggtattatccattgatgggtactaaataaatttaactataaatattaatgttataaatattaagccattagattttgatccgatggcgaataataaaagaaaaatttaaatttctacgcttaaattagctacttaattaaaaaaaatatcaaaaaatacatctttttacactatatcaaaaaataagtttatataaaaaatatttaagtaaaactcaatatttgtttatcatttttttgctaattttttttttattatgattttattttcagccgatggaacaaccacaacctatataatgaaaaaatgagagatttttctaattaaatagaaaaattaagcataaaaactcaactttttttaatattacccattcatgggtaatacccattaagagtatacccatatatatagggcaagactatggtaggacttagcataagttctctacgagtagggaagctttttttatcattgattttagatcacgtggttattaagatatgaaagtgtatactcttacgataaggctgcttgtatacaattaaaactttatacatattataataatatttcattatatatttattttaaaaaataannnnatattaataattaaaaaaattattaatttttgatttgaattattattacttttttaagttctctcatgtaaatcttcacagttttcgcactaatattacagttgctctattttttttctcactagatatattaaacttaggggtgttcgcagtgcgggtgttgcgatttttgaccatttttttaaaccaacccgtacatacagtttttctaatttctcaaactgtacccgcacacaaaactaaaaaaccgtagaaacc

SEQ ID NO: 110628 - DNA, 3980 bp, Cannabis sativa
ttatgtaattattccttaaataaatataaaaaattggtatttttataatgtgcggtgcggtttgaactgcatattaataatttaaaactgcaaaccgcattgcaccgcgcaatttagaaaaaaatcaaaccacaccgcaaaaaattttaaactgcattttttagcggtgcagtgcggtgcgggtggtttgataaacacccctaaacaacactgtcgttaaagatattcgtggtttctttgttcactttttatctaatcatacatacacacaatgaaataataaaaatacccttgatctgataatttgtttttgtgagagattattattattgttgttattagagtattgttattgggcatcagtggtgactagtacctttaagacgtgtcgccttgcgattagctagcgatacttcttaaaatctattatattaaactatatggaatccaatacttaattagaccaataacgatattgacacgtaagagagtagttggcactactgataccttttagcatttatcttgttattaatatagtaatgagagtatattgttaatgcttcggcttccaaaccgaatcatttccaatgatgaatgtagcccacatatttaaaccatatctctcaacccaactaatgaaattacaaaaatacctctaacaccaataataaattatgttaaaatttgatgagttagcattgataaattaaatgggagtttatatttatatatttttttttatgttttaataatttttattttaaattatattaatttttttaatttaaattcttaaaaaaatacacatattaaattaaaaataaattatatttaaaatattatataaaaaattaaaataaaaaattatgtaaaattttattataaaaaaataaataaaacatatacataatttaaaaaaatatgaaaataaaattaaaataaatagtaaaattaacacaaaataatataagaaaaaaaattaaaaaatattaaaattgttttttaaaaatgatttcaaatttaacttattaaatattgaaatgtattatcattttgtggccctgtgggtgtaaatagaattttttaaaactaaattgtttttattgaaaatgacgagagagaaggaaaattgaacaaaaaaagtcctccaaaaaataaatttataaggtcggccactattgaaatagaccaattcaaaaattagaaaataaaaaaaaaattacaaaaaaagactttgaattgatcacaaccccagattgagtcaattgtatggtccaagctttgacaagtcgttaagtctaaaaattctattgtgtttttttttagtgttaccatttaaagtaatgaattaggacatttttgacctttgcattttgtattgattgtaagaaccataataagatttttaatggggagccttttctcgaactagtactagtaatcgtttctaggagttgcatttcatttttctttatgacttcaaaatcttcattaaacgaaaacaagtaggaaaacaaacagaaactaacaaaggctatttcatggaagcaatatggggtgcaacttccctagaagaaagaaacgggtcaaattacgagaagttttttgctgtcggaggaaattaaacaacatcaattttatgcaagtattcaaataaagttagaatactcaaaaatagatataggagtacttgcttagaatagcaagtactcagactataggctactaaatagataaaaacgaaagcagaaataaagagaaggcaagagatttatagtggttcaatcagagtttggtctgcttagtacatttttgataataatttcagcctagtttatttaatttggatcactcatttatatagaaagtaaaatatcctttaagattacataattgatatgtttagaaccgtttttacattaaatgacaatatttaatcaaaataatcatttaaggaataaatgaagaacaatttcatccattcttaaattaagtgcatcaacgtatgcaacttgagaagtcaggagttgctcgatcatattctaacacacgagcttgcaagctctatggtgttgtactcgcaggatggcccttgggcctattttttttttttgaatatttgcgttcatctttgatcgcataatcagacattctgtgttgaccacgtggaacatgtgagtcattgacgagtcgtcaaacacattagtcattcagaccaaacctatgtaaacaaacgatctttactagtcgcagaagaggcacacttggccatcacatattattggtatatgtgcgaccaacattaactcctcttggtcttgcttattcttttgactatgcgaggcatagtaagcgactagaccctgtctcgatcgtatcttcttgcaagtttacatcaagcgaggttagctctacttgagctatttattgacacatcatctttttccatcgagaaccgggtccacgtgttagttatttatgagactgtacttgtatttctaggcaaaaaattcgtactataacacatgcccctagttttgcgatgacaactatttgtcaaatagagaaactattcacaagggacagacaagttgttctgtcacatgacggtgactcttggttttcttgtcaagggttttgaaatgacagttgcatttattattttattttcccaatgtcccacgtcatcgaaccctaattagggattcgtgcagacctgttttaagataaccgttggattgagtgacttttggttttttaacgccacgtgtcaagatacttacgcatgaggctaaatcgtatttaaacccttgggatacaaattgatttacttcatgttccctcccatttttagtttccaactcctctctctaaaatttcaagagaacttttttttttttaatttttttttttaaaaaaatcattcttccttggttgaagattgtttcgaagttcgaagggctttttgaagtgatgatcaagtttagaagatcaagcttttggattaaaggttaattcttttctaaacaatttctctgtttaatgtattttctttaaataatagcatgccttcttggtcgctttttgaagtgatgatcaagtttagaagatcaagcttttggattaaaggttgattcttttctaaacaatttctctgtttaacgtattttctttaaataatagcatgccttctgggtcttttggggtagaaatttcatgaaaacaataggataagttctgggcaataaaaacctaagaggaaataaggaaaaagggggaatttttctggaaaattctttcctatcacttgtatgttcacatcttcttcattatgaacttcgaatactcgcacttttagttagaacacattgaatattcacatattttggcaccaaactatgatctcaaactctgacaatctgaaatgttcactaagtggttggatatttcacagtgatcaaatgtttattcagtcacacaaacattgaatcattgtgaaacaccgaaccattgtgttttgctttggtgttagttttattgcttttgttgatatttttattccatttgaaattattatccgtgtgaggacacttctctttaaattgcactcacaacacgttgaaaagatcttctatctttcagatgagcgatctctcaaatagcagccagatattcgaatttaagggtggagcatttgtgaatgaaccttagaagagtggcagccttatcccagcatcgttgctaaaaaatgtgggtccaacaagagtagaccaacaagactcgtggtctactggcgagataggtcacatggtccaaaagttggaggcattggttgtgatcgagatacggggaagcaagtccaacgtatctgctaaagggagctttatccatccaagggctgctctggatgtagaggtcgaggaaatgaagcaagattttaagttgcctgtgttggaaattattttaccagtatctta

SEQ ID NO: 110629 - DNA, 7643 bp, Cannabis sativa
  modified_base (7574)..(7604): a, c, t, g, unknown or other
taatttattcaatccaattattttatgcacaacattattaaggcctcaaaagcatgaaatttgatcttcaaaagttaaaaataatttgtaatacaaggttatgtgtgaggtgcttccagaatcaaatggcattgaaaaacatatatcaggatagccacatatttatatagcacccaagctatactcggattaaatttatcaggattaaaatgaaaaatgaaaaacaaaggattaaattcagattgcatggaaatgaaaggtccaagcttaagagtaagacctactaagagcacacccacctttcacattatattaatgtgttttatgttagctttgtaagtcaagtatatattattgtacgattcagcttgctaaagtcatacaataaaaaaatatgtatataagcaagtttagttactaactaaaggattaaattcagattaaattgaccaaatatccaaatatgaaggaagatctattacaaaaatgatataaaatgaagtcaaagaaaaagcaaggaaatgaaaggttcaagcttatgacctaagagcaacgcaccttccacattgtattaatgtgtttaatattagctttgtaagtcaaatatatattaatgtacgattcagcttgctaaagtcatgcaataaaaaattatgtataaataaaatatgtatacatgcaaacttagttactaactataggattaaattcagatttcattgaccaaagatccaaatatgaaggaagatctactacagtaatgacataaaatgaagtcaaagaaaaggcaaggaaatgaaaggtccaagcgtaagacctaagagcacacccacctttcacgttgtattaatgtattttatattagctttgtaagtcatataataatataatattatataatacgattcagcttgctatagtcatacaatataaaattatgtataaacaaaatatatatataagcaataagcaagtttagttacttgtataaaaaggtatccaacagcaatttcaatcactacaaagttagaagctcacctcataaatatcatccttcaggcgggtacaagacaaattaacagcccctagaacaacaacatgaggttgatggtctgtcataaactttaaaacccgttcttgatcatttttcttccgttgctgatcagttacattttgagaccgtaaggtgagggagccagtatacagaacgtctagcacctctccagctgaatcgagcatcacaaatgtggtggctggttttcctggaccccaacagcaagccatgacccttggtgcagcttcatcatcagagttcatgtcattctccttcctttgatatggtcccactgaaactttgttccacaaaagctttccatattccattagcaaccagttcttggctctactagtcagcaaggctcttgcttctttctccatggaagggaggagaaaagtaaaaagagcatcctgcaatatcaactttcgctgctcattccacagttgagcagacttactaacaccatcactaagatagtactcattgaagtcatttatcaacttatttagtttctcctctggcagcttaatagtcacttgaagaagcttttcctcttcagctttctggatgaggagccactgtgcatccttaaaactagttagtggcttttcacgcagccacttaactccagaaaactgatgaaaagaatctattgcaactttgccatcagctgttgggcaagttgatatcacaacattatccaagtaattggctctaacatacttcctgacacacggctcacaacttatctcaacagctgcctgagacaaagcacaactaactgtcaggaaaatcaaattaacaacaccatgaagcctcaaaaagaaaacttaaatactagagaaaacatagttaatcaaggcataccatatgcctagctcctttgagaacagcttgaggtgactcaaacatggcacaagtatatgtagaagccatctcctctggtgtttccctggcatcctccaattcatccatcctctacaatgaattggataaacacatacacacatttacccaaagttccaacataaaaagaatggtaactccaagaaacaaacttaccatcctttccaatgataactgcaatccaaattgctcagagctgtacccaaacttgcttgcaacatcatacaagccagccttactgcaaacactatacagtgatttccttttgggccgcttatattgcccttcatcggcaccaacctcaccagctgggaaatgcaagttaaacttcgagtcaacatcatcaacttctctttctgatgctgcagctttaagtgcattcataattgactcaaaaatgggctgattgaaggcaagctttctctcatcataaacacgtcgagattcctcctcaaaccgcttattgtagtataactggagagcactctttcgtttctgaagaagcaaccactttctgtccaggtcctgaattgcccagagcacctgcaaagaagcacgcaaacacttattcattaagttctgttgttcaccaacaggatcgagtactgaggcattttcccttagtctcgcaaggcgtatgcctcaacaataagaagaaaaacgtcataaaattcatataaaaaaacacataattccataacaaagtcataatattcatgaaaaatactagttaagtcttaaaatcatgaactaaattcataaaaggttcaatttcaaatgaaaaatggtaaaagtcctaaacatataaagaataaatacatgcgtgagatagatgaggactgacgaaggagggactcgactgcggagagatcggagataatgtatgagaggcttggggtttttaaagttgtatttttctattaaaaatctgttgaaaaaggcctaaactaaatcccatagtcatttaaaagtctgaaaaaagttattggaaaagctttttttttttaaaaaaaaaaaaaaaagcccaaataagcccacaaaacaacagccctaatacacaaaaaaggcccactgttgaggtgtgtgcctaagtacacctcaatgacagctgatgaggcatagcctcgatacgttttttcaccaattcgccttgagctcgaccgatttttaaaactaagatcacacagtatttaacagttgttttagccaagaacacattcaccttatgccacttcagactaggagttctttcagtatcttgattgtcatcatcaggatccttcaacaagcttagacactcctcttttcgatacatagcaataaaaggtatctgataacagcaaaacaatattgtaaatatatatcattcaaatatgggtatgtaaacattgattagagactaacatccaacttctgcacatgatgaaggtccaaaaatctgatgatgtcatccctgtttacagataaatcctggccatgagtctcaccaaacaaaggcatcacaccagatgtaagttgcttatgtatccaggtactctcagccataatactaatttcatccagaggaggagaaccagtgctttcctcagaaacctggagataaataaataaataagaaataaatgcgaggcaaattgctctcgttcaagaagctacactgcacaattacaggaacaaatcacatatttcaagacaaactcagaacctgcattctttctggaacatcaagctcccgaatctggtcgtccttctctgtcatatacttttcagatagaacaattggttcaaattcatcttcaagtctcctttccttccattcaccagaatccagtccctgttttctaagttgtaacaattcatcaacatcaccaaatatttcatgagcttcctgcaaagcagatgaggaaacacccgatgcctgccgagatttctttctcttcaacttcctctgtctgaacaagatgttaatgtattaaaaagaaagctttgttttataaaacagcaggaagttcctagatggacaattaacacaaaacagagctgatgctgattgagaaatacctcataggaactccactttcatcaaattcttcatctacaatgaagtctgccatttcatcatcgtcaccaatttctccatcatcttcctcttccactggttcctcctcttcagcaatgtcctcaagcaaagcacctgtagcagttcattgttaaaatatatacacacactaattattctagaagaaaaaatcaaaatgtaccttcatcgtcgccaaataaactgcgcttaagcttctcctctgcagttcgtccaactttaccacttccatcaaattcctcctcatcagaaaaaccggaagactccgcagcattttgcctctgagcttttttaagccgtttaaactttttatcctgacaatattaaaaacaaggaccctaaagttaatcacaaaacagaaatgaattcgacttcaaactacacacgtagacaacaaaaaaaagattcgctcaaccttcctgcgaggtatgacattgttatactcaagaagctcataatcatcttcatcaagggtgtactcctctctataaaaattgcaagaagaaactgtcagcaaaaaccttatttaatatagctaaaacagagaccaagctgcataatagattcaccaataaaactttccaattgtagtgtctacagaagatgataagaaaataattctcaagcaatatataactgaagtagactaacatggaaacatcaattccattggtgctagtttaaaggagcacaaaaaaatcagattttatattttccctctttcataggaatttcaaatagcaactccaaattatctagacaaagacagcaacacaatgatcaaacactcactttttctttcttttcttctttttctgtctctcctcatcactatccaccctatcttcctcttcatctggttcttcttcatcaacatcatctactataaaaccatccttttcatattcatcttgtccttcttctgcaattaaataaataaataaataatcaatggcacggttaacaatatatcagacaaaaacaatctctagagagtgcacgattacaagtgacagaacaaacagttaataatccaacaggcctgtccttcttaaagagcatttcaaaatgcatctacaaagattaagacatacaaacccttaaaaggcttaaagtataactaggaaaatgataacagaaaatttaagctatcagaaatcccaaaagttaagatggttctttcacttcagtcttcttcaaagataaaattgtcatctgactcatttctacaaccacccattctccataagctaatacttcggcataattatttttcaaagattgtgctttcgtcaaatttacggtgaagcaatctttgccgcatatgattttgcaagtttctcttaagctgtatggggatattattgggttataagaaatccttccaacaattgcacatttgttcaagacttcgtcgttaacgcagctacaatctctctttttccgccaaaaataaataaaaataatatcttctctttgaccccataagagcgaaccaatgaccaaaacctgatccttttttggtcaaaattaccactgcatgttctcatcataactgacccaatccaaccctacgcccacaaagttttcaatcttctatgaaaaatccaaagacaaaagcaaagctagaccaactaaacctaaccttccaatccaataaagcaagaaattaaagctcagaactctatacaaactatacaaactacatagagaaaaaaaaaaacgagaggcgaaaaactagaagagcgtaccgtcatcctcatcctcttcatcgtcgtctcgatcatgacctccgtcgccatcaacaggctccctgtcttcctcgtcgagttcgacctcatctgcacaaattgaacatcaccagtatcaaataacgccataattccattagaaaaggagaaaatagggctagggcttgggccagagctatagcccaataattacatggaaatagacgcaaaaaaagtggtttcgatgagagagagagagagagagagagagtgactaaccttcttcgtcggaaaccacggctttacccatcgtgttagggcaccaaatagtggaaaatggggagagaggttggggaggtagaactaggaaccagagattttcaggaaaagacgacgaagacgaatttctaaaaagcctgggtggaataagttgataggcgtgagtccttgttcgaaacgacgacggtccttgcgtctctcttgtgtcgtttatgaaatgttagccccacaaatattcttttgcaagtttttggcctcgcttttagccaacaacagcaagtcttgattgtaagcgataaatgatataatttagatatagtatgaaaagataaataaagaacacacgatttttaaagaggttcggccccgagcagtttggtaatagtctactccccttaattcgtatttccctcctttaaagctcttacaatgaaatctctgggtatgctctcttagatctctcttcagtaattcttctgatcctttgtctagtgaaaatagatcactatttataaggctacatatttgaggaaaggtttccttttttcttacaatgtctataatcggtaagattacacattacatatttagaatacacaaattgtgggatttggacaacttgccatatctctgtgatacgatccttgatttatagggattgatcttgtgcttcaagatgccaatgccgaaattgctaagtgttggcatgctactcggattgctcattgctcggctaggaggacctcgtccgtgcaggtatatgcagtgttctgttcggaatatctctttcgagcaggtatggagaatcgggtccacgtgtcaccagcatgtgatgccacgttagagtgcaaaaattgggataacatttgcctcccaagtttgtgtgggacttccgaagctgcgtggagacttcatccaagctacctttacatttgaatgggtaacacgtgtcaaatgcatctgttcgcgattcgatgtgagtctgactaggcgtcccttcgattttcggctaattaatgctctgactaattaatgcctcgagacacatttccccttgcacacttttgacggttattctcttgaggcacttgattgcttttaatttcccaatatttacttttgggggaaatcgaagcgtctaagggattttgaaatgattacccattttcacaagtgtgactataaataaggctgaaactttttcagaatttactttcaccattttctccacgaaacaaactcagggcaaaaaataagtttccttcaagtatgtcgtgagatttccagtagaggtatccgagcagctccatcaagacaacgtttaggcttcaaacagtgagtaagttttcaatcttttctttctttaacttcgtgtcttcaattttctggatttccattgtagaaaatacaattgttcttgacttgttgtagaagatacatagagaatcgaggctcgaaactttgtagttttttctataatagttgttggaatatgttttaccannnnnnnnnnnnnnnnnnnnnnnnnnnnnnnaacatcctaaatatgaatatctaaaacaatgtaaataaa

SEQ ID NO: 110630 - DNA, 5639 bp, Cannabis sativa
  modified_base (5316)..(5316): a, c, t, g, unknown or other
ttctctcactttcttacagctcaatagtataatcatattttattagttgctgaaaacctcggtcaacaaaggtatttttaccgtacaaaagtttacttaggtacttatgtataattgagagttaaatttaaatatttacgctaccaattaatcattaaaaaattgaattcttccattttgaaagggagagaagctatagtagtaaaactatatatctacttttataatattataaagatataaggaaatgctttattattacaatattttttttttttcaaaaaaatctattttattatatatatatggataagtatatagtatactctcttaaatatgtgtttcggtagacatctttatcttttacagtacctaagaaaaaaatttagtcaatttttttttttcatgaacatgtatcgtatagttttaggaccgtttgtaaattttcagaaaattctgagtaacttacaatgttaaaaataatatttacatattttattgtacgtgcgattattttttcatatacgcatgataagtaattgtttaaatccttattttcggcattgttatttattcaaatttttttaaaaatttaagttatcttacatagttacaacgtacgcgatcatgaaaaaaattaaattaaaaaaaaacaatctgaatgccaaaataaataaaaaaatctactaaaacaatcctttgaagtgtctactacataaatttcttatatatatatatatatattacataaatcacttcattatgcatataacattttttttggaaaattaaatagaatttattcaactaaaatataatctttcctactagattaattcaatcttttaaatacataaaaaaaatattttaaactaaaaacattacaagctatactattacaacttttataaatattgctacaattttattggaaatttatgtactatacctttaaagagtcgtgattatctgtttcggtatctaagagagctttctaatctattttttttcttcttataatcgcatatgttgtacctatttaagactacttgtagatttttaaaaaattctaaataatttacattgttaaagataaaactttaatagttaccacacgtatacatgcacaaaatatgtaaaacttatttttagtattataaattacttgaaattttttaaaaatttacaagtgatcctaaatagctacaacgtatgcgattatagaaaaaataaactaaaaaactctcttgaatgtcgaaacaaataacaaatctatcaaaacatccctttaaaggtgcaccgtaaacttacccaatattatctatacaataacataataattataaaaaaattatttgacttttagtaattttgtatttaaaattctctgcatctctcctaaaagaatggaatgttatttctttcccatctaacttaccactttttaattaatccatccctccctcttaccaaacatagccttaggaaaacttgtccttctacctctcctaaaaaaaattagtttggtagatttccattgaggttatcctttttatgagatatttacgacgaaactcttttaatatttataattattacacatacgaccctaataaaaaatagcagcaaaagtactttattttacgattttgctgcagtcatagcattttttagccatcaaacgtcaactcaaatatacatgaagtattaaataagctaaagaaatatatcacaacgtgtttttgagcgggcacttaacatcccaaaaaaagatacgaatgcaaatcgtaagataaagtatttttgccgtcattttttttaattaaagtcatatgtgtaactatgaggggatttcgcggcaaatatccctccttttacttcccttgtttcccattatacccttcattgttctacaatcagtgaggttagtatggtaacttcacagttcttctactctctactctcttcctattcctaaaagcttcgtgatcatgcaaatgcaaaaccaacccctctctctctctctcaacacagaaatcaaaggtaccgcaatttaattttcatggcgtatgatttctttgctattgtagctaaccttttcatttcttggcgttcagagttattttctttctgactgtttggtcgttcagacagtagaaagaaaccacaatatcaataaaatgggttttttttttattgttttgttaacttcttttttctctgcatccaaacataaatgtaggaatcttacttctcacgggccatgtatttgaactgttttatgcaatatttgtgagtacatatattagtagtcgaaacgtttgagatctttatcaagcaaatccttttctttctacattttatgctcaagtttaagacccagatacgaaatctttttgtttttcttggaacttttttctgaatatagagtgaattttatggaaaatgtgattcacttttcagattaccatttgtgagttaatatggagaatgataatatggaggagtgggagagtgcatactatctgtctaagaaattgtccaggttgtatgaagcaaattgtgaaggttcacttcctttctctgcatttgttcgaaatgggcctaattaactaacgaagtataccaatttattcttctattcattggtacccataatgtgtttgttgtttgtttgtttgagttattataatcagaaaagaagaaggtgcaagatatttcaaaggaaaatgcaaagttgaagcagaggattaaggatttggaaaatgaactgaaggtgagctttgtttgttaggctactaatattgataattaataaatctttgatcaatctaaactgatccttactatattttttgtgacaactaacaaagttgttcattatttgtttgttccattatcttgtttatgtatgtacttattattatcatatgtgattgtgttgttctgatttgctgaggtttcaaaactaattgcatgacaaattgttgcaactttctctccttttacattactattgtcaaatacaaacctgttctgcatagggaaaacagaaaaggaacaaggtagttgtcaaagaaggacctgaggctgacaaaaagcttatcggtgttcgtattgcaaatgagaataaaagtgagcatgagttgaatgtaataagaacgctcttcattaaggtaagtgttaattcttttataaaaaaattagtttcatagccattaaatagattgtagtatttaagtatagctttccaaatttgttgcatatgtaaattatgatgtttaaattttgaatatgaaagtgatgggttattctttgatcacatttgctaatcagtcattatatatgtttgcttgctttgtgcttttcctttaaaatcaaatgcatactctttttcatgatcagtgcaaaattaagcatatcatcaaggtgatgctaaaacattttttaaattgacttttagtactttgaaagtgttttgccttctggtcatttcggtgttaagagaattggtgaactggactacaaaccattcgatgaagcaatgaaattccccaaggacaaccagaatgaagctcttaagaaatggaagttatggagaaaatgccttagagatccactctggaaacctttcaaagttgtcaacatccaagggaaacctacggtattttatatgcttttgattattgtctatttaatcctaaacattattgtgtgttttggttttgtataaatatgaaccctcctatatacataatgaggaacagaaataagaacaaattaacaaccacaaagaatcgaatcataagcacagatgaaattgagcatcaatattatgtcaacatggttgatattctattattatttagataggtcaatggaaacactttttcttgtttggtttgagattttagttactaatatagacccacttgaattgatgtatttttcacttattaattcagaaaattgttgatgagaatgataataagctgaaaagactgaaggtggaactgggggaaaatattaacaaggcggtcaaaactgcattaactgagatgagtgagtataagtaccctggtggtcgttttataataacagagctatggaattttgagaagaattgcaaagctagtttgactgaggtggttgagtttatgatcaatcgttacacacctttaggttggtaatatatattataatatagtttcgaatgtttcaatttcttccctactacaatattcttttgttttattaaattgcaggaccaccaaggtgaataattcatcatcaatgcttttgccactgccttgaaacttctttagcaacaagataattttgtcaatggtgaatggtttggactaacaattttcatgtgtatagatatattttgggaagtatcttttatctttatgttcttgcttttgttttgtgatcttagtgttaccagatgataggctggtcaatattatgctttttttttagttaaaatggactttgatttcatcttcagtttatatgtttaattttctaagctctagtcctatctaatgcacccttaatttgttcttttcattcctaagtaacaaattatattaggggtttttttatttttacactacagtttttgtttttacggtatgtaaaattcctattgtaactaacggagcaacttaaatcgtaaccaaaatccgtatagcaatccacttagaaatcactgaaaaaaaccatcttaaaaactcaaaccgtaaatttaaaaaacgaaaaaagttaaaaaaaaaataatatatgtagtaatttttcattataatattagtcatttggtaaaatcttttaaatattgaatatgtacataaatatatgacaattttgatgtctataaatttaagcgtttttagtatcttactcttcttttttgtagcatattgtttatggatgactaatttgtaggatttatattaaaaaaaaccttgtgtttgatttatattactcatgtatgagtaacttttggtatttaaattacactcatagttaggagtgttcataaaatttacatttgtgtatggttagcatgtaaaactaatcaattcaatatacacatatttatatatgcattttcaaaaaaattcaatatataattaatattttaatgtaaaataaaaatagtaatttaaaaatttaatacatatttacaaatatatttgaaaataatatttattatattcttatatattaaaaaaaatataattttaaacaaaataaaacatttatttttactcataattcttcttcttttgaatttattatttattattntatttattttaatttgttgttgaatatataaaattataataatttgttttattttgttggtagttatgtgaaaaaaaatatattttaaaaataaatattaaataattcaatattaaaatataataaatctaaaataactgattcaacctgcaaaattaattcaaaataactgattcaataaaatgtaaaaaaaaaaattagaaataaaatgtaaatgaaaagggtaaatttgtaaaaatataaattttttgtcattttttaataagggaaattttatttacaccccaaaattttttaagtacacctcattttaataattttta

SEQ ID NO: 110631 - DNA, 7353 bp, Cannabis sativa
  modified_base (77)..(78): a, c, t, g, unknown or other
atgtgaaccatacaacataaaagtgatttttgatctttattaattagtaaacctgattatattaaaatgggttttanntagggcacaaaacccaacaagggaaccccattatgtgcaaatggatgaagacacacttaacccaccacacgcgcgcaccgttcgactgatccaagctggatggtgtagtgtaacactttgttttctacaaaaaatttatttaataaaatacttatttttttattttatttcattactttatttaatttgagaaatgtgtttaagtaaaactaaatacttattcgtatcggttttatgggactcgttcagcaacaactgcacgattcaaaaaaaaaaaatttcttcccattatattctcattccattacacaattgaattaacgggagaaacacatctttttcatacccaaaaaaaaaaacataactttcactattaaaaaaaaaaactgtgatatcaaattttgagagtatattcaacgattctctactatgcagtggtaattcaatacagtatataactgtgttgttttatcttggagacgaccgatattttctaattgcttgcacattcttgaacagtgtcgcaaacgtcttaaatagagcgacctaatctgcgactgatccaaaaatttcattggataatatcattcatcttttattttcaaaaagagtgtatacaacagaattatagcagaaactgtttccttttaaacaatagctcccaaaacagcaacccgatcctcaaaaagtataatgttcatattagaaatctgcggccagtatctatactgacaacgccgataccaacatttgagtttgaatcttgttttagaattccataagaaaacagttttatatgaaaaaagaataaaaaaaaaaaaaaaatagaacaagactgcaattggacacctatatcaccgaaaattaatacatcatacagtggacgagtgagtattgttggcatttttgagtcctcaattgttctagtttgttaatctattatatattccgtaacactcttttcagtgtagagcaaagaaagaaattacatcagttaatcacaaatttactgttctactattattataaacttctagtcctttgcctatgagtgaatctatcgattttcatgatccattgcttactcattgagcaatagtgacaattaatgggatcatctttatcgattgacctgtcccgcaccaggtctatactctcctattcctagcaggtcctgcaaattagaaaaaatgcatttccctttaacagaacaaacgctgcaaaatagatgacttgaccaactgaatgaaatcatgctataaaatgaagacgaaaattgaatcaaattcagaagatataaactaatagagcaggtcatgtttccttgtgctagaactatgagacaggaaacctgacagtattgtctattaatggacaaaaaacaatggagtttcattgagcaattaaattactctcaagtaaatgaagtctggaggcagataagagacatcgaataaaccccatcatattacttttgtcttgagatgtagtccaatcccaatagaggacctatcaactgctaattttccatcaggagctcaataatttccttatcactagataaaaaatatgactataaaaaggaagtaaggtttgcagttcaaagaaggcaaggctgaagacataaagagaaataaccatgcaaaagcatgcatcaagactgaactaaattatggatactaaactatagttggacatagctaaatatgcataacattgtcctctgtattgtcactatgcaagccctttaataattgcaaccagaaggcagaaatattaaatacatacctggcatgctttatttttggctctggtctccgctgtactgggaatatcatgatttggtttcaaaaatctcttctcacgccgctcacatgaaccccatccatcagaaaacctaccacccctaataagcaagcagtaggaagggagtaaagaatagtgaaaaaagattctaaataaaattgtgactatataaaaaattaattcttgaaagccagaacacatactgcatgaaggctcgaaccacgaattcagcacgctgaacattacggttctcatcaaactcaattgtcttgtctttgatttcataagacagattaaagtaaaatgatatcttcctccaacctataggaaaattgtgcctcagttttatttgatcttgaaactcacaaaaagaaagtcacaatgttttacctgttttttttatgaaagggtttccagatatcatagtgtaatcagttttctccaatatctgtcgattgaaatgacaattagatccaaaaaaaccaggcacaggttcaaattgacaagcatgtactaagtagaaatccaaaacaaaaaaaattaggaaaccacctcaggtaaccatatgaattacaaaagggaccaaattgattgtcataatcctttaaacaaccaggatgttaggaccttcctaagcaattaataggcccacacaaagcggaatgcccaaccacacaaattaaataactaattaattatggaaaatgacattactgaatttaaaaatctgctatacggaattctaagactggagtaaactggaaagatattttccttatcattcgaatcatctttctgattatatatatgctgcattcacattacaaacaaaggcctgatcatgaaacagacataagataagagagaataagatgctaaacaaacatccttcctatacttgagacaaacaagtctagagagactccgatagttaaagggagaaaaaagagactgaaattattccttctattgactgtattaattggctcaaattacaaatgaggaaaacatgagaataaataggaggaaacggttacaagagaaaggcactgattggtgagaaaaatacagctcatcattggatgataaatgatccctgatttggtgtacgaaagggaatattcaaggacaatttgcacagctgtgttaacggtcaaaaaggtacgtcctcaattgtgcgtatgcgactccttacttgatgacgaagggatttccaaatcctctgtttcaatacgccccctcaagctataatgtgttgaaggaactacaacagctagcttgtcctttaaatattgaacgcttgcaattgacagggactttgtgagtgtatctcctctttgctcactcgatgggacatctaacttcaacttctttgcttgctactttatctctggttaaatgaacatctatttcgatatgcttggtctgaaatactggatttgaggctaactgtcgggctcttgaattgtcacaccagataatggttgaatttttggcagtgattcaaatttttttgagctaggattgcagccacactatctcggtccaagcttgagcaagggctctacattcggatttggtgcttgagcatgctaccgatgtttgtttttgagagctccaatttatcagatttccaccaagatatacacagtgtctgattgttgatttgcggtcatccaatcaactagcccagtctgagtcacaaaaactttcaatagagagattagttgctggtgtgaacttgattccttctccaagactccctaccaagtaccgaagaaccttcttacatgcttgccaatgattttgagtaggtgcttgtaagaattgactcgatttgttgactgtgaaagtaatatctggtctgctaagagtgaggtattgaagagcacatattatgctacaataaagggtgatatgctaatggtttgatgtcttgtaaactcaaagagatgctttggttaataggagtgaggcacggtttggcatgaatcatattggtttgagaaaggagatcaattgtatatttggtttgtgacaagtgaataccatcagccccctagtggtctcaaacccaagaaaataatgaactgggcccaaggttttgagagcaaaggaggcactgagctgagttgagaaataatggatgtaacctgttgtgacttagtaacagtaagaaaaatatcgtcaacataaaccagaacaaacatgaaagcatcaccttgattgaaatagaacaaagaggtgtccgagacagagttgtgaaagccaagttggtgaagaatggtctgaagacgatcgaaccaggcgcgaggagcttgcttaagcccgtaaagggctcgattgagtttgcagacatgattcgaataagcaggatcaacatagtcgactggttgatacatgtaaacttcttcatcaatagtgtcatttagaaaagcattgctaatgtcaatttgttgaatgtcccagttgtaggtgacaaccaaagtgagaatgaggcgaatagtggttggcttaaccacgagactaaatttttcaaaatgttaatactaggatgttgttgaaatcttttggcaacaaggcgcgctttatagcactgaaccattcgattagcattgaatttaagctgaaaaatccacttattgtcgacaatgtgcatggtgtcatgaaatggtaccaaggtccaaatctaattttttatgagggcaaaaaattcatcatccatagcacttttccaggctggtatagcaagagcttcaaaagcagatgcagggatgacaatgaggaggacaaaggtaggttcggagataagggaggctaaaaatgtttttggtttgaaaatttggtctttggatcgggtgatcatgggatgagtggggagtgaaggtggtttatatgtggttgaggatgatgacgaggaagatgtagattgaggagagggattttcaaacgggagataaatgccgagagggatggatgggtaaaatgtgactgaccttgcagtttcatgttgaatattagaggattgaggtgaggaaagtataccatgaggaggtgaagatgcaacggggattgttgaactttggattcttcagctggtgcaggagttgcacaatcattatcctgttgaagtgtgcaaaaagagggtaacaattgactgtgttgactatttcaaaggaagacgattgacttggagagttgggaatatgaaaaccaacagagaaaggaaattattgctcatgaaaggtgacactttgggctatatagatgcggccagtaggatgtagacacttgtagcctttgtgatgaaggctatatccaaggaaaacacattttgcaaacttgaaatcaaacttatgtttgttgtaagctctaagatgacggaaacaagcacaaccaaacaccttgagaaactataagtattgaagagaacttcaaatggtgatttgtgaactaaggtgtgagtggataggtgatttgtgaggaaggtggttgtactaaaagattcacaccaataatgaagcaatagagaagcttgtgagaggagtgtaagtcccatttcaatgatatgacagtgctttctttcggttttgccattttgagggtcagtgtgaggacaagggtgttgaaaatggacacttatggactgaagaaaatgtgcaagacttctatattcacctccccaatcagattggcgggttttaatcttaatatgaaactttctttcaacaaaattttggaaattaataaagatttctttgacttcagattttagtttgagtggagtccatgtgaaattgctgaaatcatcaatgaaatagacatagtatccatatccatcgttggagaggattgaagcagcaccccaaacatcaagtgaatcaactcaaggggtttgcttgtactagtttgagaacttgcataataattatgctttgattttcctatatggtaggcatcacaaaaaaagaatagcagatttaaatgaaactttttcattagctgacatgactttcattacattgatattaggatgaccaaggcgttaatgccatacattaacatcaaattttaattcaacaagtaaagactctccactaactaacttgttatacgctctgaaggaagggtagggtgagtcattcctatccattccaaactttcctctcccactttttgattagggtgagctagatgtaatctccccttcacttcgatctttgcctttgcctacgtagtcttttttcctgctatttgctttttccttcaggaaaatagatgtatttcttactgcccctagagaggtagtagatcgagacgtcgtttcgccccttgtcctcgaatatgggtggtaaaaatgttctcaaaaaaggttgctccaatctgacctagctagcgagtgatccctgttcgcggcagagaacaagacaacaagcgagtgtgaactcaccgagaccggagggcacctctgccgttggggaaactctatccatagtaaataaatatcctgtaggaaatgctgagtcaataaaccggtcacttggaaccgaatttagatgtgccttagtttagttccaggtgtgtattctgaggttctctatgaatcagttctagagtagcactcgacgaaagttcccattgacagtggtggttttgacagactcgatggaacttgaacagaagaaaaactagaagacaaaggtggactagatgatttgagcggaacatatggagaagatgattgtgtaatatgtagctgatataatcttgttaagcactccccgaagaaactccttccccatggctcgatccttcacaaaacaacaacagtcatcataaaactcaacgagaacatatttgtcacgggtcagatgagaaatgggaagcaagttcttagtttttcgtgggacacacagaatatttttaatatgtagctgatataatcttgttaagcactccccaaagcaactccttccccgtggctcgatccttcacaaaacaacagtcatcataaaactcaacgagaacatatttgtcacgggtcagatgagaaatggaaagcatgttcttagttattcgtgggacacacataatatttttaagatgtagaaaatttgaagagtgtggtgcagaaagtatgcttttacaagtttgagtaattgataaggactagccatttccaatgacaagatgaggtatacctttttgatcatatttgtgctgcaagtttgatgcatctgctatgatgtggttggtagccccgatatctatgtaccacacatataggaatttcctttcatctcggtacaacagtagcaaaagtagagataatagagttgatatattgatattggaatgatatatggattggagatacaacattaaagaatcgatttccggatctggcagtgttatcaaaagcgaaaaactcgactataaaagatcttgttgccattgaaggagaggtag

SEQ ID NO: 110632 - DNA, 1313 bp, Cannabis sativa
ttaaagtgtaaaaataaaaaataaaaaattacgaaaaggcataacactatactatgaagtagtattattgtaaccacttgagactagctcaagcggttataaggtacgtgtgtgttggagggcatgtttcgagtctcaattagttatacattgtaatatataagtgttttcataaaaaaatagtatcgttattaataaattttaatattagataatctcactattattataaaaaaaatcttattttgagtggtaacaaaaattgtgacttattataaataattatttttatgtttttacttgtcatcaaacatatggctgaaggtactatagactatagttacaaaaattatactttattaggattaattatatatttaatgataatattatgactaaaattaaattaggaacaatttgtatatcaatattatattttagtcacaaataatttttattgtgactaaaaattatatttaatcacaaaaatatatgttatgactaaaaaattattactaaaactaatttttttatgtagtttttcttttaattgtagtgtattctattataataactattatatgcagctaattataatgatggtgctcatatattattactgatgtcttttagtatttaaaaatgctatacatcatcaaaatttataatgaaaatttatcaatatggcatgttataattttttattttatcaatttagttatatttttattttttgaattatgttttaataaatatattatcaaatcactcaaaagctatccatgacaatttgtggaaacatgtttctaaagttaaaagataaagaaaaaagcccgttatttaaatagaggacaagtggttgtgagcaatacgatatatggtcaaattatatattaattagggttagggtttgggttagtgtattaatgtatgtgaaattatatatgcatataggtttcggggtgataataataatatatataacggggacaacggagacttttcagaaacaaacaaaattactttaatttattattgaacaattttgtgatgcttttgtctctttttgagctcccaaacgtatcccagaagcaacattcgtcaaacagtcacgtattatatatattaatattatatttaatatttatatttatagatttttttttttttttacatttgcttagaggtaattaaattgaatagaatggaaaaaaaataagttttatttcaatcttttatttagttatattttaaaatattagaatatcattcaaatagaatgacttttctattatttttgtagaatgactatt

SEQ ID NO: 110633 - DNA, 9994 bp, Cannabis sativa
  modified_base (765)..(767): a, c, t, g, unknown or other
ttttcagcagtacgtggtggggaagagtcgagtacattgtattggtgtcaatctttcttcacataatttggtatgacatttatttatgtacggagtcatgtgcattttttgttgtatgtttatgctgtttcggtggtggttatgcttgaccgattttttgctggatcttcctcaaatatgttctcgtaaatatattcactaacattttaggcagtcagagtacaataaaggtatattttagcaattatgcgattcaacattatgcttttcttatcctaacatataggatatttgttgtattgtttgatggtgttggtaaaagttgagagatgttattagaatctgaaaccaaagtttttttctttctttctttcttttggttgtcagcgacaagatgcttggagtcttcatctcttaggcagcattcgtggtccaataggtccaatctcttccagatgtaaagttttattctgcagatctgtcttagttccaagtggaggaaatgaggttcctattatgaaatctgccgctgtagttttgacaaggtatcttttttcttttcaaatggcactttatggaaggggttcttacagaatgtttgggaacaagttcatatgcaagaatttatttctttttaaactatgatttttctttctagtacgtattgtatgaattaatattttattattctttgttctattatcagggcaggataatattgcactgtctttctaccttagtgcaatatatatatatatataaatnnntatatatatatatatttattgtttcctattcattgtttaacatgattatgtttctctgtgtggaaatctaaagcaacttctgtattaacattcatgtagatcattatatgtttgtttcctattcattgtttgacatgattctatttctctgtgtgcaaatcttaagacacttttgtattaacattcatgtagatcatatgtcgctgtacgagaaagtcgtcttgtactgcagttgattccagcagttggtatcattgcctttgctgcttggggtctagggccactcgtgcgcctgggaagggttttgttttttaatgtacggactctattgtcctctttattccatattgcagttttgaaagttgacaaatgtatttaatttcttggtttactgactatgcctattttgcagagaactgatagtagttggaagaagagtagttcacattatgtgatgacatcttatatccagcctttgttgctatggactggagcaacacttatctgcaggtcttaacttgctgctttagaaaaaatatggagttagatttcacttgcaataatgtcattgtttttctattaactacatatgatgtgtttcagagcgttggatccggtagtcttatcttcagaagccagccaggctgtgaagcaacgacttttaaattttgtacggtcattgtcaactgtgctagcatttgcttattgtctgtcaaggtaggatgtagttgctacacttctcagaacaagttactacaactttgtggatattcaaattatgttcaaattaagcacctttattgtgttaattaaattttctgcgaatatctttttgttctagttttctggcatgattttttttaccacatttttgcttgcttcacgtgggtggggtgtaaaactggacagtatgctatcattatctttgttcttgttaggtgtttagaattccaatatatgtgtttgctcaatcttattgattattctgttattcagtataatgcatcttgtgttagggtctgacaactgttgtcttcccagcttgattcaacaggcacaaaagctctttgtggaaacacatgattcaagtgctgcaagaaacgtaatttttattttaatttcttttttttttcccattatttcaaattactttgaataatacgatgatagttttatgctaatgctatgtttacaattgtggtgctacattagtatctcctttaaaaatcatcattattattgtcattattttactttcacggctccatatttccaaagggaaattatgcattttaatagggcatatctatatttataaaatgagtcaccatttgtgtttctttataaaataaggcatagtttggttttgtttgcatttcctttagatttgaaaatctgcaaaattttgaaggaagtgataccccatgaaaacttgatttttgacgtcaacaaacaatggacttgcgatgatctcatgaaaacttgatttttgacgtaaaacatgatgctaatgcgatgctcccatggaaacttgatatttgaggtcaaaacgatgcacttgtgattatcccttgaaaagttgattataagggaaaaacatgctcctgctatagtcttttgaaaacttgatttttgagttctaaatgatgcacctgcgatgctagtgatagtcccacaaaaatttgatttttgaacaaaacaatacccctgcgatgctatagtgattgtcgcacaaaaacttgattttagcatcgttttgtgcctcaaaaattaagttttctaatataagatcattgttgctacatcacaggagcatcgctagagcattgtttttggcctcaaaaatcatgttttaatgggagcattgcaaaagcattgtttttttcataattttgtagattttttagatcttaaaaataaaaatcagatgcgttaaattattttaaagtgcatatagaaatgtattgtttccagttccacgaaggcaccctttagaagctgttacctttttgatcaagcattagaaaactagattatgatcagtgtcctagtgtgcttcttgatgcttgacataatttagtgtttgcctttttagagtactagataaccattacaatttgttctgtttctcacttctgtttcttccttttcctagatggggtttgattttgctgggaaaactgtctatactgcagtatgggttgctgcagtgtcgttatttatggagttgctggggttctctacccagaaatggctaactgcggggggtcttggtacggtgttgctcacccttgctggccgtgaggtgcaattcttcttccccccttcaatttttccatttccttgcattggcatttgaagtagtttatttatttttataaattgttggggctttctaccaagtgtatacagctatttatttattttcttaattcagatatttacaaacttcctttcaagtgtaatgatccatgcgacaaggccatttgttgtgaatgagtggattcaaactaagattgaaggctatgaagtttctggtactgttgaggtttgtatatatttttctttattctgaagcttagaaagctgaatattagttataaaactaataattggaaattggtaatgttcactcagcactagttactagttagattgatcaagtttgttcttaaacaactaaaatgattttctcacttggcttattttttatttcgtatatgtgctgtattattccagcatgtgggttggtggtcacctactattatacgaggtgatgaccgtgaagcagttcatattccgaatcacaagtttactgtaaatgttgtgaggaatctcagccagaagactcattggcgcatcaagacttacctagccatcagtcacttagatgtcaataaaattaatgtgagaacacaaatctgttgacttcttgtcaaactggcgcatgtttcatctttttttttttttgctggaatgtttcatcttatatgaatttggttcatttcttttttgtgtgcagaatattgtggctgatatgcgcaaggttttagccaaaaatcctcaagtagagcaacaaaagttgcacaggagagtttttttagaagatataaattcagaaaatcaggctcttaaggtacatttatatacgtttaggtttaatttgttaatatttataaaagaagtcctgaaaaggcttgtgtcataatgtcttgtgtacattctataattgctaatatcctctatttaacaatggttttgcagattttgatatcttgctttgttaaaacctcacattttgaagagtatttatgtgtcaaggtaatgattacgtgcctgctttgccagaaatggattttttttttttcttctagtgattgtaataaaactgaaaataatttcttaaatgatacaggaagcaattctcttggatcttcttagagtgatcagccatcatagggccaggctcgcaacacctatacgtacagttcagaaaatatatggtgagcctgactttgacttggaaaatgtaccatttgctgacagcatttttactcagtcgaggggaactgccaatcggccatatttgctcatcgaaccatcgtataaagtaaatggtgatgataaaactaaggcctcaaatcgttcggctcgtaccaatgaagataaggaagctcaggcagagacagcctcaacctccgactccaaaacagatgccaaggtagctgcagggaaggatacagctgcagtcgattccaaaaagacatctcccctagaggaagcattaaaaaatccttcaactactacatctgtacctggcagtggaaaaactgactctcctttgactagtttacaagcaaagcaaaatggcgagagacctaatgcctcttcatcaataaccacacctccgttggaagagaatattgttcttggtgttgctctggagggctcaaagcgaacactacccattgaggaagacatgactgtgtctcctgctgaatcaaaagaattgtctgctcgcagtagtaacagttccccacctgctaccaaagatacgaaagatagtggagttcctagagctgcacaataatttgcagcaacaaagaaaagcaatagtttatagttcattgctgaagtatgtatctattccctcatgatgttcttatccgagtgagaaatgaatgcagctgtgtttttaaagctgctattacattgtctttggttgtaaataaccattcaattagattaatgaagaattagcgagccttccttggaaaggttcttattatttctgtaacttttcggggaaggtgaaaaagttgacataacatcctctacaatggcatttaaatatggaacgcaaattcactaaaattctaattggcttgtccactttcattgaaaattacagaaatttaacaagttttttttttcttaaaaaagagcaaacacagattcaaaaaaaaaaatagacatcacaatcattacagataatatttttcgaaatcctagattaaactggactccacttatggtaaaaaaaaattgacacttattaataattaaggttgttttttttagttgttatgaatttttttattatatttaaatttattttcgaaataaaaataattactcatattattacaaaaatatcaaaaaaaaattaatatttaatatctcactagttttataaatatgtgtggattggattgaatcggttatcacacaagtgcacattatgaatttttctattctttggattggatgactatttgaggaacaccccctaaaacaccatcaaaccatctatcgactcaaaatttgagagactagtggtaaggtcttgattcattgtacaaatgagctcttgggccttcattttctttcagtttgggatgatctgctcaatttctataaagggaattcaagaagtctaagggttattttctggcaaggagcagcccaaatataacgtcagttttcaatccaagtttcctttgctctgttttctagtaccactaatgacgttctctgttgcattatagtatacggagagagagggttatgcaatgtattgagtattcactctttgcgcctaagggctcgcatagcttgtaattgtttttttctcatatatttagtttctactgtttggctactactttgctattgtttttttttttctgaaacgttgctattgttttattggtgttcttgagtttagattactcgggtcttatcatatagttataaggtcatgcacatatatgaaattaggatatgaatcttttgattagtcattctaataaacagttctttaaactttaatccatttgaatcagaaaacagaaatattcagtattcaattttttttaattaaaaatcaaatcaaatcaaatcaaattagtattacgtttatttaagtcatatttcaatatcacagttttttcagcttctaaatttataatttaccaaattggcaataattttatattacagtagtttttttcttagaaaaggttagttataaaattgtgtttcacatgcagaaaacaaaacacaacctcgtttcgtctttgaattcactaagatggacacatgcagtcaggagcaggatatgtataaatagattgcttctcttttcttaacctgatctgcccttgtctacttttatgcccatttagaacagcctgttgaaactcagaccactccatgcttttattcaagaaaagttggcttaacaatcccatgttgggtcttatagtcttcaagttcagaagagctcgatgtcccacctgataatagtgatacaaaggcaaattcatcgaaagtcagaatactaaaatgttgttaagtaaatattctctggttttcaaagttggattctaaactgtcagttccatgttcctctaattatcttatttcttatgaaccatatcagaatgaagttgatcacattttccgtaccagagcattgtgcatatttcctggagaagcagatatgaagatatcactgtgcatgctcacaaagtaatcaactgcagctaacaatgaagctttgccttcaaccctctctcgctcctcagatgaggaaagacccttcttatcttccattagtggaaacaattttcgcaaagctgatatccgtgcttctccaccgtaaacctaaaaatattaaatgaaagagaaatttattcttctatttctcaaaaccttcatcttaaactcaactaacagctctatatgagtttaaaaggaaccactttgctggaaggtttaattttatgacataggaaaaccttgtgggaagccagatagagacgagtactattgctgaatcccagagctgctaatagaagtcctatctcttccggtgtcaatggacaacggccctgatttcttaactcattatctgtgaactgagaatttaggacccttccttgccaaagcacctgtcgatatttcgcaagagccaacttctcagctttaccaccaccaaaatcacaagcagaatgagcagccatatcctgcatgagtaagaacaggtgaagagatattagaaagattctagttaaaaccacctttcatcgcgatgtaaaattctttagtaaaaaactgttagggaggacaatgtttccaaaactaaagactaaagtcttgtgacttaaaatttatcatccttagaatacttaaagcagagatgatcatactttatcaaagcgaagatgcaatacaacatacttcccagctccctgcattttgacttcattatttccttcttgcacgtgctcggtacctaaaatttgattttcgctagaagggaagcgtaaccgatgaacaagggtttctcccaattccttgatatgaggaacaaagtccaaagcttgaaagttaactttacaacgaagacgctggatgtttaaaggcaagttgttgaaagtcaaacgatgcgagaatggggcaatagcaacaaccccataactgtgtaaaagaaaggctttcggaattagttaatcatttctgaacattactaatacctaaacagtatgcagatcatgattactttttatagataaatatgtgtctgtgcctgagcttgcatgtactttgtgaaagaatgtttttactatttgagtttttcaacatgatactagttaaaacatacaagatctgccacagtgacacgataaaataggcaagaattcataagcaataaatgtatttcaaaaaaaaataagcaataatgagttctttttctgttcttcatctcagcctccatttaaactagtaaggcaacaataattctatgactacactatacatgtttatgtaacttccagatctccaagataatggcactataaagatcaagacctttataagagcaatttgggcgagacactacacagctctgacccaatttgtttcgttgacacgaattacaaacaaacatatataaacaaggacttaaaagtcagatctagatagctaataacacatttagtttactgacctctgcaagacaggcaggacattttccaggtaccagtcagctgaagcatgaacaggtgctgttttgattctagttgctcgtatgcctgtagcataatactctcttgtgctccaggacagttcaccaggtagctctttaactatggaaacttcatcacgaaggactgatataaagtgatccacatcaaaaatttctgcaaatgaactgcactcgcagtagaagtcttcagattagtggctctaactaggaccgacaatgtgttacaaatattgcaggaaaaggctacttagctcagtgaaataccttgaatcttgccacacaggatttacatcaaggtgtgggatgactagtgttgcatttaagatttttgcaacagcaactgcatcacaaatctatttttttttttttttgtcaaagcaacatcaattttgattagatcatctacttttaatcagctatacttcaacgacaaagaaaaatacaaatcagccaaatgggcaatttttttaccatttgaaattgctacacaaaaacagacaccctcaaaatctcattggttgtatattagtaccttattactcattattaatattacctacccccatcttttgctggtttaagcctccatcaaggaatacctggatataacccttagattttttcaatgatactgcaaaagattgacgaattttgaagattagagtaagaagtactcttcattacaaacatgaacatataagggagaaaaagaagaagaagaagagaatgataacataaagccccatgttcacaactcacaactaggtacatctttaggctcttcaacgtcaagacaaggtctccatccttggtgagccaaaggagaccagaggcttctctgttgctgaacagactaaatcaacaaatacgaatcaaattaatcatattcagcagcaaacccacttaaaatgaaataaataaataaacagtactcacgattgggtgttgtaaagcggctttgaagagatggaaatgcatggatttcggagcgttccattcctgcaatttgactagtttatcagtacatacagtacaatgttgaaaatgataaaatgtggaaagcagagcgagaaacttacggagaagatggaagggaaagctcggccgagaggggcgaagagattgggggagaaagcaggcaaaagaagcagcaaagccgcggccaaagcgactctgtgggagtggttaggccaatactcgtggaagtgatgaaccttcattcaacaatattagctttttccgatcgaatcgaatcgaatctaatgactcttaaagttaaaagtcttaatattgcattttcaccatcttcttaacggtgatgcaaaacaaatcttatgcctctgcgttttctaacatttgtattttttttattttttaaatcaagaaaatcagagtagaatttttgttttttttttgtaagggcgcgtttggaaagccacttgagaattggaattgaatgtaattggaggtaattacacagtttgacgtgtttgtgtggccacgtaattacataataactgtgtaattagaggtaattgggaggcctcaattactctttccaattctcacaccccatgagaattgggtgtaattacactgtgtaattccataccaaaaataaattcaaattattttaattaattgatatgatattttaattatttttaatgta

SEQ ID NO: 110634 - DNA, 5269 bp, Cannabis sativa
  modified_base (486)..(502): a, c, t, g, unknown or other
  modified_base (763)..(769): a, c, t, g, unknown or other
agagagagattaggtattagagaggggatctgagaaaaaaaaaagagaaaaaaataatttgttttatttttattattttttgttttaaaatttattttatttttacatatttgtaatttatttttaattgaattaatattttaataattaattatgtgggctaattaaattgtgccatgtgttaatagtatctacgtggataaatcttatgtacgtgtggacagtccaacatggcagttaactgtataaaatggatggaaatggctaaatgttaacagaatgcaagttttggggggtttgccgtcaaaatttgagttttgggggttatatgcaagcaaaatgaaagttttagaggtttttgccacaattaaccctttaaaatataatttaaatttatatattatataaaatttaaatttaaaaattatataaattagattttaatttaacttgactaagaaaatgtaaaaaaattattttatatannnnnnnnnnnnnnnnnttttcaaatttatggtttgagttgttccggtaatttttacgtagatttcgtgagttttggttgcgatttaagttgctctgttggctgctatgtaggttactatatgcattttgtaaaaaaaatacaaaaaaaaaaattctttgaaatgtaaaaatgaaaaaactctaaaaatattttgttaagcaaataattaagttagttaatgtcttttttttaaaaaaaaaattaaggaaatgaccaaatataataaattagctaatnnnnnnnataaaaatacatttactacatattaattttttaaaaaaaatatataatgattaaattaagtaatataatttttttagtattacatatgaatatattgtaataaaaacaaataaatatattagatcattaaatatatataacagtatttgatatattgtatcattgaaattagtataccgtagtaataaaattcaccacaaaaaaattacaacaatactcaaaaaaatatatatatcatattaacaaaattatacataccactattaaaatatgtaaacataccaaaaaaaatttatatataatcattatatatcataaaatagaaactaaatattatcttaaattgtttactgagatttttgaaaactgattataaacgataagaactgaagaaataaataattaaaaaagaaagagtaaaacgagacaaataattttttacgtggttaggacgttaattattcttactccacgagtcagtgttattcagtagttcttagcttgaaaagcctttaggaatacaaagaatatatgttctcaagtttgcttgagaaagtgttgcaagagaattcaatccctaacccataggatctgatgggtatttatagtagtttgaattatatttagttttttttttttctctctattggggagtctataataaataacacacttgggttgtctcgtgaagttcagtccacgaaggagaggatttgctaactaggcagatcagatttgggttgatttagtcaacaccgtgtgcttcgattgtgggaaattaagtgtaaattagttgcttgatattcgtcacaggaagtttccccatttaatctgatacgatgcttagtcaagatctggcagctgttatttccttatttgtgtgtaggaataaaaaaggaaacttgaagagtcttctgggaacacgctatctcactcctccggtctcatggtactagacttgcttccgggaacgattcgccagtggcggaaggctctatggtcgcagagctgggatacattcctagaaggacttgtctaaatgggcttggcccactttatcttcattgagggacccattgatgggccttggatgttgacttagattccacgtgtccactgccgaaaatgcgaataacatttaccccaagctttcagaatgttgcgtatggtggaagcttgcttcactgcttcaatatagacatgtggaggctgatggataaaatcatgaatttctaggtgctattcggttgcaaagttggcttctacatttgaatgtaatacatccacgtggtaatcacgtggtgatggaagggtgcgactatcgaggggtcacttttcaaaaatgactatattatgatggttgttcactttttggtgcaaaaatcaaaaaatgacacctttatcattaatttatgccttgatcttgtggagcattaattatagagatacgagtggatcgtggaactccatggccgttggatgtaacttgtgttactggaaattagatcgtggaccatccatcttctttcacgtggattgttctttctaggtataaataccttttgtgaactctagttaccacttttctcctattttcaaattttacccttcaaagctcataatcttctctgcatcgttttaggttgaaacccaaattcaaaacccaatcatcttcttcaacctagaacacgccgtagactttttccttcatttgatgttgaggattagggcacaagaattcccacatcatcaacccccagtgatcaagacttttacagtaggagaatcgcaaacctggatttcattgcaaaaattgattcactgattgctttagcatctcgtcttcgttaaacgttcaatcaacttccccaaccagactcagcgatgattaccctaacatctccgctttcgataccaggtatgtggtttattcatctttgaactgtattttctgagtttgctgttataagttttgcatgttttactctagtatgcgattaaggttttttattcgtgtgattatcatcgtaaataggtttaagcatcacaagccattttatttttttttaatttagaatgtcttgaaatcgagcattttgcagcagacatgcttgaaaaatattccccatgtccaaaatctttcgggttttgggctctccattaatctctgttatgctttttctctttttcgttcctaacttcttatctggaacgaatgaatcctgagaattctcatttatggatagttaatctagttgggacatctccaagtagttcatgagggaggacccccaactcgctttctatgttaggtagttagggtggctgactacttggattttcttctttcgtaaagaaatcattcctagatggatccatcaagatgaagctgactcggaggaggaaattatggagtaggaaaatgctccaaaatttatccgtccatgggagatggaccaacacataaataagtttaggatctataataatttgaggaagtacgagacttgacgagggctcaaaagtgttctaaggttgttctggaacaagctctccgttcatagggaaaggcctagaaggtgcgcgaaaggaggcttcagtgcttatagatggactcatatcaaaatgggtgcgcatttgctcctaacttctgtgatgttgtcggagaagcaccttttcagttcattccccaagcttaccgtttattgtcagggtgctaggttttctgtgctcatcataataggcttgtgctgacgctggaatattgtatttctacaagatcaagtctcaacccatgagaggccacaagaagaaagtaggtttcgacaggttagaatgctactctaggagtgttccttgtcctaccagctccacgaagtacacatatgactttagagattagtacttctacacattcggcttcctgttgaagagggttcccacccatagtttagatttcaatactaaaagtaagtgtcattcccttccttgaactttaggattttgtttctcctcttgtgtgctatattcagatacattttttacatctgtcaaattgtctttcccagtcgcccttgactccagagttgaagagaggttagccctctacaaatctttttcatccaaagagttgcaagtagaaggactcgtgaataaggagaacctacaaagagtaggcctcatcactccacaccaagacttagaacatctttatgtgaaggaaaatgtttaggaatctctccaaggggttctagaagaatttaaggaggctatcaaagtcataactactgaggaggctttaaaggaagtaaagctcaatgagcaatgactggcgaattggaggagacaattcccagaaaacctgagcgaggctaaagaactcactatcaaattcaagtaggtagtgcaaaatgagggtgctctaggagcgagcacttctggtagtggtgagacaccctttaatataattagggctcccactttcactgacttagataatactagcctaggtggatttgaactatacttcttgaacttagactagagtagatatccttgcagtggatacatagataaggtagattacatcgtaaggagtcctaatcactttgttccactagtgcaccataattttagagtggatgtgcttagtaagatttacttatcaggcttcttctagcatgagactaacttaggtcatcaagacattgctctttttgctagaggtaaagtcaattatgctaaaattaacagtttggatcctcttgatgtgttgtttgataatttgttccaaaaatcatatcttttaacatagtcttgtctaaggtatattttgtttgttctttgtagatcaactagccatcttgcagatggatctactcaacaggttcttgggcaacatccaatcgagatctgaagaggtttgggagatagccaaggaaggtaaggacaagggaaagaaaggccaaacttccaaaagtggatctcagttttcagcacctctggtttcgaattcaggggctgcttctaaggctccaagcatggaagacttgtccacttccatcattgatctgactgaacctattctgatcgtggaacccttgcagaaggtttctttggagaacactagagggaacaactctaattgcgatgggaagtcgttatcaataaaaaatagtctggctcctcaaacagcagagctaataaaaaggcaaggatagagaccaaggataaagtcttacagctggtagcttttaggaggtaggtcatggaaggcctatctcagaaggggtatgatgtctctgatagtggaaggtcacccagaaggagcaccaaaactactaaagagagtcaggatccttctttaccaccaagcgcctaacatcatacttgctactgccacccaactatctagggagaaaatagctttacctctattgcctcctgccactacaaaaaaaaaaaaaaaggatattcagctacaaaaaaattggtagcaaa

SEQ ID NO: 110635 - DNA, 5133 bp, Cannabis sativa
ctggtctaaagccaaggtggttgttaagatgtcaaaagttgttgggcctgttttaaaatgatcaatttctcaagattttaacactccactcagatggaatgcaaagtgtaaaccacttatcaacggcaacaaacatcataggataatataggaattaggtaacagaatgtctatccatctctgggctgatagagaattagaacacattcaagctcttaattgctaacaatgcattcagtcaatttagccagaaccatctgttctacaataagataagtcttgatgcagaaacaaaaaaattcttagccatgttatgcgttctaattagtagagatttcaatctaacctcaaatagcaaactctcgtccctctgcatgagaccaaggacattgcgaatctgctaaaataaggataaacaaaagagagaatacagtgagctccttactaaaacagaagtaacataatggaaaagaattcttcatttacttcttacataaacatatacaattgaagacatgtcacaaatgtgtccaagtaccacaccaagatacttggcacttccatataaaaatgtgtgcatacatggattagtctgagagcatcggggaaaaaaatacttagcaatcaatcctataccaaacactgatcaatccagcaatcaccaaatattttgtaagatgataggcaaccaatgtgggattaacattatatcgtgagaaattattgcacactacagtatcacttttgcacgactattagaagaacaaactaattgcattaacgtaaaaaaaaaaagttttaatggagcacacctcggatacaagcctgctgttatttccatcagcaccagcacccaaacttcgaagagagtagtgaagtcccaacccattatcattgtgtctctccatccatgatgctgaccttgggtgcaaatgatgaccatcgtaactagctccaggcggaaaaacaacctccggtgaagaagcaagttgaccaggacgtagtggcagataattacttctttgcccaccaggctcagtaccaacagaagagaacaaggatcggcggagatactcagaaaatctacgaggatgctgtggagtagaattgtgatgggaagcccacacaggagcagatgacggatgaacattcgcgcttgaaccagcccttggtgtagaaacaacatttcccggaattgataaacttggcccagctaaacttctatttgctggatgtcgaaccgaatttctcaattcagttgcaggtacaaatataggatgatccaacatgtttcttggcaaacttctatggtttaaatcatcaagttgttgtatgtctctatctccaaatgcagccgagcgtgatgaactgccatgtcttgaactagaacctccattccatcttaaagattgtacattttgtggcaaaggaggaacatccatcatagcaggctggctttggttatgaatagtatctactactgaggttggccttaagtccagactatgatcaactggagtaagactcgattgggatgcagacatactagaacgcctaacagtcctccctgtccctgttgagaataccggggcagcagcattaggttgattcaacgaagttgtcctagcacggaagcttctgcgagagctttccggaacatttgaatcaagaaagttgtcagaagttattgttcttccacctaatccaagtctggggttcccctgttcagaagcatataggctgagactgctgggagctacattattttgagcaggacctccaagccttccaatactttctgcaggctgaaagtagctacaacttgcacttgtagaagattgtccagcatgtccctcgatagcctttcttttacaagatatccggcgaccttccaatgaactttgcctgccatcattttcctccactgaaaatccagctctcctagaaggaagaagaaaaggatcagaaacactaatagatcgattctgctccatatcagatccactaactttgtatgcattaggaaattccaagacttggctcctagtgccaccacgacccacaaaacttgctgcatttaagttaacatttgaaggaattcccacctcggaatgagaactttgtgcaaatatagggttcaaattagtgtcagctgaagcgtaactagagggttcatggcgccgctcttctaacctggcactagatacagcacaaggacttgagggtggccacccaagttcaattttacgctcattagtaccaatttcagtctgtgtattgctagaactagcttcgtgtgagcaccacctgctcatgttatgtccatcaaggttcatagaattgacaaaagccatattcatatcactgggtggtaataaatagtcttgaatatggctctccgggggattacgcatactgttccagcatatctgctgatctatagtagcattatttgatgtagctccaagctcgaagtcaagcgtttcaggcagagaaccgatagtacccctttgcccttgcattacagctaaaaagattgcttgtaaaacaccaaacaattcagaaagaatttcaccacatacaatctgcaatcaggagcagatctgatgaaaaaaaaaaacaggaacgtgagtacaggattagaattttaatccatcaaagagcttaaaaaacacttcccctgagaatacacaaattataagagttacagcaatctaattcaaacgccaaataaaccaaggaaaatgaaatttaattctcccaaaggaaaatccccttgtgttctaaccaaacatacggtaaattggaatcacgagcagcagagtaaaactccaccatccaccattacaagggaacaaaattcaaataaaaagaagtggttatccaccattacaaagatggagtatgagcttcgaaacgtataatcgataaaccaggaaaaaaaatcacatggaaacggtggaaacggtttcctggtagaaatacaaatcaaaagatggagtgaacgacttatataactaaagtttcatatggccttaacctaatatgtagtcacatagaaaatgattgaaaaataaaagccaagcaatacaacttatttttaagaaacggacagcaaacatgtgtccgtagaactgtgatttacgaaaagaaaactagagcgaaattcatcaccaaatttctgaatatgttaaagttcagaagattaacagagcataataaaatgataaattgaaaaaaaaaaaaaataataacgtaacttcaaaatcaatcttaccaccaaccgatcggaaaaaaaaaacaacaaaagtgaataaacccaggaaacttacatacccagttgaagttactgatctatctgaaaattatgaagaaatcaaaggactgaaccccagtaatttgataaaaaagaaaatgatcgaaactctttactcttatatatatatatatatataaaatggtttctctttcttgagagaagaaagaggtgagaaaacagaaactagtgagcaataagagagaaagagcgacgttttgacagattgtgtggacaaacagaaataaacaatggtgagaaaagagggaaaaaaaacagaaagaaagaaggaaagagtgattttttttattttttattttttattttgatggaacagaaggaaagagtgattaaagaataggtagtgtttttaatttacaaaattacccagaagaaagagattgcggaattaatttagtcatactatcggtttttccaacaacgaatttaattaaaataaatataaataataaaacaataaagaacaaacatcaacattcaacaactagttgtagaggaccaaagatgtgccatgtttagagttgggccactaaccaattttagcaaacgagtcatccacacgtagagtggtactagggttgctcttggaacgaggttgcctttgagccgccctactaccactggtactgctactagtgaacaaattctagaatacgggtctcgtgttaactaggaaaacaaaagagaccttaactctgaggttgaacaattgaaagagattgttgctcaaatacagtgttaacttgctggaatgaaagatgctatccagcaagccctcctgcaacagcacgaggagttcgagggatggttcgttgaacacttgaaggcccttgaaacttgcatggctgaaagcgaaggtaaaagggcacacatttctcaggaaattagagatgcatcacatcaaagcaatgtgggtgcaccactcgatgaccctcaaaaaccttgatcctcataagagatgcagggggatttatttaataattatgatgggtcatatattcaaaacagatggtatgcttctaaaaatcatcaagactcgtgtggactaagagattccattccacctcgtagtgattgaggcaataaacatcaactgtctattgaagcagggtagtcagttgtggaccctcaaacggtcacacgagcgcaactagatagcctactcaagatggtgaaagaccatgttgcttgtggaggtttcgaagacatgagtctcgatagacacaaaatctttccacttttgaaaagggtcatggcattagtcattccactgaaattcaagatgccaaaatgagatatgtacactcgtaagggaaaccctttctctcatatccaaaattttgaagtacagacagacctacaaggtatcctagatgattctcagggccagatctttccagccacgttattagaaacaacacagcagtggtatcttaagctctccttgggatctattgattcttgggaggcatttgaaagaggattctatgaccaattctcgccatcttaccaaagaccaatcgagcctaatgatttgatagacattaagacgcaaatgttgagattttatgtcctaaataaaatccatctcaatataattttatttactaattaataaaagaaaaatcattctatgttgtttggttcacatattactttcatgattatatgtttgatatataattctattaaatcccaaatatattgttactcatgattataatattgtcaaaatagtgaaaactaatcatgattattgcttcaaactatttagtcccacgatttatcagtgcact

SEQ ID NO: 110636 - DNA, 3960 bp, Cannabis sativa
  modified_base (3912)..(3916): a, c, t, g, unknown or other
aaattataactctaatatttatttctaaatattggggtccagaattaaataaattcataaataataataaaataacagaaattagtgctaattgcctttactaatctaaattactaaagcggtcattacaagatcatcatatatggacactgtaccactatgattaaccaacatatattcattatttagaagtattagtttggtagaactgaaagggataacagattgaaacatcttaatagtagaatatatatgtcttgtagcaattgaatctagaatccaagaatgtaattttggtagaagagaattgcaagatgacacaataccgatgttacctcctgatgtgttaggattagtggcaggagaccagtatgttgtgttgtaaggagatttagaaattgttggtactgagtgcttgagagttgggaagcaaagtattttgtccattgatgttgtgcattttttactgtgagtttccacttgattgactggagcatcctttaatttccctgacttgttataccttagaggatacccgtgtatcttgtaacacttttctatggtgtggccatgtatgttgcagtgggtacaaaagggtttattcctttttagtggatgagttcttggagcttgagaatctggtttgttgtttggaggtttgctgccttggaacacaaacgccagattgggaataggatcaatggttgagtttagattccctctttggttttcttcttaagaaatgagatggaaaagtttgttcaccttaggtaaatgatccatgagaaggacactggttttgacttgagaatagaaatcagagaaccccataagaaatgacataatgtattccatatgatggtattcttgcagctttttaacacctccacatgtacacccgttacaagtacatatgggtctgtaattcaaaagttgatcccttatagttttcagccttgtgaaatacatgctcatgctttgattatcttacttcaaattcattaattctttccttagattaaagatgtgaggaccatttctttgatgaaaatgtactttcaagtcattccaaatagctacaacagattcatcatacaatatacaagaggaaatttcttttgaaactgaatttaaaatccaagaaattacaatgttgttattttgtatccaagcactatataaaatttgatgagaaggaaggggtttaggaatagaacaatccatgaaaccaagcttgttcttaattgaaatggcaagttgcatagctcgactccaataaatgtagttgtcttgacctataaatggctgtgaaactagcacatttcctagattatctccatggtgcagatagtagggattcgtagggcctttaagggatttcttggttccataacttgtaatccatggttctgggcacctggattctatgaattgtcaatggcaacttgagctagaacattgtctctagtgtgtgctagttgatctcctgaagacattgctggaagagaaatagattataaaaaagagtaatcgaaaaagtaataggggagaaagaatatgaaggaggtacaactcatttgttattcatcttgagaacacaagatctggaagaacgttgctggagaggagagcacggtgagaatggaagagagagttatgattgaaagaaaggatgactttccactctgataccatattgctaaagagagaaaaagtaaaagattgtattgaattaatttaagaaaatacagagtagtgagatgtttatatagagatcagctcaaggaaaaaataaaaaataagctaaccaatattttgttagcaatactgataggctaactaacaagaataacggttataaccaactaatcaattaaactaactaaaaaaactgatactaaatatactaaatcttactaaatatttttaaatgttatgtaatatgttaaagcatagtctttccaaacattacaagtgagtgtccacattgataaaaaaaaaaaagagagagagttaatcactttaacaacattcaacaagaaacttggtattgcggaagtgaaaactcgaagcttcaaattgcatactcaatgatccaggagctaaagcgtatttggatgccaaatgataattctagttttctgcgtaagttgtggcaactcgaaattcttccgaaagtgaatgattttcaagttgcttgcctacacgtactcaacttcgtataaagtattttcatgtagatactcgatgcccatggtgtaattctaccacaaaatccatattacatacacttgtgtcatgccaagtgactcaagggtgctagcgaagaactagggtgagaattgaagattcatctgctatattttttgtttttccagcctggtttcaacatggtttggtcacttgggatgatgctacacaagtaggaatgatatcatggtctttatggaagcataaaaatgagaaggtatggaatgccaaggcccaaacaatagataaaggttgtgtcataagcaaaacttttatctcaatttccacacggggtaatgtagcatctatctgagtgacacgtgaagaatgttttataaactagacgggaaatatgctccataatgtaccgtccaaagtgatttattactcatgaaaaatttatttgaagaaggagttggaatatctggacagagtatattacatcgtgcaaccatcatcaacctcacaaccagctcgcatacgttggccagagtaaatgcagctagaatatcttcaaggatactttaaatgttcaatcgtttaaacatcaatcaaatccctaattttttggaatagatatgcactgacaagaaagaagaggaaacctacctagtttccttttttttctctagatttaggaaagaaaataagtttctcattgatttcttaattattttgggaaattaaactaatgtaaatttttcctataaatagtagagccatttcacaattcaggaatccaaaatcttatcattcaatagagcacttatactgataaacctttgtaaaagcttccgaggaagatcaaaaacttcttgcttcttttcttacaagttaatagaagaaaaaggaaattagggtaataccattatcacggggacaaacctctctaggaaattcgtgttcttattgcttaattatttttatttattatttctaatcactttaaatgactcattatcgttggctaaaattgaggtcaatattttagtgctttcattaagagcaaaaagaacacgattgtgttatgattctctttaagtcacaagaagatgggaataactacaaggaggggaaatcctaatgagacaacggatccgataattacgaatcccaatgtgtaaactccagcaaatcgaagagatctagtgaggacagatcctgatccaaccactactcaacctctaatagatccctaatcagtagggcatggcgtgacaaccccactaactagattcactctgggcatgcaagaagctagaactactagtacgcatgctgagaagactggctcatgtactaaaaatctatctattggaaatcctcaagtggtgattggcaatgataccgagctgcgaaatttgtgagatgctttagggcagatgcaagagcatacaaacacttttcaccacaatcagcacaatacccgagcaactgtgaatttttccttcgagcagtaaaaacaccaattctaggagtggatggatcaacaaatagagatcatgcgagcccaacaagaagcaattgacaatcgctcaaggcaggcaaccgtgcttatcaggcgagcttattagctaactagaaagaaaccagtaggaaatactctgattatcaaggatccaaacataagaacagacatcaatatgttgggttttatgcccnnnnnaaaactctatttcaatgtaatctagattattcaatatcaataaa

SEQ ID NO: 110637 - DNA, 10449 bp, Cannabis sativa
  modified_base (10359)..(10367): a, c, t, g, unknown or other
caaaaaaaaaagtttttcattctacctgactttgaaaatacggctcaagttagtgaaaagtggctttgtttgtctcaacttgtcagttttaggcatatatttgggattagttgtgttaagaaaaatgaattaattctgattaatgttttttacctttgcttcaaatatggattctagtttgtagcattccgtgcacaaatttgcattgttgatttggtatgctggggatgacctaggacaggaaaccaggaaattttcatgattatttagttgagtggatgcatgctctctccccttttgttatattttgattttgttatttgctggtgatatttaaatgttatctttttcatgtattgatttggaatttgtattcttgaaaagctggatgctctgatgggagttgcattatatgggattttgagacaagaggcattgccaaggagctaaaggataaagattgcagtgctgccattacaagtgtatgttggtcaaaatacggtcatcgtattcttgtatctgctgctgataagtcgttgacactatgggatgttgttagtggcgagaagataacacgtacaactctgcagcagacccctctacaagctcgtctgcatcctggttcttctactccatccctttgtttggcgtgtcccctttcttctgctccaatgattgttgatttgaatacaggaaacacaactgtgcttccagtttctgtttctgacaatagcaatggagctgctcctccaccaaagaataaattttctgatggaacacccccgttcactcccactgctgcttgttttaacaagtatggggatgtggtttacgtggggaattccaaaggtgaaatacttgtggtagattacaaaagtgcccaagtgcgtgctatggttcctacttctgggggtgctgtcattaagaacataattttcagcagaaatggacagtatctgcttacaaattcaaatgatagaacaattagaatctatgaaaaccttcttccattaaaagatggacttaaagcccttgatggcctaagtgagaccatagaggaggaagatctggttgagaaattaaagagggttggttcaaattgcttaacacttttccgggagtttcaagattccatcacaaagatgcactggaaagcgccttgtttcagtggtgatggtgagtgggtgattggtggctctgcaagcaaaggagagcacaagatttacatatgggatagagccgggcatcttgttaaaatccttgaagggccaaaggaggccttgattgatttagcatggcatcctgttcaccctattattgtctccgtttccttgacgggcctggtttatatatgggccaaagactataccgagaactggagtgcatttgctcctgattttaaagagcttgaggaaaatgaggaatatgttgaacgagaagacgaatttgatctgattcctgaaactgagaaggtgagaataaattaaccttttacgtttttttatagttaatgttctaggacctgtaagtcacatatattctttgcaggtgaaagagtctgatgccaatgaagatgatgacgttgatattgtcacagtggagaaagattcagctttcagtgattcagatatgtcactagaggaattgtgctttttgcctgcaattccttctcctgatgttcctgagcagccagagaagtgcttagagagcttgtctaagttagtggacagtaataattctggatcccctctttcagaagatggtgagccaaatggaggagcaatgaatcatgcatcaagtccacttgaaggtacaatatacataaaaatattttaatgcatattttcagtaaaatggtctttagattatatactcgctggttgtctggccttgattattggcttgtatagtctgaattccaaactcaaactaaaatcatatccttcacactgttactgtatgctaaattaagatacctttagctaaataaacacaaactacatggaaagagaaaaataatgaagggtggtattaatagtcctggcccattgacatagacatggcttttgttgtggtgcccctctaactctgtcctggatatgctgctttgtcttcattttaatggcgtagtgtttatttaaatgaaagtaaataattgttttgcagaggatgctggggaaacacgcttaaaaagaaaaaggaaaccttcagagaagggattggagctgcaggcagagaaggttaggaaacctttgaaatcttccggtagatcgtcaaaacctaaaaataaatctgtagttgatgaggatactagtaatggatttaatggagatgatgtttctgatgagtatcattagattctaattcttacacgattttcttttgtggtccaaaaatttccatcccttttgggtgatttaacttactagtctcttgcacttttatttaattttgcacggtcagcttggcgaatattgtactctcatgggattcatgcatggtcagaattcaaattgagaaaattatagattatagattaaaatttgtttaggatgtcttatcaaatgtagtcaatatttcttcttacatcttcaaagattctattttatcacccaaccaggtccgttttccttgtatagatctgcaaattgctcaagtctttcaaacaatgatttctctatcattcaactttcactagaaatggaacttcctagagacttgttcatccacttcattgcttgcaaattttgaattttttccatccaaggattcctgctaaattgggaaagccatcgttctagggattacagttttgtctagagaaatgtttacctgtggataccttaactatgactaattgaatttgaggattgggtagaatacgttagaagtcgggtttcggttaggttatgagtacatttggacccaaccctactactctattataatcatacatatttttagttatttcataagtacattttctttcaaacatttaaatttatttcaaaaactacattataaaaaaattacttttatttctaaatttaattagtatcttagtatatacaatatgactattattaaattatatataaaataaactttataattagtgaaaacatgtaactatatatatatactaataccttaggtattagaatgattagatggaaaggttctagtaagattatttatgtcttcctttatagttatatttctcgattgttattaagtgaggctgtctaataaattttggttagggtcactcatggacatgtgacccgtctcaatttttttttgtgaaaaaatatactactacattagtatttaaattttataatacaaatatattcttatactgttatactttatgttgcatggagttaacacataatctaaacttataaaattaattaaacacacactactaacataattaaactttttatcaatataaattataagtacacttaatcctgtacctggtgtagtaatttttgtaagataccaactagaaataatagggcagtatcgtggaataggcatacacaaactctatcttttgccatccctactacatcttccaaggatccaaccatgaaaggaacaagttgcataattttcacacaaggatgcaatggccttccaagggcaccaatgtgccaattctcacccctaatcccatcaattctcattaagatcaattttgtttttgatcacccaccccaaactatagtgtaccaccttcttttggaaaaagccttaaccacttcattagaagagagttgttcctctattttagaatgacatttctaaaaccccttgacatttagggcgaccgaaggaaccatgtgactccatttttaacttgcttatttgcccttgtacatcaatgtagtctagaggagaatggcaacaaaatcatcatttagggtcaaattagtcattttcgtatcatctgctcctagaagtggtgttgtccaattatttttaataagaaactgagagtataataggtagaggaaatccaatagatttacaatgtcaatagatgataaaatataactatgttagacactaggattagtaggatgtggaaggatgtagcaaataaaaacgggtatgactcattgtattgaggagagtttgagtagtaagtaggatggcataaataagttagcaagggaacagagtgggtatgcaagaattaagatcaatgtctttgcatcactgtcgtcccaaggggccattagtgtaatagtttttcccttgcttcagtatacaatttctactcagtttactccattgttctattatttgtttggaattatactttgcttaaatacttaaatagttaacgatcaattagaaacaagaatgcaaaatccttagttctaaagatctaaaccacccaaaatgtaatacactcccaaagttgaaagttgatacccaattcaaaatcttgaaagattttcttatttatttatttcttcttcttttttgaaaaagtaacaaaggtcacacatgtccatgagtgacctcctccaaagtttattaagaaccctcccctgtgacggggaaaaacatgaaatttggggaaacagaaaaataaagaaacacatactctaattttacaatctaaaacacaattaatacaaaaagtttccccaatcaacataggcctcctatttctttctaaccaaagctcacgacaagtcgcttgtgaagcaacattccaaggtttttgttggacttcagctgtaaccctccacaatgcactaaaatatcttcacaatggtcgcttcgaacctagaaaacaccaaaagcccccaacaacaaggaaggaccaaattaaatttgagaaagagtagtgtatgaaaagatggtcttgggaggctagggcttgttgctttttttgcatagaatgtaccgatatggggttaacgccaagggaaggtgtcttcttctttgagattgtcattagtatttaaattccccatagaaaaaagtatgttaaaagcttaaaccttagatgggaccacaattttcctcataaaaggaaactaagaggattgggtgcttgttaggtaccataatcttctacttgctatgtcttgcaattgtcagaatcttgattgaagggtcataacttgaaaaccttgattaactttgacaccttttcaaattcttcatcatcgaaatttccaaagaaatgaaggtttcgagaaaagctccatctcttaagaagaactcaactaactacttaaggtagcaatgccaatgtcaatgctagtgttacaggtgttgtcgataagcttgaaaaggaggggaacctatctacaggaatagcaattccatttccaactcacatgtgttctcctaatgcattctccatttttccgtgatctcgtcgggtaaaatattgatctattggaaaataactatttagagaaagtgttctttaaaagccttgacataagtgaataggtgcaagactttaaaagttaaagcaaaccacttgtatattatttcatgtccttattaaaagacaaacatatgtacatatatgttacaacattaggaacacttgattacttgattttgaaagctaggataaattaaacttacaacaaatggagacaattacattgacaacttaagaagactagttttcgcgttttggagaggacccgtagctgtaggtaacataagccccaagtgctacaattaccagaactgcagcaccaatatttattaataattgcctatcgtcatcatttagcctctttactacatttgtaacagtctgttttgcagtttctgccatatacttcactcccatcttattttcatttgtagaactgctattttcctccttgggcttttcttcatttgcagtgcctgaaaccaatttctggaaagtttcctttccatcatttaaaatcttggacacattcactactccagctaagggtcctgatgattctttatctttcttggtactttcagtttccttctccgaacccctgtctgcagttttctcagattttactattttcccaagattctcatttgcggtcttctgcttttcctctctttcctttggagaacttacttcctgttcttttcgagattttgccacactagtatctttttgagaatcaatcaaagctacctcccgtatttcactatcaaccactctttgtttaggaataatttcctctggaatatccttttgcttctttggctcaaggggctctttctgagggctcaaaataccacccatcgttttctcaattctctgtttttcatctttatctgcaattgaagcaagtgttttaggaactccttcctgacccttttctgctttcttctctgcagcagaagttttctgagatattttctcagcattaatgtcgttggtagctgttggaagtttcttcttctgatccgtttgtgctcttgcctcagctgcaactgcagcttttcgagtaggggcagaagtagaaggagtttctttagtttcagttgctttggaaggagtcatgtcattaatatttgcttgagtttttttctctgcaggaggcttttcttctgtaggagacacgttcgttgttgtttggggaacctcctttggcatggtaatggtaagaattccattgtgaaatttggcatggattttgccctccttgcagttttctgggagtggaagaagctggctgaaacgactccgtctgttgttcagaagaggtcgctgtccttggactcgtaatttaccatcctcgtatgtgatcttcagttgctccttcacaaaacctgaagagaagtttgaggcaattccaaataatattgtaagtcaattaaggaaaatgctaaaattaaggataatgctaattaattatctggattttgtttttgtaggatttatatcttgtctgacatggtattatgttaaataagtaaaatattagaaatgaatttattatacaaacatggtaccattattgttaattttaatgatgtaacagttgtttgtaagtcaacttcattgtatttggtcatcaaatagcatatggtttgatatcttagtttcctagatttagaggagtcgtaccaaattattgattcttaattgtgctataaatgacaaaatgaacatttattttgtaaacaagtaagtagacagaagttaatttatggtatagttggttagaacacagaccaggaacatgtacaattgcaatgtgagctgcttcttgttcgaaattttcaatccgtggctggaaatcttcataaatgggacggttagttgttctcggctgaacagaggtagctccaccagttctgtttctccaagacatatctatgggcttgttttggtggtatttttaatattttgaaatgtgtttgttgtctctttgttgtaaaattggttatgttcaattaacaaacgtggtgtgtatatatgacatttgagaatggccttgatatcttttgcataagcatgagacatattccatttggtagctttggcttgctgttttgtttgtcgtttggtcttgtatgtggtataactttttccacaattcaagtgagataaggtctttgttttgcgaaacctaaaactaaaaatttaaaaggttctttgttttgccgttaaactttgttatttaagtttttaagttgcggagtgtgaataggattttgaagaatagaaaaacaatactaaattgctttcaaattgggttttcaactttttgagtccatctatctttggccggaaactaacaaaagtttggaaaagaatctgataaaagggactttcatttttggttggaaatataacttctttaaacaaagcatgattaggcaataattaatgtcataagttatttcaaagcaatcaatatatatttttggtaggtccaacttgagttctttgcgtggatgtgtaaaatagatgggttacccgtatggtaagagtcatcttttaacttattatgccatgcattaatgtgtcataaagtttctcctctactctttcattattatggggaatacctccttttcaaagaaataatagtattaatcgttacaataagaaaaagaagcttcaaaataattatagacataaggtatctcttttcacaaaaataattctatgttcgaatctatctcttcaatatataaacaaaaaaacctaaaatttattgcaaaaaaattactttgtaatttactttaaagtgaatattgaagttgtttgaggaggatacgtagtatggttatggtggtgtgattagagatcatctgagttttttgatggctggtatcttggggatgaaggagggtcttgtgctgcctgaagttgcataggccatgacgcttaaggaggtgctgtcgtggttgaagcgtgattttctggtggttaaagttgttgagtccaatgtctggtgctggtggaggttgttcatagtcccaatatcatgcattccatctttgaaagtgttgttgacgattgtaattattgtttttgtaagtgatgtttctttaaaatttgtcaaacgatctgttaattaagttgctcgttatgtggttagagtttctcatttatatgttgattgcatttttttgagatctaatatctcaattgatgtttttgtcattgttgagaccgaattggtctagttaaatgaaaatttccagttaaaaaaaatgaaaataaaaatatgtttattcaaaaaagagaaaaaaaagaaagggaaatatattttttactccctcaattttgtttaaggttttatttttgtgatttacaatgcaccctcataaaaagaacaacactgatgcaattcttatttgtttcggtattcagatttttttttcttagtcgtgtacgctatagtttatttaagacatcatcggccaaattttaataaatttagaataatttataatataaaaaataatattcaaataatctatttcacatgtgtatattataaaagaatcacgtaagcaatagactatttgaattctatttttggcgtttaattttttttagatttattaaaattttgcaaaatgtcaaataacaacaatatatacgataatgaaaaaaatagactaaaaaatttctctaggtgccgaaacagataaatatatatcagtgcaccctttttaaatagtatattgtagaattattctttttctttttctgtttacaaattaatttcgtaataaataataatttatttattttgagacttgaggccagtgtaaacaattttggttcaggagtaagtgtgatataaaaaataaaataataaaagggataaaagaaatagactttaggtaacgtttggttggaagtagtgaaataaaatgaaatataaaagaaacaatttttattttttggtagcattttaaactattggaatgtcattccaatgaaatgatttttccattattttattgaattgactattccattttaaaatagaaaaaagactgttttaatgctaaataataaaaaaaataataattttttatcaatttttttataccttttaaatttaattccattcttactgtatacttttattccttttaactaaatgtcatataatatgagaaagaaataaagtgtttgaaaaggaataacaagacttgtgaggcattgaaaatgaaactatgaaagtagaaatgaaaatagatgaaaaagaaggaaagaaggggtgagaaagataactcatataaaagatagagagaggtggaaaatggaaaaagaaaaagatacagactatatattaaatagaagaataaatatgatgcaggtttaagattcgactatgagatttctttctagctttacttttccaagttgttttttaagcaaattaaagtttggattttgtattctccatttataataagctaatcaaagtttggattttgtattctcctctccaattaattataaagaatatattgctgggattgcttatcattattattttgaatataatttttttttttttttttgctgagtttgaatattaaaagttgtggggcatattttgtcttataaagccaaagcagaccatgcaataaagaattttaagaaaatcacaaaaaaaggaatacggaaaaaaaaaaagccaaaatttcgcttattactttttcttttgttggataacaaaaaaaaattacttattacttatttaagagcaattattaaattattaatgatcacgggcaaagatggtatagtgattttcaattttgcttgatttcaattctaaattttatttacactccaaatatttttaaaaacaccatattttaataatttttatnnnnnnnnnaatttatatctttaattgtattaagtttttttaacttttttttttcccctaattcatattcttaaaaaatatacttattaaa

SEQ ID NO: 110638 - DNA, 5612 bp, Cannabis sativa
taaactatttggtaaactaaacactatttggtaaacttagagcatctccaatggagatgcaaatgcaaaatatagttcactttgttaaaagtctacttcagcggtgtgctaaattatgattcaaaaatctcacataattaaaagtgattcacatttcatcacaatatagcatgatgtaaaatttgcatcacaataaatactatgcttttataattaccattatgctattttttatatgttattattaaattttagttaacactcatttgcattgaatgatttacattattattttcattttattattaaatttatatttaattttgcattattattattattttatattttttaataaattatatagtggacattaaataacatattaaattttgcatgaagatttataattatgtattggagtacaacagtaaaagttgatgtaaaaatattaccaaattattttttgtaaaaaatagttcaattttttacattggagatggtctaactaataaaaggagagcctcttcttatacaagggactaggtggagcatatcatgtcctctcgcatgataaggagtgagagcaagggagggaggtgcgaggccgagggcctctcgcagggcaaaatgtgtagagcttatttaaagtaactttaataggtgattgataaaaattcttcattttaaaatttacaaagttaaaaagattacttcgatattcggtaggcactgtttatgagggtcttcagctctatcataactcttctactagcaaagacgcattttctgacgccgaagatgatttttcgtcaaccggtatgtcggtctcaacttagtgtcctgaagctcgaagaaacaacatgcagtagctcaatcttgcaccaaagctcagtatcatttcgttactggtaccgtagcagagcatacatgaatatgttcatatcaaagtgcctgattgccagtaatatattgcaataatgtaggagcaactcagttatgttattgattttattttatcagggaacaactagctgatgttctggctctctcacatccattcttccttcatttttgactcaagattggactagtttcaccaaatccatctcgagggggcatgatagctgattcttctccttacttctagtttatattttgctgtacctaaataattagtaagccaaatatattttacattttttcgtatacaaatatgtgtgtttgtattggaaataaccctgaaataatctaatataatcccgtctaatctaatcaaaatttcaatcccacccaatactaatagtccaatcaacaaaccggggcctacacaactttttcataaacatgtctgaaaagtaaatgataattgttattggccctttatacagcgaattgaattttttatgtaaggcttgttggccccttttcgtatggaatcaaaacccctcattcactcatgtgtgtgagagacaggaatcaagatccagccttttcaagactgtaatttgttatgttacatgacagccttcacctccttgtatctacgccttttggtgggaaccacacccatgtgcatgcctcgcttacagtgcacccatcactttcgctctattcttttctattatgttctctcaactcatttccctctcttatcttctctcttctgctctcgacttccatagtcaaaccttacacaaaaacaagtcaagctgttccaccgaatatgaagaagaaagcccatcttgggttgttcttcttcttcctcaacctcttttccttctcttcgctcttcccccatgcattgtctcaaaccagcaccaacaatgtcgatgacgcttccctcatgttagctctaaagaagagcctcagcccgtcgtctaacattctcaagtggtccgacccggacccttgccaatgggaccacgtgttctgctctaatggaaaacgggtcacgcggatccaaatcggccaccagaaccttcaaggtacgcttccccgggacctccagggactcactgagctggaacgcttggagcttcagtggaacaatatttcgggtcctcttccttctctaagtgggttaagcaatttacaagtcttgatgcttagtaacaaccagttcagctccatcccagacgatttcttcgccggaatgtcttcactgcaatctgtcgagattgataacaacccgtttacggcttggcgaatcccggaaacgcttcaaaacgcatcggctttgcagaacttctctgccaattctgccaatgtttcaggtccaatacccgacttctttggcgacaatgcgtttccgggtctgagtcttcttcacttggctttcaactatctagaaggcgggttgccagagagcttttctgattcggcaatccagtctctttgggttaatgggcagcagagcactggtaagctcagtggaaacattgatgttattcagaacatgacacttctcaaagaggtttggttacattcgaatgccttttcgggtccattaccggacttttcgagtctgagagatttgcagagcttgagtttgagggataatatgtttaccggtccagtcccttcgtctttagtgaatttaaaatcgttaaagatagttaacctgaccaataacttgtttcaaggacccatgccggtgtttaagggtggggtttcggtagatttgtctgagaattccaatagattttgtttgcccagcccaggggaatgcgatttccaggtgaatactttgctttcaattgcggaatctatgggataccctcaaagatttgcagataattggaaggggaatgacccttgtgctgaatggatgggagtcacttgtaacaatcacaacatcacaatcattaattttcagaaaatgagcctgacaggtaccatttctcctgatttcgcttcacttaaatctctaaaaaagcttgttcttgctgataataatctcactgggactcttcctgaggagcttgctactttgcctgctcttactgaactagacgtttcaaacaatcagatgtatgggaaagtcccttcttttaggagcaatgtgattgtcaataccaatggtaaccctgatattggcaaggagaagcctagttcatctgttgggggaatgtctcccgattctactactgctactaatgtagggtccggtaatggcagcgattctggaagtcatggtaggaaatcgtcgaatttagttggagtaattgtgttttcgctgattggtggtgtgtttgtgacattcctgattggcttgttggttttctgtctgtacaaaacaaagcaaaagcgtttaagtagggtgcagagccctaacacaatggtcattcatcctcaccactctggttctgataatgagagtgtgaagatcaccgttgcaggctcaagtgtttgtgttggcgctgttaatgaagtcacgcatacacttccaaccagtgaagctgctggtgacatccaaatggttgaagcaggaaacatggtaatttctattcaagttctcaggaacgtgacaaacaattttagtcaagaaaatattttgggacaaggtggttttgggacagtatataaaggcgaactgcatgatggaaccaaaattgccgtaaagaggatggagtctggggtaatagccgggaagggacttccggaatttaagtctgagattgctgttttgaccaaggttcgacaccgacatctagttgctcttctggggtattgtttggatggatttgagaggcttcttgtatatgaatacatgcctcaagggacactcagtaggcacatcttcaattggccagaggaaggactgaagcctcttgaatggaaacaaagactaacaattgccttggacgtagctaggggtgttgagtatctccatggtttggctcatcaaagtttcatccacagagacttgaagccttcaaacatccttcttggggatgatatgagggccaaggttgctgattttggcctggttcggcttgccccggaggggaaagcttcaatagaaactagaatagccggaactttcgggtacctagcaccggagtatgcaggtactttgctttcgtttatcatgttttggttaattttgttgatacattttgcattaagtgagtcggatagataatagttacaattttgcagaaaagttctttagaaatctgtacgaaaggtgccatgccaattgccaactatattgaattatttccattgaaatttaaacagcaataattaattattttatttacattttattatagattgaaatcgcagatagttgatctcttttagttaagctactgcctaaatatcttataggaaagttatggaccgaaccacacgcaactataccgatagctgcctgtataaattactttatagtgtactggtaaaactaaaatgtagttttgcttgttttgttttttcttcagactttgtaagtggcaataagtgttgagactaatttaaatagaagtttgctttcatcattgaatttctaatctaattggcctcctgtgctatctgttattcaataagagcatacctttctaagatgaaactctctatccgtgtaattgcagttactggccgagtgacaaccaaagttgatgtcttcagttttggggtgatattgatggagttgatcactggcagaaaagcacttgatgagactcagccggaggagagcatgcaccttgtaacttggttcaggagaatgaacattaacaaagactcctttcgcaaggcaattgaccctacacttgatcttaatgaggaaacacttgccagtatcagcactgttgctgagttagcaggatactgctgtgcaagggaaccatatcaaaggcctgacatgggtcatactgtcaatgtcttatcctctcttgtagagttttggaaaccatctgagcataactccgaggacatatatggcattgacctggaaatgtcgttgccccaggcactgaagaaatggcaggcttatgaaggtcgcagccacttggattcatcttcttcatcactccttcctagcttagacaatacccaaactagcattccaacacgtccatatggatttgccgactcattcacttctgcagatggaagatgataataaataattgtaaattatgttaatggtgtttgacatgttctttctatttttgtttctctttttcttgtcgtatcactgatttaacctcgtttaaacattactttctcaccatcttctattttcaatatgtatcaatgagctcttagtgttagaaatttatatgtatgatatgaagtatgaaaacgatcatataaatgcagaataaattgaacatatatccactacgaacaaatgatcaaaataccacttgagcttaattcctacgcgagttttagatttgtaagagaaaaggaaagtgtgggtaatttggctttcaagttctctactacgaacaaatgatcaaaataccacctgagcttaattcctacacgagttttagatttgtaaaagaaaaggaaagtgtgggtaatttagctttcaagttctctctactctttttagatgaatttactgtgtttaacagaatgagtagtaagtt

SEQ ID NO: 110639 - DNA, 1678 bp, Cannabis sativa
  modified_base (37)..(42): a, c, t, g, unknown or other
  modified_base (1408)..(1421): a, c, t, g, unknown or other
tagggtcagtcatcattccatgaagcagccagagtgnnnnnntcgtgtataagagtcattcattccgtgggtgtaagggcccaatgtaggcttgaagcgggacgttacagccagtctacttaagtggaaaaattgctcgactatcaaaggcccttaatcagattcacattaaactggtaagtgtctattctaaaacacttcctaatacccatataaaaattctagggtttttctaccaaattacgtggtggaaaaatcctaaatattaaactcatattattggtctaaattatatatcatgttgtagagcttttcacgagctttctaaaaaagcttcttctaaattatcaaataattcgttataatatgatcaaatatcttgttctttcttcatcagtttatgatccctagtgggcctttcagtaggattcgaatcatatgtagaacgtccaaaatggagatccaggtgaaaagatatggccaaaatatgaaaatcagccttcccaaaacaatccaaccggacttctggttggtacaaccctgtaccatccggaatttcggttgtctaggcagattaagtttaaaatttcaaattttaaagctcgcaaaacttctcccaattaccataaaactttccaaagcagttctaaatcaacaatacaacatattccatagctcaaaacacaaaccacgctaaagaataaaaaaccaccattgaagagcaagcttagagtttcaaaactcaaacttgctacaactactaactaaccacaaaaccaactatattaaattataaaacaaacaaattaatcaacttctaactcaaacaatatcatacaaaacctaattccaaaactcacataaaaacccaagcttttcatcaaaattcaaaaagaaaaagaacctaggaacttaccttaaacttgactccaatttgaccttaatcactgatttaattccttgttggaattgggaagagaaactctgaaccaccttggtcttcctttggttttgtgtaggtcgagagagagaatttcaggagagagtgagtgtttctgttgtatttgtatttcactactacaaaagtcagaattcgcgacggtcctaaaaatgttttttgtgggggaccgtcgctaaaaaaattaagtaactgtttaaaattgacaggaaaaattagtattcctgacggtttataacagtaattagaggaataggcgacagttttaattacaattcataaatttattgggcccttatacccgacagtttaaaaccgtcaagtatagtataggcgacaatttaaactgttgcctaaactgtcaggtataagggcccactaaaaaattgtcacctacttctcgccacatttcccacgtgccatggccacctacttcttttctatttcccnnnnnnnnnnnnnnttcttctccatttcccacaccctaaaataaaaatcttaactctctaaaaccccacccacccctctgcaccatcgccctcctctctcgccgtcttcctccctctctcgatgtccctttcttctcgtctctctcgtccatctatctctacccacccgtcctcccgtcgatctccctctcctctccgtcgcatacgtcggaccaccaccacatcccgtcggtgtccctctcatctccgtctcatatgtcggaccaccacc

SEQ ID NO: 110640 - DNA, 4365 bp, Cannabis sativa
ctctcgtaagatcatttagcttaaaaatgctatcagaccttgaaataaaaaaccctaacttcaatttttttatttctctctcagaaacaacgacacaatctctcaaatcattctctcgccctaatccaaccaaataaatctctgttcttctgaatctcatttttgttctttctaactcggcctattattggtttattctgtcaccaactgatcgaagaagacgaggaattccgtttagatgtagggtttgtgagaataggtcattggcagtcgaactgggttcactattacctgcgcttcactcattggagggattaaccattacttcactaacaggtaattggatttgggattggttccggaatattgggtctctcagtcgttgagttgtatttttcttagtttcttattgttcttttttttttttgatctttcatacctttcttactttaaaacataatcgacagaattatgttaatcagttttctaacatttaagtttacatcttatacctggtcatcccttaactctgttatctttcaggttttgcagaagaagtgctgcagtcaatggttcagattgtaattacatttggttcaaggcttcttaggcactgagtaaggctttttttgtaattggtatttaatttcaatatggatactaatgtttaatctgtaaaaacttgattattgatcaccatgcttattggttcaaggcttcttagacaaagatgtctgataaacgtgatctataaaacttaattatttgtggtagtcaattccttgaggtttgttcaagagtttcatttaattttgtagtgttttcaaaagttctttgtctttgtatttattttatctaccatgttgtgcatttgtctaatttacttcaatcagcaaatgaaaattggattctttgattacaaatatcattagaaaattatcatttattattaaatgtattttagcacactactagacatgtattactatttttcttggtagctagaatgttaaatttgcttcactatttgatttgtattggctgtagttatttattgatgtaaaggtactcttgaatagcgcggtatcgctcacctcaagtgctaagtgccctagaatgcctaaatagtaaactactcggtagacttgtgttctttattatgtgagtgatagattgtttgatattttatttatttattcacatatatttattttaaaacttaatgttataaaattaaagtctaagcatttgacttttgggaataaactcagttaacatatagacaatggtatatatatgctatgatgcctaggttatattcaatcaaattcaagtaaatttctgtgacataacatatctaagctatgtcgtatactctactaaattattttgacttaggaactcatttctaggtaagatcttatcgtgctgtggcaatataaagaagaaaacttgtatgctatttgaattgatcttgatagatgattaggtcactaatgtaagggtagtccgttaactatttaaaattaaaccatgataattttgtgtgtgttatattatttttgtttgtttcatttccatgaaggtggttcatattctaatttggttatgtcatattaaaaaagggaacaaaggtaactttgtcaatttttatatattttcttctagattatgtaattgaacttacttctgaaaatagcttttacttgtttgtttttcttttctacttttttagtcataatgacaatttatatagattagatgtcaacggatagattattcctgaaatataaggagggagttgagcatttcttacaattttgttcaagaaatgctcaagatcctaataacattccttatccttgtattaattttgataatattcagagggcaaaaaatatgaggtttggggtcatttacttaagtatggaatgcatataagttgcataatgtggttattgtggctgatacatttttcttatgtgtatatggatgcgtgtaggtgtatttgtgattgtttgtctctttatgcgcgtgttttaagggagtttaagtttatccttaattatgtataagctcagtgttttcattcgatgtgttttaacacattactaaacatactttactgagaaagataaccaaaatgttgtgattgtcgctcctaaaatttccttttttccccatcagttatttgatctgatttagtgtgtctaagtaggacattttgatgacataatagggtacagtgccatttattgtatttaaaatgctgaaaggttatttcagattaaattggttaaagttttattgttgatgggatatttatgaagctcactcttattttccttttatgtatttgtgattgcagaattaaatgaaggggaaaggattgtttagagagcattctcctcggagatcttcttttgggaagaaagttagaggggatactagtaatgttgttttcattgatctcgatgatgataatgttgttataggggatgctacaaagtcttcacaagagaaatttaattgttccagtcagcagagtaaacatgggaaagttttgttccaagacatcattaaccttgatgatgatgatgatgaggacaatggtgtgggtcctaggattagtgttgatgttgatggggatttggttagtgatgccagctcaacacaaagtcgatacactgcatttaagactatgagtaactctacacagtcagatgctgatgaatgccaagttatcccggagaagacctctacctttcagttctcgaagtgcaagcaaacctaccgtactagatcctctgcgcctaaaattgtgcagaagaatacacagtctgatactgacgaatgtgaagttatgcctaaaatgaactctgcgttccagtcctcaaagtgcaaacaaacctatcatacccgagtttctggcagaaaccgttatggtctggaccctgactttgagaatgtttcaactgatggtgatttttctgattgtgtgttaatggaagattccttgggaaaggttcgtgaacagtgggaaagagcttcccttaagagaaaacatgttccaaatcgaaattccggtttacagggccaaggtagtgcttctagctcaaacggtgaggttcctacaacatttgggagagaacatgtagatgtacctgtttgttctagttcaaacgataaaaattttcgaaaagaaatccggtcggaatatgttacaagtaatgctagatatgtggagaggactttcaaacggcaagcagaaagtgtacccatggaggaggatgagagagttgagcaagaaaatgtttttcaccagaaacctatgtttggacaggaaacaaaatgcttccatcaaaatgctgattttcagcctggaggagatagttttgattgtcaaagtaataatgtatttggtaatgacggaccaagtccccaagggtcatttcagcccgggggaggcacagttgcagaagatccccaaagtgatgaagatatttgtatgccttatttttgggatgaaggacctagcccacaaaatacatttcaacctgcggaaggcacagctgtggaagaaccccaaagtgatgaaaatgtttatatccctggttattggaatgtagagccaagcccccaaaatacatcccaatcagtggaaggcactgttgtggaagatccccatagtgatgaaaatgattatgtctctagttttcagtatgaagaaccatgtccccaaaaatcttcctctgggaggtctgagcaagatgtgggtgataaacaatctgattgtccaggagctctttctgagaaggacaagtcagattctagacaatctttatttaaagatgcaagtagtcatgcgcaaattagccaagttgattcctcaatggaagccaaggaaccaaatggcagaagtcaactttgtagtgttgctattccatctgctgacagagatataatcaatgaacgggaaaagctcaaggaaactgatgagtacaagcgagcaatagaggaggagtgggcatctaggcagcgagcgataaaaattcaggttttgtttcttgagctgtttattgactccttatagttgtgtttcaatttcttttaattctgttccaagccttcatagtaaattgtagattgtggatttattgaatttaacacagcatcaaacactttctaaaggaacagtttcttctcccctctcttaaataacatggttctgtattaaaatcatatcagttattgtcatacttcttggcatacattgtgcgacggtctatgtgtattttagggctcgtttggaacgtcgtattaaatggtattgtattgtattgtattatatattatatttttata

SEQ ID NO: 110641 - DNA, 14221 bp, Cannabis sativa
  modified_base (13966)..(13970): a, c, t, g, unknown or other
aaaaaaaaaaaaaaacagagtaatttccttaaatattattctattcctattcttatatttttatttattttaactaaatgccacctaagtgtattgggatattccccaagagatatttgataggccttaagataaataaagaggataattaggcaattgtaaggggtatatatgctatacatatgagtagtgaaggattttgggaggagaatgaattagttaagtgagcaatagctcttgggagagtattgagtttgtgataggccttaggataaataaagagggtaattactgtatagagagggatttatgttatatattatatatatgagtgagcaatagctcttgggagagcactgagtctctcgaatacccagttaacactggtatcctcatcatctacatcaatatattgttcactattttcctataattgctactgctgctgatactaaattgataggaaattcctatcagtacccaatgctcactaaccaccacacgcttgctaaggatttttattaattaaaacatgttccaggctgaacaactgttgcttgctaagggaaaaaaaaaatctattcttattcaattgtaattcagaataattgtaattcatgagtgaccatataactgaatggacaacattcttatttcccaaaaaaaaaaaaaaaagaagaagaccctaaggtacgaggttgatagattgtctcgaacaatttgagctgtgaaacatcttaagaagagcaaggctgtctgcactcatcccagaaatgaatatttcatttggtaaattcattctagctttattgctgcagcaacatcaaatcaaatacaggatacaaggtttctctttctccagtacttgtcatgattctagccatattcatgtataacactgcttctacatgttttgttaatcaacataacatgatattgaggcaaagtggtcgaacatacttgtgtgaattcaagtaaattgtgtacgtacattaaatttctcgacaagttattttcatttccgaattcccgaaaaagggacaagtacaacatttctgtttcaaagtgttttatgtgcagaaatcaaaaggtatggcttgtactgatcctatagaccaaagtgtttgttaggatgttcattgtaaaaggctctgtcattaaatcaattgattagagcctggcgaaacagctccatgaagccattctttcatgaagaagaagaagaaaagataccgcaatttcaatttacagtcaagaaatactcttcttgtaagaactagcaattactggcgttttctttggtaaagtgaataaccaacaagagcagacatcaggaacgtccaaagtacctggcacacaatgttaaatcatatgcttaattaacattacaaggttcggtaaacactagtcttaaaaataaaaatataagtattgacagtaccgtatttatcgtatgccagcgttcaagccttctaatccttgattgcatgtcatcaataaccccttccagtggagatatctctcgacttggtgaagattcggaagctgaacaacttccctgtttgttccattgtatgaattattccaaagctttaaataaagcagtaacttaaggtttatgtaaaaataggaagcaatttcaacataattttagataggtgcctaattggcttgcatccctaatttctcctttaggatgccaactactaattttgagttctagctctaggaaaatgtagtatcgatgtgatattacatgcccagccaaatccaatcagacaatactatttagagatttcgttcttgttcgggaagaaaaaccattacctctcgtgtactttttttttcctaaattccccacatgtacttagtatgcattaagatatagcaatgcagagtagatattgacatcataaccatttaaatctagaaatggtaatgaaaggaatacctgcgaatgaatatattccacaagttcgtgcaaccttgcagcttgatgagtgtgaataccagcagaactcctctctattgctggtaatctttccaggactatttcaagataactctaaagcaaacaagtcaaaataacattacttcactgtagaagagaaagccctcagtagcacgttacataccatttcatgcaatatacagattattatatagagattagagagagtattatcaaaggtaaatgataacatagtccggggtcttggataaactcaaaaccctggcctactgatgaccaggtcccttactccctttcactcttaacaatggtatttaagaggttcataccaacacaaatataactgaaggcacaaagcattatagattataccataaaaaaaaaaaaacagtgatatcaaggcaaaaccttagtggtatatgaaccatccaatttaagcattgaaccagcagctgccacagcctctttattaacccctttgatttgtaggtaaggaccaagggaatcttgcagatgatcaacctcaattaaaatctgaaacaagcactaaaagctcagccaaaaatttaataaaacagaacaaactcaaacatcaaaagttgaaataaagatacgttgatagctagcactgtacgcagaaatgtctcgtgtgaatagaagaatcataacatactaataaaacattcttgacataatggagcaagtttaacatcccaacaacaagacactttggaaatatacaattcatactgaaaaccagaaaaacatacttactagaacatctcaaacaatcaggtttaacttaagaagtcaaccatcataaaagtgtaaatagattgattgaaaggatagacaagggaaaaactcttttaactgggcaacttttacaaccaagaaagaagtggacttctggttttctgtgcttagaaagcaatgcagatcggcaatagaaaaggccacagacgaccagttatagcaaagacaaattcaaaagcttgcacaaactagtagctacgaaaaaggagaggacttaagagattcaataattatctacttcagacatgttggcatcttggacaaaaagttgaattttttctgttttatatggtagggtatttactaggagaagagtataagtttttttttttttttttaacctgtaaaaacaattattagctatatagagtgggtacctctttcagaaatctcaaaaagagagcattaacatgtaaacagaaaagaaaataataaaataaacaccaatgcagacattaccatggcaggtgaagtaaccttccaaataaatgcatattgtatgttagaaaagcttcccgtgtattaatcatacctttccatcttggtaaatgaatgcagatgcttcaatataagctactgcttgatacctaacatcaaaagtaatatcaattaattgatgcatagcacattcctcgcagctttcaaccactgttaaaaagagatatcttttcttacccaaggttaagaaggccagcaaccgtgctgatgcttatatcaaaatccactttgggttgtatgatgaaatttccttctcttatgggcttagcaatcataaattccacaagaagcagaatcaggtttccgcagttttgaaaaaatagagactatgagtatagcaatgaaatacacaagggttttcagtacaaacctcccttatcagtagtgcaaatcttccctcacatattctaacacgtatacaatcactttcggtcaactgtccattagtaggaattccaggaagcttaaaatataaatcaataaaattctgaacagagctgcagaactttgcaggatcaagaattttcaaaatatcttgataagctacctgttagcatttgaatatcatacataaaggtcagaatcaaatcacaaattaaaaaaaaaataatatgattatagtgatgtcgtcttacttgcttgttactcttcagcacaaacaatgagctctcaggagaaagcacgggatcaaagtcatttcgaattttgagctgcatttgaaagaaagaaaacaaagcatttaattaagtgaaccaaagtttcaagcttagtgcagcatcagtaataatgcatgcatctgtaacgaagttccatctagaaaagaaatattcagaataccaaaatttatattaaaaaataaaaaacgacctacattgtcactaacacattaacaaactccctaatccatatctttaaaaaacgaaacttctttctgtggttaaaaaggcataaaagaaacacaaaattgcctattgcaaaattcaaataaaaaatagtttttatttgaagaagattgtttctaggtttcttgaaatactcttaaaatagcaagtagcaatgagaagataatttgtctttgtatataactctgaaagactccaaatccactaacatgtgcatgaacaagatgtggctcaatgtgctgctgaaacattggaaacactgtcatcataatctcattctgggacaaaaaacaccccactctacttttatctctttggactcgagaaataagatgtgagtgaacacccccaacctgttatttaccatatcaggaaagaaagaagaagattaacgtaaaagaaaattggtcttatactcaatttgaaaaagacagattcgaataataaaaaggggaggggggaacggtaaaaagtacaaggataaaaagcctcaaaagagaagtgggaggttatctttaccacagcaatccaaaagtctagtgattctctgatatcaggatgcaaagcataaactccttccaaaatgatctgctcaaagaaaaccaatattttttttcaccaatctagaaaaagcttaaaaaccagcacaataaggtacagctttacttgcttggggcacttagttaatggaatgatcatgaaagatgagatattttagaccagctactcttcagttaaaaaaagtaaaaggccaaattttctgtcttcgtcattttcataaagtaacatgtcatttttaccacacagaaaataaagcataatctgaaaacttccagcgcaaattccacagcaatacaaaacatgtttgacaacagaccactccacaatcttctgaaacttcgagttccttgaagccactccgagcaccagtctccaagtcaaatacaggtacttttgttcttctgccattccttatgtcatcgaaattctgcagtaacacaaatttggagtaaaacatttcaatcaataaaaaagaagttgcgtttgtagaacaggaaaactagacactagcacgaccatgtatggagtttacatacaatataaaacaattgtaaaagagatgcggttggttctcttagcaacttgagcttttgggatgaattggttttctaacatgataacaatcagggaggtaagtccagatcatttctctggccaatattttattttctatgtttcttttagtgctttggtggaaaatgtccgactttactcgtacttttaatcatttatcaataatataacttcctaacctcttgtttgcatttcatactattattggtggcttacattgtaatagtgttaggcctttggataaataaaaaaaggtacattggtaattgtaatgggggtatttagatagtatatgtatgagagtttgagatgtgttttgggtagagaattatttggttaaagagcgcattagctcttgcgagagaactgggtattctcaaatacccaacaaccttgttctctttaccatctttatcaatataccatctattatttccttattacttgctattgttgggtactattattctatctttgctactgttcttacttaattgataggaaattcctattaagtggtatcagagcatgtcgatctatggggcgaggtgtgacggaaatttgattggaatttcagcaagcccccaaccaattggaactgatgaaatcagctctcgaggctatgattgatcccatcgtgaaacggttggatctgatgatcgatcggatacagaaatccaaagaggacgaaacaccaatgacactctagtggcgaccaaggacgaacatcttgatggggctgctaaggttgaaacagtgatgatttcaaatgtgcaactggtctcaagtacaatcccagtcatacaccacaatgaggcactacaagaaacgtcatcggagcatagtcgatgcgcactggagctagagaaggaagagcctgaacgagcacgatgacagcgtcgccgatcgccggctagacaagggaaaccaacaaatttgtatgaatgcgatactattcgcaatagggaggtcgtggtctctatggatgaatgtgggctcattattttcctcatctgcttggggcaaacccaagttttgggcccaaaagtcattactaaaggctcaatggccaagttaagtcacgaattgcaaaagaattgtgatcctggtataacttcatctccttctaatcacacgaatatccagcaaccttattctctttaccatcttcatcaatataccatctattatttccttattacttgctactgttgggcactattactctttctttgctactgttcttacttaattgataggaaattcctatcaaatagtttataagcttttaggaatcgattggtaatccaataagaacctagctgaaaattttattagtcagtcatagactcaatcatataaacattgttgtttcatccaactctctaaactccatgactgtcaccaaaattacagcacataattaatcaagaaattcatacaacacaagatacaaggcacataaaacgtaaataaataaaagataatttactgaagaagacatacagagtgattgaagtcttacttttaaaagcaaggataaatcaagtgaactgaagtcatcatacttgaaatcctttacttgttcagatcgataatagctttctagagaaactacttcacagccaactatatttgccattttgtgagccaaactagtctttcccgacccacttggaccacctataacaacaagaaaagtaaattatcactagcacaaacaatgtcaaactgcgggagaagcaaattccacaaacaagaaaataacataccccaaaatataactttcaatataataactaaacctgtagtatagtcattttataaatgagaaaacaagtaactttattgttttacacttactgccacttgagggtagcttaagcaatcttgggtggatggacgagtctatgtttgtgagcagtaaggagttcaagtatccataaatacataaatatagatagactagattggttgattcggttaggagcgttatcttcattcgaatagaaagaatacttgggaaacatgcagtttcacagacaaagtcaaaactacacaaacacacaccaaaataaaacagtacataattgtaacttaacactgtaacagatgataagaataagttgcattaataattcagaagagtaaaagggaattacgtcaagcttcaataaaataaaaaataaataaataagataaccgtcatgttctttttcaaggaacttctactcaaaattcattaaaaaaaacaccaagacatcatagcaacaaaacttccttaagcctccacataaaaagtataaatccaagatagggtggagctgatccaggatgtctcttatctcagccactgagtggaaccagattccaactcagatggaactaataatagaatataaacatgttaattgtcactcagaaaatcctatgcacgtcaatgtatatactttaatagcataacaaatatgcaagtgctagcagaaaatccagacaagattaatatcaacagcaagaagagggagggagtagttctacagaacccatattaccaattccaactataactgggaaacctttattctccaacaaagcctgaaattatcaacataagaattatataaataattctgctcaagttctcactgtaaaaatttcaacatgatttaagagacttctaacttatcctctcattgatacctgtattgcttgcacagaaagaagtaatcctctatccaggtcataagaatcgggcattggagcaagtttcatagtgtccctgaaagtggaaggatctgtggttgcttcatgagagaagtttaaacatgatgatggcaacacacccagaaaaaataaactggcaagcagaatagtctgagtcaaacaaacatacctatggctgagctatctgctgtaggatctgaagaaataaaatgccatgttgccactacaggttccatttttgattttgttggagatcgagtccatggttgagatagatcctcaagcttattaacaagattcggagtaacccggattggccttggtgcaattatcgttttgtcttgattgctagccagggatgtattaggcaaaagtggaggtgtattaagacgaggtacacctgtacaagccaacaacataaacctcgttactctggagacaaaaatgacaataactcgtacatgtgtattttattttatatttttcaaaatcaccataaaacaaatgccaggatagagaagattgaatcacacaaatttattgaaaaaaagggctccaggaaaccccataaaagcttttgaataatttcaaattcacaagtaaaataaacattaataaattagaaaaacatagactagtttacaaccttttttctccataatcatttcaaggtatgatttagtgagccacggtccactgaggcccatttctgatgcttcatttccaactgtctacagaaaataagattaaccgaggtgataataagttttaaatacagttacatgtatagccatgctgaacaagaatgataaaggtaaccatgctgaagaagattgctaaaggtaatgtatgtgtttccttatagtaacttggtcgatcccaaagtaaaccaacttcatttgtttaccaaacaggctgtccacataacctccccaatacccaatatacaattcatatgtaatagaaagaacttcaaaacacaggacactaatgcaacatatcctaataaaagaaaatacataacgacatcagtatagtatcaacagtaaacctttccaaagtaataatataggcacacaagtcataatgactttatttacgtcccaagggaacagctaagtcactcttcatcaaacggttggtcctgtgttcaaaccatggccaccaccctttgaaaacttctccaaaagaaaatcacaaaaaaaaagtactaaaagaaacacattttagtaaagaattcaagttcatacttttcgatttgtgcccctcagcaccatgaatgtctcaccaagagtatcaattgtttcaagtgaaattgatacattgccattattcactgatgtagatgctcgtttataactgacaactacagtgtaccccaaagcaagcagcccacctaaagtcatccttccaacctgcttttgatatttaagagaataatcggtaagcaaagcatatgaagtggttatgtattaaataatgtacagataacataatccaagcacaagtgctttcacaggagtcttaagcaggaattatcttcaagtgcaaacaaaacaaaaagtaaaaggaaaggaccagatgcttcataataatatgggtgcacaaaataatctcttcataaatcaattaatgaaggttctgctgctgggatttggctctaatccagaaacacaaacaaaaattaatcaaatttagtcaaatcactaaggtctttttgctgcagggatatagcaaggataaaggaatctctggctcaaaaagaaatacataaaaggaaatgtaaggcctaacaagcttgggtctttttactttgcacattattgttaatctggtcagtaatcactaagatatgatgccttacctcaaactcagcttttggcctgatgatgtaattcttgtcaacaattctctgatcaccaagagataaataatatctaataccagattgacgtacttttatccaatcatttgtcagtgcttcttcactggctgaaggaggtctgaggtacatctcaataaaactgataacaaaaatgaaaaaaaaatcaaaaggtaattacagtttcttcccttcaatatcgttgtaaaaaactggtcaggacttggaaaataaacagcctacaacactcacttatctgtttctacttcatattcttgaagaaaatatgcagactgtccacctggagactgtatcgatgatgcaaaaaaataataaataaaaaaattgaattaaatcacatgcttattttccaaaaaaaaaaacataaaatgtaaaaattgataggaaaaaaaagtagtagacatcacaacataccagagaagaaatttaacatgaaaagtagtttatttgggcaaaataatgtaagaaagaaagaagcatgcacacaaacacaaccatgtaatccctgtattgtagtatatctctttacaaatataacagatccacctcagtaaagattctagccacagttgcttcgccaattagacattttaattgttatcttatttttaagttaaggatttcatgcagccccactgccaggtcccaagtgacaacagagcatttttctgcagatatattaatcacagtgtgttcatgacatatgaattattctcctcttctgcctttcagtgttcatttctccatacgtgcctcaataaagcaaatagttgtattattttaatagaaagttacacgagtttagtcctagagaataatggacatttcctgtccgcaaaatacttggaattacaacaaaacaagaacagcataaatgagaaaggaccaagttctatgcatgtagcaaagtccagcatccactgaaaatggcttaacacaacagttacaccattttataggaaaagatcaaatttaagaacaatacataagtcttgtctctaaagttaaactacttaggatatacagccataagaacataaatgaggatggtccaagttctatgtatataaataagtccagcatcgattgaaaatatcctaacagaaaggtacgtacctcacttttgcactttagtttatagattgcctctcgaaatgatgagacatagctgttattaattctaatctgcaaccaaaaggaaaatcacactcaactgtggtaaaagacagaagaaaattggatcagggagataacatgatacataatttgccccacaccagctttactaaattccagaaaaatatttacctgtgcatgatgaaggtctggctcaatatgctttctaaatagagggaaaatgctatcaataaggtaatccagtgagcaagaatcaccaatgtcatatttaactttggacaggagactaaaatgaacaccaccaacctggtataagagatttacatacggctgcatcagtctttcaatataaaccaaaacgaacatgtattataaaacaaaggatgggataataaaaagcaccactgcaactcgaatatccagcaaagaccgcagttttgcatgcagagcataggtgccatcaactattacctaaacataaagtgaagaaatgaaaccaattataagttaatgcatatgtactacatacattcatataagtgtatattttctcagaatgaaccgaataattatcacagttatcatgctaaatgcaattcagacatccttaccaccccagaagaagcgctcattattgtttctgagccaacccgcttcttttgttgatagtcaaagactgggatcattgtatctttaccttttgttaaatcctatgtcaacagagtctcaccataagtgcatataaaacaaacaaagacaaaacaccagaactgggagaaacacaaacataagcataggaccccaattgccttagattagaatgtgctgacaaattcaggacctgagttgataatactgaacagaagaagctgaaactttaactagcaaaaatatgtacaaaatctagagcatttgtgcttaactttggtggttatataagtatggttatataaattatcaaaaacaacatgacattacaatgacaagacaattgtcttgacatcattcaacccaaacaggtagataaactaatatagcacattaagaagcatacctcaagattttgaactaaagtcttaaaatctaataagcccaaatcattcccttcatcaactccagtgcgataattctccattgatatgacagtacaaccaataacggatgccaccttttctgctaagcttcagggaccattaaaataacattaacgctcaaaatttcaaagagggaagaagcagcagcagctacatgaaattcatcaacggaaagtatataccttgttttaccagaaccgctaggaccaccaatgccaactgtgacaagaccctcttttttctctctgagttcttggattgattttactaacaaataatagccgtaatcaaaagactgcaacatttcaaccgaatccacaattaggaattttttgtgaaaatttacacagcatttgcaatcatacacataaagataaaactataataccacatcctaagattacaagttggctctaatacagacgacactataatacatgaaaaatattgactgccaaaagtacctatcatgcaaagcaacattgcaggagcacaataacatagattcacttatgttacataaggattatttaacaggataaactaacaagtatcaaaccaccagaaaaatcattacaacaataaccactaggatgttactttaagaattataggtgaccaccaaaatgtaaagaagaaagaggaaaagagaaaaaaacgaacaaacaaacaaacaaacaaatttttatatacatctacatatcttttattgtcattctaggatcaaagtccataaaaaatactcacacacacaaatatataaagagtcattataggttgatgctactatttccaagcagcccaaacagcttagtagttttaatgagcaaaaaaatacaagctaaaacgcatcagagatgaattcaagttctcttttagtctccaccaccacctttcatactgacgaatttgcatatggccaaaacaaacatataagataaccaacccataaaaaataaagacaaaacaaatcagcccttttgttctaattgccaaaacttacaccaagacaacttaacttcacctctctcatccttataacaagtgaaaagccaactttttttaattaacaaaacaatccaactttcccacataatgcactttagaattacatactaaatataaaagttaccgaatgccgggaaatttctataattccaacaaaattcgttcatcacagcccatattcgtgcacaaaaagaccaaaaccatatatgtacatatataatataatataaatatatatatatataccacatgaagagggagtgattggaggatagaggaagaggaagaagaagtggaaggttgctgctggaagtaatcgcggcctccttcttggaagactcgctgtaccacttcatcgtccatttttgggactcaaaagaaaagagatgagcttcaaacaaaccctcttcgtctcttttcttgctttaatttgcttggcgaattttaatggaatcaatcaaattaacagctaattaagctatgagatattattttacataaaaaaaaaatattattgcaataattaattataaaaatgaaatgaataaatggttttcataattcatctcctttttctttcttcctttcttctttctactcctctcctctcccgctctcaattctttctctatttctcttattaattatcgttatttcttttttttcatatgtaaattttttaataacaaaaataaaagtaaaatttttgtttttaaaattttaattttaaaaaataaaaatttgttttataatcatttttgttttttaattttaaaannnnnaaataaaagtgtgttctgtaaattttattttttatttttatttattaattttatttaagtcgggaccaggaggcaagtccaagtctggggtcgaggtcaggttcagtttctaaagtttaagctagagtcggagtctaaaatattaattaaaatattgtttcaaaaaatattgaaagtgaaattttttttttattttaaaatttagattcttaattaaaaaattaaaaaataaaaacagttttatagaacat

SEQ ID NO: 110642 - DNA, 3835 bp, Cannabis sativa
aatcatagggttccatctcaaaaccaattgatcatgagtggagtagcccatattcttatatatggctcaattctctaccatttattccatgtgggacaatgtatacacaataaaccaagagatttgtattttcaaatagatcctacattttaaattacaatggtagtaatgttaatccattctaacacttaagtttcatattgccaaatgaacttgctgatataatacttcctcaaacttatgaaacaactctaaaactctcgtagcatcttcaaaagaagctttacaaaaaatttaactatcattaacaaaaaaatatatgagaaacaataggagcttgcctacaaactttgattcttctaaattctaatcgactttcgagattcaaagacttgaatcgatgacgaaagaccctcaatacatattataaataaatataaagacaatgaatctttgtgtccaatgccacgagttggaaagataggctccatttctttaccaccgtgtgtacaatagtataagacacgaaagtgacacaatactaaaatcaactcacaataaacaagccttaaaatgtccaaaatgccccttagctggtgcattcacctgcacacaaacaatggcatataatacaaatgagaaagtgaagatagcaaaggtgggtgttataggttagagaatggtaaacaaattaagccaagaagaaagagacaccaaccaaagccccaactcattccttttttgcacattttaggaaaagattcggtgggccagcacacactgtatttttacctcttctaacacctatctctctatatatttttttctattaaaaataataaaataataatttattttattgagtaaaaaaatgtgatttttggtcatattattgcatatactgacagatgtagatgtatatatatatatatatagatatagatatagagacgagaagagcaagaaagcgaagaggagaaagaaggcgctggaggagtgagaagagaacgtctacaaatttggtggtgagtttcttgttttttactgtttggttcccgagaaagtctttgaatgaaaccaaccagttatttactttttcttcattactaattactatcttgattttgttatttatacactttgctgtttattttatgattttcttgttcttgcattttggtctcgggaatcgaacagagcttaacatgtaggttttcacaggaatttgggtccatttcgttgtttttattgttattagataatttatttaaaaaagcttcatggtattgttcagtcatggagctgtattggaactcatttttacacttcttgtttgtggttattatatatgatatatgtatttaacataaatatgtttgtcttccttgtagagcaaagcttaaaatttccagtgatttgtttcttcatttcaataattttggtaatgttcaagaggaaatggtatagatttaaagtattttatattttggaaaacaaaaagttatgaaatttgatgctgaatcatgcttttcttcttttttttttcgttaaatattgaaataacataaactgaaggcatggtggagcccgatcatttatttatttgtattcgagtggtggtgtttcattcttgttttcattgcaataactggtttgatggtaatgtttggtactagttgatagacgatgtaatgggtaaatttgttgcatttgcttgatttgtaaagtccttttcaactgaaggcgaaagttagtactgtaatttacataaaattgattgagctgggttttccgattcgtactccacgtgtgttctgcctatactacagtgttagaaagttaatggcttctaaagttggttgggcttttttttttatgaattattatctatttgagagggatttcctaactgattgttgcaatgtacttgggtgatacagtttgtgtatttagtagattacttgaaatgtttaaagcctcaaactaacattcattcagtttctaggaccattattgtgtcatctgggatggaaatggaattgcaggaaatgttggcagaactacatatgcaaaatgataaagagaaaactctgcagacattgactgtttgcaagcatgctttttttgatctgacatatatttctccagtggtatttttataccttttgaaagaatgttatattcatggtatgtgttatgctttcttcactgcaaatttctatcatgactaaaagtaatccggttgtaatggggatgtactataattatttgatacctttcagtttctccttctttaatatcaattggcacaaacacatgttaacataaagaaacttgctatatacctttatacctgtagatctgccacctgactatttgattatcaagctagctgattgtatgagaagttcattcagtcagtggctaatcttctgttgataaacatgtagctttttggatttattatttgcttcagtgcattcttattgttaatttgttacttttttgttttaataaacattacatagggacatgtaaagcaactaagaagttccgagctcttcagcaacaagtccatttagtattgcaaaatagtcccccctgtggaccagctgtgtttgtagttcagtgtctttatgtcttgcctacttttgggttatacagtgaaggattcagccatttaataatatctgctcttcgtcgtttcttgaaagtagcagctacctctgaggacttggcagaagcaaaaatgctagcagcccaattatttctcgatattgttgggagctctgtcaatcatgatgaaggggtagttgtaaagatacttgaaactttcgatgttcaattgccgaacattgagaaagtaatgtgtccattgaaagaaaaagatgattatagttttgactcagcaaaaagatttgtcgagcaatacatatatgatttgatagattgtcagtcatatatgaatgcagttacacttttagaacacttttccatccgccagtctggggagtcttttcttgatactatgatgcgaaagaatgaattcaaagcagctgagaagtgggcaacattcatggggaagccattattatgtgttcttgtcaaagcatacattgacaggaacatgctaaacaatgcttaccagactataaagcaaaacaatcttcgacaggaatttcctgatgtttatcataagtgtaaagagaggtaattccaatacttcataataatatttggttcttagatttccttgtctaataagatatatgagagtgtacagatatttggtggcttcgttcagaattttatgaaatgacatttttccatctacttgcagctcactgaagaaactggcagaaaaaggatgttgggatgttgcagaagctagaacaaacaacaatagacaacttcttgaatatttggtttgtagctttgagcatatgttttatgttttgtgcttgtgttctttgcacacagacacgtgcatttattcatatgtgctggttatatagtttaatttatagtttttcttaatgttttcaaggtctatttggctatggaagctggttatatagagaaggttgatgaactctgtgagcggtactcgcttgaaggatttttaagtgccaaaggtacacgtggtgctctgccttatgtctcaatcagaccctatttgccattttaagtgatacgcaagcaaaaaaatacaagctgcagattaactttatatctaaatctcatggcaccaattttttttgctctgcagcttgtatgtttttctaatagccttgtcttatacaagactcaagatatgaagtttacttgttttgca

SEQ ID NO: 110643 - DNA, 25652 bp, Cannabis sativa
  modified_base (4949)..(4949): a, c, t, g, unknown or other
gcttacgttaatggcttctctgaagaggtaattacacacccacatcttcttcttcttcaaacgtgggacttaatactctttatgaagagaggtgtaataccaataccatcatgcttactctattatgaaaagaggtatcagggaggaaatgttaaaatggtagaaatagttatataatatcttcatacacgtatcaaatgtttaatgtgttgatagcatagaagtccagcaagcgatgtcactacttgtgataataagctctatttttttttttccttacaacaagcgatgtgaaataaagtaaacaaagtaatattactacatgaatgcaggcgacaatatataatgaggacattgaagaaagagaaaatgctggaacaccacaaataatacaaacaataagagcagcattggctttttgggtgaaagaatacattggttatgaagtgattgagagatatgagcatatgtatgcagaaaaagcactaaagaggcttctttcgaataagaacatacaagtattaggaaatactagtgttaaacgacaagccatattgtcgttcctcgtttattccacaacaaattcttactcaacaaaccttaaaaatgggcgtcaaagtgacagcagagaagaagggctttacatgtggggagagactggaaacaatagaggtaagcctcttcatggagctttcgttgcagccctcctcaatgacctcttcggtatccaagctcgtggcggttgtgcctgtgcaggaccctatggtcacagtctgctcaaaattgatgaggctaaagctcatgcctatagatctgccataaaagaggtgagcactttttaaatgctttataacaacatgaatcacagcacagctataaaattaagtttgaaaaccctattgtttatagctacttaatttgctttccataaattacactaatactaaactgcaaaattgacaatcaatgcataaacatagtacatgggattctcatttctgataatattcttgttacaaaaggcataactaaaccgtgtttctccttaatatgaatagggctacgctggagtgaaacctgggtggacaagaatcagttttccctattttatgtccaatgaggaatttgagttcattttggcagcattggaatttgtagctacttatggacagcggttcctcactctctataactttgatttgagaacaggtagttggactgccagagacaagggaattttatgcctcatcaaggataatgcttgcaatgttcatggcaggcctcttgcaaatagtacaaatgcagcagaggtgaagagcgaacaactcaaaaaatccaaaaacgtagaagctaaggaaaatggaattgtcaataagtttgagctgtatttaaagactgccgttgagattgctcgtcaactgcccaagttccctccacagcgcaaacttcagggagaattagatctcaacattttgtcattcagagtttaatccaattctttaaaaggctaatacaacacttgacattgtatgtctttgttctctaatttattcattctaagttatatctgtaattgctgaaaagtgttgttgcatttctccccctcccccgacatgccctctctttcatgtgcgctacaaattaataagaaactacctttctacttctttggtcgattaagcccctcctcctgagtacatagcaattgctatagcgttctagttcctaaatatttataatatggcgaggaatctagtcgtaaagaaatctgtagagctaccaaccattaaacataccatgtatcctcaaaatatctaccatccagtaatcctttgcctgcaaaagtagaataacacaaaattttagctaattataaacaaactcgaaaggaaatgttaatctgcaagagtgaagacttattagagaaatttccccaaagtgggatgagctacaggttcaccgatcaaatacaatgcacaagttaattgatgaatcccacagctacactcaggtaaccggaaacttaaacgctactgaagagctagaattaatctaacagccaactatattaagcctcccttggccttttttttgtcctcacactgtatacccaataaagaaatggtggcccttttttctctttctcatgagacaattcaagcagcatatgcagttgctccttggcattccctttgatttcatagtggaaacaatatagaataaaatttccaaatagtagggaaagatgtttacttttatagaaaatggctggccattagaagttgaggtttttgtttttcttcttcaaccactgctgaagcttcagctttcatgtcttcaatctttttttcccaaatgtcatctatcaacttccaggtttcatcattcaccttctgggtctgtaaaataattaaaaaggaaaaagaaacagtcacattaattgttgaagaaaaaacatatagcataaccccagcagcatagtgtctcagattacctccataggtctggctgcaccaaacgttgcaaatccaacatttccaggtgcaaatgtaacccgaccaggaagtgaaaccccatgtattccccatctccctgcatatattagggctccatattcatccactggactcacagccggctgggcaatttacaaaatcatttatcataatatcattagagttggaaaagtgaactagtacactgcatcaaaatgcatccactgatacatatgaacaagtcaggtacagggaaaagaacaatgtaacccataatagcaagatttaagatgcgtattgaaaagctattacgaaaaataaattgcattcttggaataatagggaagacatttccatttgaaccaaatagctttgtaattcataaccaatttagtgcgaagaaaaaaatcgtaattcataactatataaaagaaattatgttgacaactacctggggtattcgagcagtcgttttataaatatcccaaatttcctcagctccaatttctcccttttcaagtagcacgtctgcataataaaaagatatggcaagtattcaaacattacaatttgttatctaaaagtcaatctagtttcgataatgtaaactcaagcaaagtaattagagatcaaagtatacactgtcccagtattggttggaactacaataaacaaatcataaacactagtcacctgtgattgtctccgcagctagatggtactccctcaacacagatgaacatttatcaacagcataacgcatatattcatccctaagtgcttcaagcttagctgcaagctgttgaaatggagcaaggcacgaatgttagttatgtgaaatagtcctatctaaaaacttaattgggaaatgaagtgctttgctttagctcagcaaggcaaactgagttgtaagtttcataaatgtaatatgaatacacataattgcataacagaagttctaaagctaatttcaaatttatgaaattactagttctaagtcataaaagcacaaactaaattctttataagtttaaaataaaaattcctaatcctaatcaataacataagagtagagcttaaagtcttaatcaacttaaaagactaaggaatcctcattttcatgatcattatcatcactgttgagattttctaaaaatgaaagcttcagaaaataagtatagcatcacacaaatgggacactgagaatagaagcaggtaaaggatgtcttatttatttggaatttggattttactttttgtggcatagacagaccaagtttaaaagccaaacatgtaatcagaacacttttttttaaaaaaaaataaataaataattaattaaaaaaaaaaagtaaaaaaccaatcagtcattcttgaatacaatttttagccctaaagacttcaccaatatgaggcttaaccctcacacgcctcagaggcaatagcctcgaaggcataagcgaggcctgctgaggcttagcttctgaggcatttttggagcacctcaccccaaggcatcagcctcaatagctttcttaaaccatggtccaatcaacaaatgcagggactaaaattcaaatacttggaaaacacaagcatacattgggtacgagatcactctgattcctgtagaatgctttcccaaaagctgtcattccagtctgcaggattaaaaattctgccagcctcgaagcttctaatgttgccttcgatgagatccaacaaagattgtcaaccccaaacatctcctcctcaataactcttgctacaataaaaaatgtagccaatgaactctagtctttgataagcattattgttaaaaaacattaaaaaaaaaaatgaaattacagagcttaagaacatacctacaaaaaaattaattaattacaaatatgaaataaaaagcatttgaaagcaccaaaatcaggaataaacgacatgcataaggcaatgattaagaacataaacagcaggcaattcaatttcaaactgttccaccatttgtaactatttaagcgtccatggctacaatatccatcaataaatcaattagctgaccttatcccttaacaatcaccttaaaaaaagtttcccagtgtatagtctaattccaggagtttaacctagccatgcagcaaaagagccctaacctttggctaaacaaagaaagtgacaaatgcgccaggaaagttaaatttcatctgtaaaataaaatttgtaacaaacttggtaggagtaattcttgtttaaaggactggggacacaaatggtctcctccaacttgcatgatccaattagccttttattgtattacgataatacaaccatcataactaggattgatgctcaacttcttccaagaagttgataagatgaaaaatattctcataatcttaaagacatgactataacaaagaaatatcaaacatagtaaatatatatataaatatatanatatatatatatatatattgtcttaagtctaagcttcttggaacaaatgaaagcaaatacttttgagaattacccctgaccggctttgggcataggcagctaggcctgtgcctaaggtccacttagtacaagggtccaaaaaaaaaattcccttttagattatattttttttactgattttataaaataccacatttttttctaaataagagcctaaaaaatctttttcctatgcccactatatttagggccagccctggaattacccaagtatgaaatggtacatttatttacaataatctagacatgaaaaaatagctatagaaataattttataaacacttcagatcctgataatagtaggtctggatttagaatttacagattccaaagttaaaggaagcaaatatttagattaatgcaaccaaagatgtaatgacaaaaaaaaaaggaattaataaaagaaggaactgttaaagtaatgaacaaaggcaaacccctgcagcattatgattttgtcatcaaagtttatctttgtaacttacgagcacatgcacgcactatagagttcacataatctgattttcttgcgaagaccttgcccggaatgtcattataacacatatttggctgactacgaattgattttatatccgtctgcatacaacagaaaagggtgtaaaattacaatgttttaggcataaaaagagtttaagaaactgaataataaaggcagccccgtgacctgggtaaatggacggtaaggatttggaaagtagcaggcaaggacagcaacagctgcttctctgtatgccaaccttaattttagatcctctgggatttcagtattatcttcctgacctgtttcaaatgtgcccttttgctgcaaaaaagattagacaaaaacaaaacagaaatgacaatatcaggaaacagctacacagaagttttagaaggcatgaggtagcccaggtaggtgatatgttcttggaaggcactactaacccttttcaaagcttctagcagctcatctcgaccaatgaaatctaaatctttccttgcagtcaaaattccagcttcattactgttattagaatgattagcataagcctttttaactattgatgcggaacagataagaaaaaaaaatttggattaagcatttacagtatgttctgcagttctgccccagtaaaatcttcagtaagctctgctatttcctgaaggagaacatccttctcctcctcagaacggaaatatttatttctagcgtgcacctgccatgctcaaagtattaattacaaaactaaaatggtatctataccaacaatgctgccaacaaaagaaagataaaatggggaagggggaaagcgtaaaaagaaaaagggaaggagaagtaaaccttcaaaatagccaatctaccatccttagatggcaaaccaactcttatgatcttgtcaaaacgaccctttcgcagaagtgcaggatcaagaatatccagtctatttgtggcacctattaccagtacctaacaaacccaaattgaacaatcaaaaccagttaactccattaaagccaagcagaatttgaatataaacctgtgaggtagaaactttaaatccatccatctctgtcaatatctgaagtagaccttgttccctttctgcaccaccctatacaataatcaatcacaattttagatagcattatacaaagtaagagctataattgttttccacatggtatgtttacagagtaaatatggttttgcagccagtacctcatcaactttgaactatatcacactaaatgaagcttttcaagtaccaagttagaacttggagataaatctcaaggtgatcctttaaaacatatttatgcacattttaatcttgtcatttaaagctttggaagctctatttacttatttattatttttgaaaagaaactgaactttgtcaggctctaaatagattctataaatccaataatttcataaaaccaccactacccttacctaccttaccactagttgtacaacataattgctgttacaatgttcctgaacaaccttaaaaaccaatttttttaaagtaaaataaaggtacctattgatatattgatattagagtaataaagagaacaagtttgttgggcattcgagagacccagctctctcccaagagctaatgctcactttaaccgaataattctctccccaaaacccctctataactctcatatatatactatctcaatactccccattacaatgaccaatgtaccctttttatttatcctaaggcctaacaataccggccatccaaacttgaccttgtcctcaaggtgaagaacaacaagctaccacaacagtgtttgtccaaaccaaccatttgcgagaaagcattggaatgagaattcgggccatcgccctctatcaaaaatccagcaagtagctgtgaaactacccgcctggtcgtagcacgaatctgaaactataacttgtgctcgtcctctatcaaagaaccaagccagcaagtgcattcggtgagccacagccatgacatgcccatatagaatgctattgaagatgtgtaacacccactcacgatatgaagctgaaaatgatcatttgtcacaaacccaaaagcaaccagccatccgaaactacaatgaagaacgagagattccagtcattgcacatgaaacaagaattcctagtgctaaaatgtaagttgaagcaagttgcaattccttggctctttcaaatactcctaggccaagagttcacaataatatttctttgtgtggcagaaatccaatccaatgaacacagtgaaagttggaatacttatgtcatcaaaatacaatgtgccctggtagttgtgtctatcaagagcaaagggttcacaacaatatttccttcttcttctaatcgcacgaagcttcttttagagctgcgacttgtcgattgcgactcacaaccaccagcgacggagcaaagggtggggatcgccgtgagggtggacgaagggatgcatacttggccaaaattaattgacaaagagttggggaagccattttctcgccggatttctgtattcgattgatcatcatgtctaacagtttcacgatgggaccaatcgtagcctcaagaactgatttcatcagttccagagcttgctgaaactccgatcgaatttttgtcacaccttgccccatagaccaacgtgctttgataccacatgataggaatttttctatcaatttggtatgaataaaagcaaaatagagagaatggagcccaacaacgattaagcaactgatatattgatgttagagtaataaagataataagtttgctgggtattcaagagacccagctctctcccaagagctaatgctcactctaaccaaataattctctccccaaaacccctctaaaactctcatatatactatctctatactccccattacaatgaccaatgtaccctttctatttatcctaaggcctaacatttacttaattcaaaaacaaaaaaattcaacactccaacaaacacttgtatgttcaacacttgcccattggacacattttttttcctcctgatgcacttatcctccagttgaactgatggaagcgagaaactctagttaattgctaggtgagtttcaggagggaataaccattcaacccaactctcacgattccttttgactttcagatagaaaagtctaattttcaatgaatctaacagatcatccaaggacctacttatacaataacaataaaaatataaataaaccttgcattccatgcatgtatctcgccctgtgcattacatacctgtctcgcaacataagtttaaaggatcaccaaccaaaggttcaactatgctcataaggcatacaagagatgtatcaaaaacctcttacaacatgcaacacaaaatgaaactcgagccacccgaataaattccacttctattttaatttgcatagaaattataaacataaaataaatacaagaaagaaataacaaaccaatacaagtttctttaggttatttaaattttgtgaggtggagtaaaccaacagaaagatggggcattaaagaatatggtttgaggaaagaatggtatgtattaacctaccccaccaatgtcaggcccaccacgtttgctaccaatggcatcaatctcatcaataaatataattgatggtgcatatgatctagcactagcaaaaagatccttgacacgagaagctgccacacctacaaacatctggagaaattaaagcgttaagaagtttgctttaaattctacaatgtccaaatagtaaaaggtcacttgtcttagactgatcttcactcaaaatatattaagaacctcaattatggcagaggaaaactgtagtgacacgaaaataaattaaaataacaataaatatcacgaaggaccttgtaattttattttttgttacagaaaaaaccccaaatttaatatattcatcaaatctatgactggcagtgacttatcaaaattgcaaaaaggcaaaatagggcttagtaaaaaaatgtttcaaatatatgcaatttgaaggcaatgtttcttccccctttggaaaattgctttgttccttatatgaaactcgcatgaaactccttatatggataaacattttgttatatatcccagaaaaagtgcataagtatcatgtttcatgctattttaataatataaactttaattaataatataagttgatcaggcctaacctctacaaaatcagtgccatttgccgcaaaaaaaggaagtcctgcttcaccagcaatagctttcgctagcagtgttttaccagttccaggaggaccatgaagaagcacaccttttgggcagtagatgcccttatcttgaaattcttcatcatcctttaaaattctaacaatttcctgaagttccctctttatgtattcctgaccagcaaaatcatcgaaggtgataccagtagattcttctgctgatataaattttgccctggattgaaagcaaaaataaaattatctgagctaccaactttatctcaaattcatctcttttcaaaataaataaataacgttctttttccagaatacgatgatgatctaccattgccaagaaagaacatacaagaaacatttaaaagtaagagttaataacaaaatgtaaggctctggttgaaataattaacatcaaactgattgctccatatgattctgataagaaattatttccatagacaatacaatttatatttcatctttagttttgtacaccattggtaacttacgaacctagttgtaatttgaaacagatagagaagcaaggtactatattttgctaatctagcataaatacataagaactaaaaaaaatacagtttaagcttaaattcagaagccactccaccagcctaagtacactcttaatagacacatttttttttccctctaaaatagcctcaaagaaatgttttgcctggcgaaccatgaaagggccaaatacaaaatgaaaatttgatacataaacttgccattagaaaatttaacatttatatttttttgatatgtaattttgcatattcctaataccaataatgcttattgttttttaaactaggctctccgcctaacctacaatatttggagagtaagaaactataacaattgttgtgtgggtacccaagaaggacttgaacgtcaaactttgtggaagcaaatcacccatttgagctacccttcttggtcatcccttagatatcaagttgcaacaacaagcaaatttaaactatgtcgccacccacaaattatagaaacagccatccgaaataaaaatagaagaagaaaatacttgtaaaaagaataaagagtatttttccaacaactactgctcgagaaagtcaaaaacatgccaatggaaaatcatcctccacttaccgactttttcctaatgatccaagtgcacggcgcttaaggggttgcctaatttttttgcctggttttcctagatcactaggaatcaactttgcatatattggtcttgtcaagttatcaatccaaatatataaaccaatagaaagggcaagccgcatagaccaaatgactgcagttgcaacagtggtgtatacttctgcaggtactgtgtccacattataaacatcaacatttactatctgctggtgcaacttctgccaaacttcattccagcaatcaataggcatgcggtcaactacatgacgcctaaaaacaatttccttattcgaagttacctcagattctcctgttttctcatctttgtaataaggtagaatcactgtagaaataagggaactaactttcagagcaatattctatggcaaagttgacacccaaatgaaatgagcagatcaaacgtcttacctgatattgtttgaccataatttgaatactccataaattgcacgttatttgagttaagaagcctccaaaaatcactaaagtcaatcctgtgtgagatttcaggatcccactcagttcctttcaactttccgcgcatagtcaacaagactctactccaataagaagccatcacaagttgcctttccaactgtacatttgctttgcgatcaagttcttccaattcatcaatccgttgtctttcaagatcctttaatttctgtgaaagaaaattcaattcaacaatgaactaattacaaaaatggcataaaattttaatgaacagacaagaattattttcagcaagtttatgtaaaatatatatatctaatgaaaaaggatgaaaagatgggcttagaaaacaagttataagaaagttttagtatcctgtcactaagattgacaactgaagcgaaaaatgtaaggaatgaatagaacagggataactaaattggagtgaatgccaaaacattattctttgacttctttgataatgtaagaggctaacacattgtaaatgtacagctcacatagacagggagaactctagaagcaaaactcataattcaatcactacaaagcagtggacaaggaatcatcaaaagataagtgtcatgtcaataagattgctcccatattagataatgtcaaactttataatgttaaatgcttcacaagaacacaagtaaatctgaaaagaaaaatgtcacattgagtaattataatcctccaaaactcattcagaacataaaaagacagcactccgtacaaccaccccacccttccattggaatttattggagaataaacagtttaaatgaatccaactccgaacattataaactttcaaattcaatcaccccttctaacaagttcatgtaaaacagttttcatctttacaacaaccgattattatttcgtttaccttatttaccaacctaccaccatatcccaagccccaaaagtcatctcaggagacataaccgatttcactttgttttacaataacaatttccatacataatttcatttgaaaattcgaaaaaacattttaccagcaacacggcacattagtatatatacccagctaaatatgtcactgcactgataaaaacgacaataatttatccctaactgatgatattatctacaattaaaaaagaaagaaacctcgaatagctgagcagactcaacgtcttcctcggcgttcgcgggcactacagccgagttcgaactcgaaacagaagctttacaggcgcgaattctgagcttcgttgggttgagaaacttagcaatgtcaccataggcctgaaacttagctcccaaacaacgtttaggacgtattcgataaaatgccggaaaggaattaagaggggttttagaggggtataacaagcagtttggtggttgaattatatcacttctcgttaatggttgggaattcattttccaccattaaaggacgctgttgttgtggttgtgaaagtatttttcttgctcttttctactgtttttcctttccggtgtggaaataatgggaggagccggaaaatattatccagcatctattatatccctttttttggaacactattacaattatgccgttttcaaagagaacaaaaatgtgggttttggaaacaaattttaaaatttctaaatacttcccctaacttcaatgttttacattcttttactttttctttttcactttaaccttatgtatgtttacaagttacattttagtggggaagtcggaagaaggtagccgtattggaaggtgcggctggctcacctctttttaagagaaagttaatgtttgttaggtattttagtttgacattgcttcacactcaaaaaaaacaagttaggtctgagttaaatttggatatggaagttttctttcattcctcgacggtttagtaagattaagctcacgaacttattatccaaggtctttttttttctgctttaaccttatgtttagaaattatattttagtttttataagaggctttcttaagaaagaaaaattaattattttgtggtcataaatatagtaatgtagtttagtagtttcacatttcttttaaggaggtcttaaattcaaatctccgtcccctaatgtgaaaaaagatatattatatggaaaaattttaaaaaaaaaaaaaaaaagttaaaaagtatgagaaaaatagtataagataacacttgattcaataagttttttcatgccaaacatgaaaaattaattcttttttaattctgagcacttttattttttttgcatttgctttatctttttcttctttcactgagactattttcaatgcaaaatgtaaaatttgtgctaaatttggcacaaaaattgagtttgtattatattttagcctactatttacaattgtgctccaatgtaaagatgtaaaaaaaatataattatattgatcatcattaatattgtattaaaaatatacaaacatcattattttttattttttattgcttaaataatggtaatatagtataaattatgtaaaagtcaatgaatcataataattagtggcactatagtaaataaaaaatatagaatttatcgtgggctaaatttggcacaatgctatatcttgtgccaaatttggcacactttttagtaggggtgtacatcggtcagtttggtcgggttatagtgtatttttaccaacccaatataaatatcgggttgcaaatatttatttgtaacccgtccaatgaaaaaataaaaaaagtgtaacccgcctaatgattttcatcggtttggtcaggttaacctgtttaaaccgatctttattttttattttttttcattattgttagtttttggtattcaaataattgatttgaaaaaataaatgtatagtacaagtctttcaaaattaaaatatttatagtttaaattaatgttaaaaaataaatataaattgaataaatattaaattattaaagaatatttttcaaaatatagaataaaaatatacccatatgtaaattttaaatttcaacttcaatattcaaatacaatcaaaattatcaactataaattctaaatttcaaattaaatactataaaatacaaactttaaatgtaaattaagttaactattaaacgtaatttatatattatattatagataattttagtaaaaatatgtaaatcggtttattcagtttgttcgtgttatttgggcatgttagaataatattcaacccgtccaatatattccttgggcggtttgaattttttgtaaagttattcgggttatacttttgtcggtttatttggtttgggcgatttattcgggttggacggtttgtaaattttttttgaacagccctactttttagaacaccattggagtagtatttttcttaagtgtgctaaaatatagtaatacaccacttttttagcactccattagagatgctctaaaatctaactttcaaacatagcctaaaggaagattatttcttttattagtcaatataattcatacaagttacaatcacataaaagattggtggagaaatttttcccatccaacaaatattttcattcaataatagagcatgtttcaccactacgaatattgtccttatccccaaggtccaaaacccgaaaaagaacaaatcaccataggcctattttgctgtgtaacattatgtacaaggttatttctaaaatcattgctaatagaattaagcctctgcttccctccctgatttgtcctacccaagctgcttttgttctggggaggaatattcaggacaataatgtcatcatccaggaaattatccactccttcaacagaaaaaaaggcaaagaagattgttttgccataaaaattgaccttatgaaagcatatgacaaactgagctagaaatttattgaccatgtgcttgttgggtttggggcgccgcaaaagttttgaggttggatttcccaatgtatcactaccacctctctcaatatttgccttaatggtggtcagtttggtaacatcacgccctcttgcggccttcgacagggagatcccttgtctccttacttgtttatttgcgcggcagaaattttgtctagacttttgatcgacgcacaatgtaatcggtctattaagggtattagactaagcaggggtggccctatactctcccacattttctttgcagatgatttaatcttggttgggagagcaaatttggaagaagctaaaagttattggcaatgcattgagaggttttgtgtttagtcgagccaacaagtcaataaactcaaaacctcgatctatttttagtaaaaatagttccaatggcatgaaagaggtattaagtcggtgctgggcattgggtccccagaaggtaacatcaaatacttagggttacctctctttcgctccagacaaaattaaggacgctgacttcaatttcatcatcgaacacctcatgtttaaacttcagggctagaaagctaagtctctgtctaaagcaggtcgtgccactctcataaaagttcgttcgcctattcttacttatgtatgccatgcaaacgaccatactctcaaatcgccttgtggctaagattgatggaatggttcgtgatttcttgtgggggtctgaaaagggtaaccatggtttgtatctaaaagcttggaataagctttgccttcctaagtctttaggggggttgggttttcgtaaaacgagagaaatgaacctcaccttcttggctaaatgggggtggaaccttttaaaaggaaaccaatccttttactgtcggatcctggaagcaaaataaggaaagcctattcttaattgtacatccaagaattttgatttgtggttttggaaaaatgtggttaaatctaactctatcttaaaaaaaggagcctgtaagttggtggtggacgggaaagatactaatatttgggatgacccttggatcgctcacaggaaagatttcttccctcgtactaatggctcctccacgtttggggttaccaaagttgttgatcttatgttagataatggaggctagaatatccccttgttaaacagtatcttcaacaaggaaactgtctctgatatcttaaaagggggtaatccatctgctctaggcaacgataaatggatttggacattgaaagggaatggacagttctcgaacaaatcagcttatcttgcccaagtgtttgacagagcacctctttgtgaggttgccccgtctctttggaacagactgtggaataacaaattttttgaaagactgaaaaactctttggtggtgtattttggccagggctcttccagtgcgttctgtgatctgtaaaaaatttcctattaaggaggtgttgtgccttctgtgtgggaccgagaatgaaactatggaacatctgttcttatcttgtaatgtggctttccatttgtggaggtcctctccctgggatatttttcctgtgtgtgatactggcatccgaatgtgggactgggtcaaattcatcagtgaccttaaaaacaaaggcatcaattctgatgaagtcttcctttatgcctcgttaactgttgacactatctggcggatcaggaatgataaagtacatgataactgtctctttaatataactaagtgtattgataacattcactcttcttttgcagttcaccatgcttttgtgttcccttgctctcctccgtgcttgacgattgactggcgtcctcccctgcaagactggataaagctgaattgtgatgttaaagtggggttggacactatgtgtactgatgtggttgcaaggaatcattttggcaaggtgatatgggttcatacttctagagtgttgtttgctgatgctctatgtggagaagcgacgacttgctgctctgcgatggatgtagcgaagaatcttggcttgaagtttattattgtagagagtgattcgaaagtagttatcaatgctcttaacaggactgagtccaggtgggagcttgagaactatgtctctttttgtattaagttctctcccgcgtttattagttgtaatttttctaatattagtagaaactgtaattttgtaggctaagtgaacgtttttccaccagaggtttcgagatattcctattacctcgattcttgaacacctattttgtaatgaccgcgaggtctaagtatcttttatctaatatatgaacgctttcctttaaaaaaaaaaaaagtggagattatagtgtccctttttcactttccactttttatgactaggttttagaagtggagatctattggtatctaagatgagccctttcgcaggtaattatagtctccctccccacactccaatgcagtattttaatatgggaaaatagaattcgattatgaaagaaatgaaatggcgagagatctgtagcagcatctgaaatggttaacagaggctcttcttcccactacagaacctccttaactggtagattcctctcaagaaaatcaaccccttttgccattacttttcaaattttctccatatttgcattctccattttcgtcttcttcgtttatacaagaaattccttggaagatgaacacgtacagccttttttgaacaaaaattctcaatcccatcaggtacgctaaatttacaattttttcttctttccttcattcgttttaggtacttgagctttgcttttactgttctaacctttaattgtaatttcatgcttcgatctctctctcttggagaggggagtggggggttgttgaggcttgattttttctttctttctatgctggctttttcgggtatgggtttttgcgttagaatgtttctgctgatttctggtttagatattcataggagattttaatagagactggatttataattgcaaagatatagatggcgataagatatgttgttatttgttgtattatgcaaactggaaattacattgaggcaggaattggtgtgtgaaaacccaattgctattaggtgctatggagtgcatccagttggagaagcagctaatgctgaaaaaggaaaaaaactatacttttacttgaaatatatttatgttaattatctagaattgtatttgttattatacttatatacttttctcaagttatttggctagctatacaacttcatttacattcactaacttttcaattggtagtgtcttcaaagaaagacaaattatacaatattaacaaatgaaaaaacctttcttcaagttcagacaagacaagatttacttatcagctatagtttgtcatgattaaggaaaatatgtttatggtatacagctactagttaacacaaatttgtgacagtatatgaggcaggctcaatagctatttcgtgcttggagaaagcatattatatattaatgcatttcatgagctttatgaggcattttgacatgaggtacatgaggttgtctctcactttctctctttaccgtttgcttaggataagacggctgatttgccaactcatggcaagtcagatgagcaactttggaatgctccatttaattataatttgcatccgtgtatcaagccaactgctaagtataaaggtaagcatggtatattgtaataaatttgctgagttagtggccagccctgtattaggagatttgaaattttgttgacattattttagtgtcatttcttttggaattcggatgaaaagcattctacttgccttttcctgttaaaagaagaaatagagaaaaaccaagagaactatcattttaaataaaggtagtttggtacagaatactgttctcaattttctttgagcatgtttattgtaagttcagtgtaggcacacatcttagagatacatgcacataaacctatcacttagtcttttgcacgtcagatagtcaacagcaaattatgctatattcccaaaatgtacgtttctgatcagctacaatacaaacattttacaatgtcagcggctgtaggttcagaacgctacataactgtgagaagtaatggaggactgaatcagatgcgcactggtgtaagttgatgagatcgattaattccttttattttattatttttttcatctccatatgtgggatttgcacattacattttgttgacctcttgaagttggtttttttttttaataaaaaacacgcatgtgggtttgcttcttgattctatattgagaatcagttttatctatttaacattttctttttcaatatttagtcaaattttacattgacacctttttaacagatatcagacatggtggctgtggcacgcattatgaatgcaactttagtcattcctcagctggataaacggtcattctggcatgattcgaggtaacaagtgttattatttcatgtttgacatttttgggtttcttttatttcttacattttctttggataccatctttagctggtttattcatatactgaaatgtccaaattctcagtgtgttttcagatatatttgatgaacttcattttattgaaaccttaaaaaaagatattcggatagttaagcagctccctaaagaactggaaacagctcctcgagctcggaagcatttcacctcctggtcaagtgttggttactatgaagacatgacacagctctggaaagactatcaggttgagcttcttgaccaaactaggatggcatgttactaaaagtgcatttttcatgattctttcagcttcttattatttgagttttcaacagagtgttcaaatttctttaacgatgttcatgagtcagtgatatgggcatctttctttaaccttaggaaatccctctggaaaacatcttttggcttctttgttgaactaggaatgtatagttctattgagtgcatgctcagtttgttagcttcttttagctttagccgatgctgttgcaagctgattttgactgatttacaggcatctaattttagtatttgaccctgagctgtacccattattgtcactgtgtcccataaagggtttaacttagatactagactatctgaattatttaattgttggaacaatagtccatatgtgataacatgttagttttcttgacggaaattttttgtgtgcttattttaatataatctattggtcatttgattatattgttttttcttattaaatgttaagatgtgcatatcatttcctaaaagaaagtatagatttttatgtatatttttactactttttaatttacccaaacataaggatatgatcaaatgattattatacattgctaaaatgagtacttaattatttttaaagaaaaccaacagtttttgactcatgggatattgctgcatcaattgtatacttaatggtagtctaccatgtaagttaaaacgttggtagctaaagtaatacaacgaatttagcccagctttaaatatacttgggtatgttactatgttgattagatctaaccattggaatagattaccagttgttggcctactaggaagaggggaagatgtgttcattgcctaaaatgatgacaaactacatatttatgatcaataatggggttcaatgccaaaatcataatcaaatgaaaattgtcttttgaacgtgtcaaatctaccatgttactttttattccattgaaggatgataatatatatatatatatatataattgaataagtctgacttgtttgcttgccaggcctacctaaagttgatttgtggctttaaattttctcctattgtagttttatgctttttgaaaagaacaagattgagtattgtcggctagttgtttttttggttgggggcttttaaatgtcaggctcaaattgtttgatttgcatgattggagtattagttaaaatgttgaatgcctaattagtgtacttatcagatatttttttttgtaggttcttcatgttgcaaagtcagattctcgccttgcaaacaatgatttacctctggatattcaaaggttgaggtgtcgagctctatatcaagctctccgctttgctcccccaatagagaacctaggaaaggtttgaatgatttctttggttttctcacattaactcatgctcaatgaatacattttaactctcaatttccacttctcttatttagaaaatatatggaaatttattagttaaggttggtcaaacttaaactttagcagtaatggcagttttcttttccccaaaaatctttagataatataatatgaaccttacaacatatctccgatacactatccatgataacttaatctccaccttcccaaacatgttttcgcttttagtattggtgcatttaagaggtctcctatggggattcctgttacattaggttctgagcatgcatgacggtgacaccacagaagctggtggagcggctcagatcgcggggagagagatacattgctctacatctgagatatgagaaagacatgttatccttcactggatgtacgtatggtttaattgatgctgaatccgaagagctcagaataatgaggtaagaagatctatttagtgtatgtctatgctgctcgatagaggcgagctcttttaactttatttgcggataaagagaggaaagggcaaagtctattcttcacaagtttaggaaaataagtgtgaggccattttctgaagaatatgtacagtcgtgtctgtgtcatgtagctggtcctttctttgcagaagggatgctagtgctgattttgtatgttcattgtcatctttttctctaattgtgccattggttggtgaaggagttcagtattgtttgtcaaattattttaaggattactctttgttatccagtcagtatgggccatttttttccccttaagctgtgtggacaccttgtcttgcatcatttgcatttctggccacctttttaaaggttttttttttgagggaaagaagacaaatttctaataactacagttttctgtttcatatcaacaaaaaactcatcatagcttaagttattaatgtcgggaaatcaaagcatttcaattttgttaatatttttgtttcaagaacttctctgatacaatattattctctattattctaaacgatgttgaaaattttgtgttaagaaattgacatgcatatttaatagatattgatctgctcatgtttcttggcttgttgtgaaacctgcaatacctatgcctatgtttccttctgctacaccgtgacaaattaactaaaataaaatcacaacatactcttgccaacagtgtgctccacaagtttttatgtgttattgtgcttgcgaattcttcataaattgtgatcctgttcctgtattttgtgattttttttttttttggatattttgtgatattgttaggcctttcaaattccttttaacctattttagttttttaaatctgaacaatagtatgatcaggacatggatgaaaacttaaggttaagtattattaaaatcttcataaaaaataatttgtagaaaaattaaaatattaaaaccttccaaagcaagatgttgtgaaaattcaaattactatattttattcatttatgtaagtgaaaaaaaaaatcttttataggatgctgtgttattattcttttctctattttgaacaagcaaatttggtgattaagttttctgtatgtggcatttgttttaagtttatcaattatttataatgatattttctagggaaaacacaaaccactggaaagtgaaaaggataaactcaactgagcaaagagcaggaggctattgtccattaactcccaaggaggtggggatatttcttcgagctcttggctatccgccatcaacactaatttatattgctgctggggaaatctatgggggtgatactcatcttttggagctcaaatctcgttttccgaacatagttttcaaggtcggtcagtgattttgctctttttttgtcatggaaaagtagcttcgcagagctacctttcgcttagggtacaatcaattcaattcatttattttggtaacaggaaacacttgctactcagaaagagttgaaagcatttgctaaccacgcatctcagagtgctgctcttgattacattatttctatagaaagtgatgtgtttgttccatcatactctggtaacatggcaagagctgttgaggggcatcgcagattcttagggtaccgcaagacaatatcccccgataggtaattatagacaattattattgtgtattggtaattattctatcattttccttttccttaaaaaaaaaaagaaaaactcaagtttttgagttctgtcattttactggttgaaattgaaaatgaaggtccaattccaagtttctaatgtgcttcctggcctttagccctgattcacttttttacattagtgcctgttgaacttagaaaagctttgatactatcataatttcattatctatcagtttcttcttcatccaatatattaaactcaaaatacaataaagattcagtttatggagccactgaaatttgttgtgtttccctatgaaatgcttgattagcctaagaagccattgtacaaaaatggaggaaacgatcacttcttcgtaagtggttgtacttttaaagcatttcatgaaatttgtttgtaggaaaggactggttgaagtttttgacatgctggaaagcggacagctgagagaaaccgcattgtctcaaattgtgcagcgaatgcatgaaaacaggtaagtttactaggatcaacagatctcttgaaaccatgctgtttttatttagatatccatttttggtgcatcatcaacaatttttatttaaattagatacagtaaaccctctatttaagaatattctatccaggaataatttctaatttattataaaaaaattaagtcccaatttggaacaattacaaataagtacaccttatataagaataattatatcttaataaaatatatatattttataaatttatttatgtaaaattaataattttattctaaattataatacatgtataaatattatatttattcaaaaataattttattatgatattattagaaattgtttatagttaatgttattacattgatattttttagtgttttgatttatttttcttctagtgtaactttatttggttataactgtttgcaccactaaaaccaattacaaatgtagttatgcttatatttatgctgaaagaaatttatgatgtagaaaatttccaatactgcaggcaaggagctccaaggaaaagaaaaggtccactgccaggaatcagagggcgagggcggttcagaactgaagaatctttctatgaaaatccataccccgagtgtatatgtacttcaaaaaggcattttcaatcacaaatgtacagctaaaatgtgttcattattaaagtgactcagtgtaaaacattgtccgaatgatggttttttgacaaaaaccagctagaccttatgagaatgtgaaagaattgcatactaaaataaacctcatgaggaagacacaagctaagccttatgaggtttattttggttgtaacataaaacctcgaagggcgactcaaacattatgaggtttagtatgaagttaagttgcctcaagtcttaccgaccatctggtgaaatctcccataccagagaagttaacatagcagattacctctcaagtagctacttaaaagttacagtttcttgatttgaagatctttcatataaatttcatttgaatttgaccattaatttgcttctggtttgggtgcataggctttgtttgggattttttttcttctttacttttgcttttatggaagtgtacaagagtaaaaacaattgctgccatactcttttgacatgagtttcttggttcgctatgggggtttttgtttacagtttttttcttgttttcttgaattttatcagtgacctccagtagtcgtagttttgttatagaccatgtaccctatatattgcacagggcatataccctgttaattctatcaacatatataatttgggaagagcgcgtaaagttttaatggggaaataaaattaagccatcgacacattaaatttaaaaacgccataaaatatttatttatatagactaaaacatacatgattatgaataaagtacggaattaataaattatatatgcactataatttaaggatcgaaatacctccagc

SEQ ID NO: 110644 - DNA, 8918 bp, Cannabis sativa
aaataaaataaacacatatatacagtatgaatacatttatattcaaattatgtatttatattaagtatatttatgtttaaatttaagaaaaattatggaatctaaaaaaagaaatataaaatagtcaataattattactatatattataaaaaatttaaaaaaaaaagaaattgtgagaaaatggtaataaatttttttcctacatgtaattaattaaaataatataaatatcttattttaaatggaacttactccaattaggtgtgagatttttttattattattattattattttttaaaaattaagtatgagattgctagatttgtctccacctacaattagcataatcaagtattgtattccaagcctagtctagtatactagggacctaaaagatttgactttgaaagttttctctcaatcgttatcatttccaatgttacattgtggggattttattgaggatagaggccaagtccccaaccccacaacgaagaaggaaaaaataaaagacttttcccgtgagagatctataatgtttttattgaaaaagagaagcttatccacaatttttttttaagaatatcgatatcagtgttagatataaaaaattatgcataaacaagtaggaatattgtgatgagcacactactaataacatcaaactaaaaatagaaacacggtaatggaccaccattggaaagcctttctaaaaaaatacataaaaagtagccttaagttgattgagatgagagaaatggatagtggaaggagtaaaatctattatttagcaagaaagatggtgaaaaggagaagggaaatacaaatcctcttaaatacactttcactgcttgtttcttttttattaagaagacttttactaaataatattaataatacatccttctagtacttctctctctctctctcaactttttaccctgtctattcttcttccattcaaccaaacatggtgttaaaggctttattttgctaattgccatcatacttttttaacataagagagctcaccaaaccacacacataaggtaaagtatggtgccttcccccaccatgtgagagaatcaccctctaaagggtttaaggctacctacaaatataaaggaaatggtcccctaccacttgaactagaaacccaaaattaatgatttcggcctaataaagtccttgcatgtatattattagtttatagcagccagccacacttttgtctattaagtagaccccatttatatcgcatggacatcatagctccacactacaacctttaataaaacacaaaagataagaatattcgatgcatatttttagtcttttatcattgtattatgtttatgcttcataattatactcgcaagacaagttaatttaaacacgaataccaaaattgcctcaacacaaaatattactaatactattatgggaattcactcaattcttttctcttgccccaattttcctggctttcccgatttcttggattagaccatcgcaattttctcatgtttatgcatcatatatgcaaaagaccaattaatcatgacgaaaagaaaaattaagcagtaaaaacatgcaaagtggagtgggctacaaatatcaaatcagtacaatctttcaattcaagctgctgctagatctataaacgaggtttcattgcatgatttcctaatttgtcataaattaacaattgttgaaccttataaattaaagcattaacgtacttgtgtactatttattattcttatcgcataagtaaattaaagcaaattatatatacacttgctcaaacaaaacaacctacattaacataataataaacttttggttgcgcacataaatgattgcgtgacaaaatataatacaaagatacattagattatatatatttaaaaaaaaaaaaaaaaaaaggccaattaacgacatgctacttgtaccagattgtgttaaaagggtatagaatatagatggtccagtacaaattacaatcgctcagcatggccaaaacctgcttataaattacaattaagatagctgaaatgagacgacctaaactaaatttttattccaaaaacatataagccgtatctttctggagcaatataatattgaataaaaatcttgagctggattaacacaagagatccgttttaaacaaagataattgaaattatattttctctaagaaagctgagaattgaaaatactaatactaagcatcatcgatattaaatggcttagtacatcgtcccatctcatgaaaagagtcatttcatatgatacaaatgatgctagatggggaccttttcctgtcacaccatatactcgaatctgagacaaaattgcagtcgaccatcaatgagcaaattctctctgtcactttaagaatgaaacagaattatataattttataaaaaaacacatgtttttcaaggcaaaacagaacttagcaattgccaaaaaaaaataatagaactgaggagaacttttaaggccggggcaaaaaagtaaaggtgaccctttcttaattccaatagtagaaatggccttaggaatactttcgttaacttttgatttctaaaggaggttcgatattggaaaaaggagagggttcagatgagagaaaaaagatgatgaaaaggattaataaataaaagggttaagttaggcgcatgctttaccatataaaattaaagtccatctcttgcccaacacaacttgctatacatatatataaactatactggaaaagagagctgcgcctctacaccaaaaagctgaaacaaaaacagctaaataaatgtagaataggaaagaaagatgcacctacaagtaggcccaggtattttcaactgtggtgaactccatattcatctatctaggcagcattagaatggttctgcaaaacagaaactcacaatagatacacagatacaaaatgtggtaactcgtgcaacaaaaatgatggaagaaaattttaagtagtgtttcttgccaggtattggttgaaagacaataacgcatactaaacatttcaagtgaaactaaagtagaacatgactacctttgcttgcagaattttttggctgtcactaaagtattgattcggatggttaatcccggaatcacatgatgcaccatgaacagcttcaaacgttaaggtgcatgccaactgatcaaataagttggtaagcgtcaatccaatgttagaaagggaaaaagaacacctggaagcaatttatatacacatgaaatcttttgagacctgatagtgtctattttgcactttgtccattacatcttccatagccctgctgtttactcccattttactaagagcagctctaagattctcctcactgccacaaaaagccaacgagcagataaagagttcagcaacacaaatctatgcacaggtgaatattaccacttcgttagcaggcatcataattaaagactggtgttacactataatcaagcatatgatatcttaaaatgtaaatttgtttaaagagctaacaactcaaatttaaaacagatttggagacttgtgtattaaaaatctatttatgatacaaacttgtgcacaattcagtttttgaaggaactatgaaaagctattttattgataagagcaagaacagatacaaaattccaagttatttgaggaacttggcgttctacccccaaaagctagcctatgagaagagtgtccaagtattacagcttttgttaaatgcataagtttaatcaaacctaataaagcaagtttatgaagtcttcatctctttttagtccaaaattagactaagaatgagagggtaagagttatgaatgacctgaaatgtcgataagggcaaccatgatgatctcctacacttggagttgatgagatgattttttgacaagaataaggtgtatagtcctgcaatattcaaaacagcaattttgtcataatcaaaaaatagggtgtagaaaccaacaacttccggatttttagtcaccagcattacttaatgtatatttaagtaatgtatatttatttttaaaaagaactttatgttcttctaagttcttctaaggggtcttctctagcgacaatacttgtgctcttctcttcaaaactgaatgaaatgaaggaactcttagagaagtgaagtttgatatcataccgtccttttcccttctcttccataattatggcgtatgccatatgcatattctttgtcaaacctctctgcaccaacctaaggcaaaaaaataaagcaataagaacaaaatctcaaatagaaaaaatactacatatttttttatgcaaatgtaatatccagattcatgagataatgtgcagttcttcaaataagcaaaattgggaacttttattgtgtttctaaatagtgactgatcataagctccataaacaaaaaagaattcaagtcaagtttcaatgaaaaatagaaataatcaataacattaatttaatcaaatatagtactgaaaatatgtctgcagtccattgtagtcaaggtaccgcctaaccttttgagagaactcagttttccaaaacgaaagtgcatcatctagcttcaagccaacaccctgcagatggaggatcaatcaaacagtaagcaaaaagtaaaaggatatacaatttcatgatgccatcagcaataccttcatatatggccgtacatgtaagaatatttagtaactcttgaaaacctaataacttctgcaaacacatttgacaaaaattatgcccttatatgctgtcaattgcagttttcccttagataacttggtaccaaaattaacccagcctgtagcatagggcaatgatgccaaaagattccgtctgcaacagcatgtccaatatgaaatgcaataaagccacatgcacctaaaatcctattcttacacaaatgctatcatatacaagaacgaaagcacaaaatcctcatctacgagatacaaccttgagaaagaggcctaattgcatccttcctccatgctttagatgatgatcctccttcaactgcatgtaaaaaaaatggttacaaaaaaaggtgataaagaatgaaattgaaatgaaatgagagcagaaagcgattagcaccacaatgtgctcttaccttgtcaaatagatgcctcatacacaaaggaaatgaactcttcgccaacgcctcaatgtcttttactgaaatctcactaaacccttttggctacaaaaccagtataaaaaagatagatcatcattaaatacatgtctgactaatgatatttgataagttaatttgttagatgacgtacctgagaatagtcaggacctaagtaacttgtgcttagcgcttccacaatctaaagagcaccaagaaaatgctagtcatcactaactgcttctttgacataaaaaatttaacaaccatatacttacaggtgataagcgatcattctcttgttctcttattgtagatgtccattttctgcatgaagaaagttaaagtatttctaacattataaaaaagacctcagtattgttgtaatgcaatactgatgaaaaaaaaaaacaacaaagctcttcgatctgaatataaagccgccctagaattacctgtttgtcaaaatgagtgccttagataaatgactacgaaattgtgtggcaacaagggaaaccacctacaaggaggcaataaaagaaaataacacataagataagtgtataatattgaaatatataagcgaatagcaagtatagacgctaacctgattggcagctatataagcattccccttgaggatgaacactcttcggctagctacaagttctggaacttcttcaaaaggtaccttcatttagagaatcaagagcgatgaaaactgtaagaacaaccaacatgaaaaagtagattaaactgaactttaaggtggagaagttcctttccagcataaccatttaaacattaagaaagatgtgcacccaaaaagtaattaatagcctgaaccataaatcagcaaactaataactggaaaaagttatcttcaagccaaacaaaatctagagaggcaaacctagcgatgaataggaaagaatttatctcagcttttgtttatgattgcaatattttagattcttgcttctcaaaaaagcaacggcagacaaagtatagaatcatctaactgcattaattgtttcatgagatgaatgttgaaccaaaaggataaatataccttgtagaatatcgcaccagctgcaaaagacaggcagaaaatgggaaatcaaattaggtataatgaaaaaacgaaaaaaaaaattgaattagtgtttagtgtaactttcggaagaaaacagtgttgaaatcaacaatagtaatgtaacttattagggaaactgatataacacctggacataaggtgtaggtaggcagtttaattggctgtgtttccgttagtcagatgggcttttatagcattttattgactataaagataggtgaagaagagtataagctttaagcagaaaactgaatggacagcttggtatttttattgggaacgagagcctctctaatcaactcatctttctactcgctagtatcaagatcagcatttttttttctctacagtaaataaaatttcaagtctgcgtttggttttcttgctagattgttatcagaaacctaagcaaatggtggctctactactggtttaaacaataaatttttctacactgactcaaggcataaaattacatttcagtgactggattgttcaacttaagcagtaaatcataaatgggaatgggaaagaaattaacactttatctagaaaatggcccaataaaaatcaatgaatcatctgacctacctgttggtacatccttctgacctatggaacgtgcaacttggaccaacttatcttttacactctgtagaaaacaaccagtgcaactaaagtaagcagctgaaacttaaaataaagaaatgtttactttattatagaagaatgacaaacatgattgaacctgatacaaaaatataattacatgtgatagaagtgtgaagaatgtaaagtacgtataaatagctacctcaaattctgaattactaactgccttgtatgaaaggccaaattcagccatgagagccctctgaaaaattgagtagcacaatattcaagtcttcagtatataaagagtacaaaacaaagtactgcacatgataaccggatcctacctgaacttcaggagttccctggccaaaacggtaacgaaatagagcagtctccatagaaagaaaccattttctcaagtcctcacttaataaagaagtaaaagaatcagataaaaaaaataatcagagagcaaaaaaagttcaagtaataaatggcagaaccacccagcccctcaacacccaccaaaaaaaaaacactcacgttctgcaatacacaagacggagaacaaagtgggatataatatccttgttcagatcttcagatggatgtggctgcctcatatttttcgtccacagatctttttcctgtaaaaagcccaaacttcaacaacccagaagataatttcaaaaaaaaaaaaaaaaatccgtttcctttctcttaccaattccaccatttcttctgctctctttcctctagacaatccatcagaaattcctttaagcactgaaacaaacaacaaagtgtataagatttgaagtgaaattcaaatcaaagactataactattctaattgtgaccatatgtataatcaattagatcccaatgaatatggagtttcatttctctcagtctctttcccaaatatgaaataagtaaaggagagaagtaagatttacctcggaggcgatccatggcgaaaagctcaaaatcttcgagcctgacttcaagtgcgggagccgaacggtagagagggagaggagaaaggacatcgttgaccaagggtttccgttgagttcgaacggtctgcataattttcttattcttcttcttctgaaagcagtgagaaagtgcaaaatcaaactgagaaatggaaacaaacctattctgaatttctcccttctctttctgtttttattgttcccgcgcaaaataggtgaaaacggcgggagatcactttggttggttttgggccgataaagtggacctgatacacttggcccaatggatctttaattttagtttaattttgggatttttacaaaaatactaaattttggacaaaagtttacaattttactgtcaaagaatgttttacaaaatactatctttttatataacaaaaaacaacaaaacagaacaattaaaataacagtgaaacaactaaaaaataattaaatactaaaatattacatatttcatagtttaaaaatacaaagttaattaaattttaaatgatatttttatgaaattaaagttatatatttgtatgttgaaaatattttatttagaattaattttatctttgtttctagataataattagtatttatggcataatagggaaaaatagataaaaagataaaagatgcatttttattaaataattataaattaactagattttgaataaatagtttcattgaaattaatgtgatgtatttatgttgaaaatattttgtttagatttaattttgtttgtatttgattaagaaaataacatttgtgaaatgaaaagggaaaaaaataaaaagatgataaaaatgaagtccaaagcatagaattttggcaattttaaaagctaaaaaggtccataaaaagaggcccaatttcagaccaccaagagacaagaatgccacatgtcgagtccctatttcttgtgcagccactgcatcaggcgggtcccatacgccagcaattgtctgttgaaaattattttaccaggatct

SEQ ID NO: 110645 - DNA, 1748 bp, Cannabis sativa
ttttaaattatatgaaattcaacacttaattttaccaataaaaatataatacattgataggtattagttactattagtaccttttagcttttttatatttttattgctttactttagccattctctaatataaaacacttataggagaccacaaattttagtgagtcaaatccttaggagttaaaaacatctatatagatgtatacaaagacacaaacaacataataagtttattattaattaaaatctatttatatattgacatgtgcagattggaaccgcatgagagtatcagtaaacataatcactcaaaacagagctgaatcactaacaaggcttctaaaatctctaagcaatgcttactatgttggtgatgaaataccaataagtttcaacatggatagtcaagttgatgagtcaacaataaaactagtgagcacatttgattggccacatggtccaaaaacactaagaagaagaataatccaaggtggattaatcagagccgttagtgaaagttggtacccttcatctgatgatgattatggtctattacttgaagatgatattgaagtatcaccttactattatctatggattaaatatgctcttttagcttatcattatgaccctgaaattcatttccctgaactctcttctatctcactttatacaccaaaacttgttgaagttgttaaggaaagacctaaatggaatccaactgattttttcaagaaaattcatccaaacacaccttatttacaccaattaccatgtagttggggtgcagtgttcttccctaaacaatggagagaattctatgtgtacatgaatatgaggtttactgaggatgctaaatcgaacccggttcaaattcctaagtctagaacaaatggttggcaagcttcatggaaaaaattccttattgacatgatgtacttaagagggtatgttagtttgtatccaaattttccaaatcaagctagcttttcaaccaaccatatggagccgggtgctcatattagcgcgaaagacaatgttgttcgccatgacaagagcgattttgaggtgcctttgttgaaggaagattttagaaatcttttgcctaatgggaaatttcctccagcttcaagacttccttctttgaacttgtttaatcaaccaatttctcttaagggacttaaggcagctggtgctaaacttggtcaagatgttttgaaatgtaacaatgtgagtgagattgtggttgttaatcaccaaactggtcttccagctacttgtgctaaattctgattatatcatcaaataatgtgatttgttattgattattattcttttcttttttaaaaaaaacaaaatggggaaaaagggtacattttttttattatttttattttaattttgttgattattcttggtagaggattggagttgaatcttgtttaagatttggtgataatggttcttgactgttgttgttctctttagttttctatgtaaggattataaatattggcaagagggtgttgtgtattgttttgatgccagccataaatggcttaagctctcttaattttctaatgaaaagaaatttatagctctgtctctctctcttcttttaactcatgatgataagttgtttaattttgaattattaagattgtaggaaattacactctataccctttttatattgtattcttttatttttaccttcttttttaaaatctatcatttttacctctttt

SEQ ID NO: 110646 - DNA, 5720 bp, Cannabis sativa
aagagctcgttcgaacctgtggctttacttcaactatctgctgtcccctcttaactactacaggttcgtttgcaaggacattttcgagatgatccaacaattccatagcctggcaagatccaaaataaggatcagcatcttgatggtgccacaccaaggcactctccttggtctctatataagatccatcggttgcttctgtatataatttcatcacaggttctgcaatttgtttccattcaacatctgcagctaagggggcggtttcccaatcggattttctactccatctataagaatcaaaaggagttataaaccaattcaatttcactttcaagctcaaaagaagagactattaagtagcttaaatggtggaactttaaaattcttgtatgtcaaaagaacctaccttatgaagtatccatgctcagctgcaataccaagattctcacattgagagaaccattcgccaagagatttcttccctctgccactaaccataaacacaatgttcttcgggtcactgcaaagattgttcaaaacagaaatgacttcaggacttggaggcttagagatggaagtttgaggcactactgttccatcataatctaaaaatattgctcttctactagtcttcctgtacgatgagagaatatggtcaatcgaaagcttcctaaaacttggtgaaagagacagaattctgaagtttagaccgaaaccaattccccaacatcgtttactgtagtgatctttgcaagctctttccaaatcctgaaaaaagctacgagaccaataagccacgtcatgggagctgatgtatttgtagtgcttctcatgccgcaaatgcttctctacatcaggcattgtgatggccacattaagtgcatcagctaccgcctccacatcccatggattcacccttattgctccacttaaagatggcgaacaaccaatgaactctgaaacaacgagcgtactagttcgaggggaatcagaggaaagacttagagcttcatccatttttggagttccttgcctgcatattgtatacttgtatggcattaaattcataccgtccctaacagcattcacaatgcagcactctgctaaagaataataggcagttttttcatatagaggaacatcgcggtctatcaaatgaattggttcatatcctggaaaaccaaaagcctcatttattcttgtagcagtcatatatgtctcccttttagcttcttgaacatccttccctgtgctccttgcaggattcaaaatttgaaccaagactatttttccaagcaactccggacgctgcaacaaaagtttctccattgccaagaactttaaactaatgcctttaaaaatgtccatatcatcaacacccagaatcaacttctttcccttgaattgttgttgaatctgttcagcctttgtggaagacaacggatgattaagtgcggattgaagccatcccaaatgaatccccacaggctgaattttaatgttaactcgccggccaaaatagtcaactccaatgtatcccctcttggattcatactccaaaccaagcattctactacaacaggacaagaagtggcgagcataatcaaacgtgtggaaaccaaccaaatctgcatttagtagtgctctaagaatttcatctctaacaggaagtgatctgtagatttctgaagaggggaatggactatgaaggaaaaaaccaagcttcacccgagcaaaatgctttcgcaaaaatgtaggtaggatcataagatggtagtcatgaacccatacatagtcctcttctggattaatcacctccataaccttatctgcaaacatcttattagcacaaacataggcctgccaaagcttgcgatcaaaacgattaccatggtctaggcacattggcatcatgtaatgaaaaagaggccacaaatattgcttacaaaaaccatggtaatatttcttctgaatatcagaaggaaggaaagtaggagcacaattaaactcctcaagaagtttctgagaaacaacttcttgttcgctaatatcgatttcaactttgagagatcctacaaaaacaacctttgtaccaggtgggaaaccatctgtaagttgtaatgagagtgaatcctcatcaagactaaagcaccactttcctgaattcacatctttctgagcatttataggcagaaaattagccacaactattatcttttcgcagcaatcaggaggaggaggagactgtaatcctccattgccttctatctcgggcataattcctcgaacggtagtcatcagtctcggaagatttctaggagttggtggaaaattcaacatgtcccctgaggccaattccaacaaactaatgcaagatctcgaaaacattattgcaaatataatctcttcttatgagttttcttcttggtaatgtgaatgcttcttgtaagtgctaagcaaaagtgtagtttcgaaaacctgtagaaagtgatgtgaaaggaaaatactcaatgctattcctaaacataatcaaatcaatacaataaaaggtaataattgatcacataacatacagttgttactgctaatccttaaaacataatcaaagggaaacaatactaagcatatctatagatagaaagaaataatagacaaaagtaatgaacctgcaaaacatacctactttttgattatagcttggaggaaggtaagaaactttgctcctaatacttaaaaaaattctctttttcttttaagatggaagctccactgagaatattctagttttctcacagattaagaatcaaaggcaaaattgatagagacagttgatctgtaaggaattcagaaaaaacacaattttctcatgcatcattttacataatttagttccaaacaaagaaaaaaaaaactttatatcaccacaccttatctggcttgtaagtcatgaatacagatagccaataaggataaaccatattctcaaattaggccaaatatagtttatttgacttgtgtccataaattaaattaaataaaataagaaagtctttgtattcctttaaaactaaacaattacaaaaacaaaaatccacaagcctccatcttttgagcagattttaaattcttgatagaagaatcgattctatatcagcttaatccaaattctgtacaaaaatacaaaataatgactataaggaataaatttcaattaatgtgatggtactatattattcaaccaatcaaccttatctactataaattattgatattcacactcaaaagactattcaaagttttttatttatttttttaaaaaaatattaattaaacagatgaaaacaattacttgtcacgcaactgagtcatttttttttaacttttccaaatttcgataagagatctttgtttttctattcatgatttagcttgtaccgatccatatttagtatgaaaaaaaaattcaataaactctctgtaatctttatgtgcaaacagaatgagtaaggcttaaggccaaaaagaaaatctgaaaactcagagagagagagagagaattaacctgaaatatgggaatctgggatcactgattcagctagacaaagcttctaggactacttatgtcagaacagcaagaaaagaatctctgtgcaaaatgattatataaaaaacaaaaaatcaaacaacaatagacaaagtacagaatagtgtttggcttctaagaaaacacaagaaaatgtttatagaataaagagaggaagcaggtagaccatcgcgaaagctaactcattcccaataacccagaaaattccaagtgcccattttctcatataactttcccggaaaagaaatggacagattacaacgagaaaaaaaaaaaagaacagagagaaatttctgagaaggggtgtcagagaaaacttacatagagagggagagagagagagtcttatccaatccaataaagattaatgttagcatatatcatatgtaaggttttattttaaaatatattaaatacaagatattgaagagggtatgagttgtatgagaaacagagtatgtattgtataaatatatatgtatatatatgtgtgtgtgttaggttcgaaaccggtgagatttgtgaaagcttttattaatggtttcgaaacgtaccaatttaaatatcttacattacatacccaaacaaaaataacatatttatttctttagcaaaaaaataaatagtatattggtacagaaaggaaaagaaaatgaagaagaatttcatgaaggtttttgttaaacggtggaataagattttaacgtagaaagtcaagaaaaaaaaaaaaaaaaacactagagagagagaatttacagaacagttggattgcaatgcaaacacttttggtttggtctttacgttatagtctttacggggtttttgttcttccctcaaaaaaatgcacatatagtgcaactttatttcaaaactaccctttttaatttatattatataatttatatatttgtcatctttacttggaattttcctaatatttcttgagtttatcctaacttagcccaaacttttggaatgattattctcaagactaaagtcaagttcatggaactggtaaaaaacagtaactaatttgactatatcaaaaaatacgtatcaaaagtatagaaaataggatgcgtttgggtgtttgataatttactcttaaaatctcaacaatggatttttttggtaaccaaaagaaaatctatttatataattaaatatatattatataggtgccacaaccacaagaggagtctttattttctacataaaaatatgttatccttcaatagtgttcttttagtccataccaactagttccattgtcctttttagtatttaaatcaagttgaccaatgaccattccctttaaaccttaaaattgatttatatatgataatacttttcaaaaaaataattatctcgtggtaatggataaggaaagactagtggcaacaaagttgaacaaatcttttaaaattttaacaactaacttggaaatttggactaatcttcatgttgtctcttaaaaaaagacttggaggaatttaattaattaggagtttggcacatttcttaataattaaaatataacaatttaatttatagtagacttgtgtccaaatattattttatttcatttgaaaattttgagaaattcattttaggacaagtaagccaagtaattaattaatggcttgtaatagattaaaattgattactaagtataactaattaagatttttgcacctcaaattttgatatatactaaattatgtctcttgaatttttaaggtcgttatccttgaactatattgttggatttaaggacttttgtcctattttagtaaaaaaagtttaacatgaataaaagttcagaggcatgatttagtacatgtcaaagttcgaaagatgtaatttggtagatatcaaaatttggggagcatagtttgctacataaataatcactaaaatagtaaaattgaaaaaaatcacacagaagtccttaaatctaataatctcaatagttcagggagaatttttagcgaccagaaaaattcagggaatataatttgttacatgttaaagtttaaaagacaaaaaatttagggatattggcggctaaaccacctgaactttatgttctgtaacacttaaccacaaaaac

SEQ ID NO: 110647 - DNA, 12085 bp, Cannabis sativa
ataatactaatacaatataatacaatacaacacaatccaatataatacaatacaatacattacaatacgacgtaccaaacctaacactattaatatagcaaattttggttcgggtcattagaataaaataatatgaaaattctatactaaatagtttgtgtaccattgtaataatttgcggaaaaaaaaattgcaacgaaaaaaaaaaagaaaagacggtttaaatttaaataagaaaataaaaataaaaacgtggtgaaggtgcaacttctctcccggaagaagaaaacctcactccctccctctctctctcaatctcctcggcattaattcccaacctctctgtttggttctcgggaaaattgatgcaaaaatttgtttggtggccaatcctcctaaggccttcacgctgccgtcttcaagctatcttcttctcccgaatttgatttttttactggtaatttcagaccttctccattgcttcaatttcacataatcaatcatgtatcccacacaattgtatttctatcaaacatagttttcccccttccatttctttcaattatacttttatttcagtgaaattcgggttcaaatcagaaccgccaaattggtgcttgtacacgagtatttgaaattgaagttaaaatgcatttgtactcgtatctgaaccatcatatatgtattttattttcgtgtcccccgcccagaaattacaaagtaaatttaaaagtgctatctgaagcttatgtcagctgggttatgatcgaatcttttgattaacagagttttatggctctattgggcccaattgattggaacacttttaaattcatgttttccagttttattattttcgttaataaattcttttattctgctcataatatatatggtttggaaggctcttttgctctcttgtgcttgatatctgatatcctttgggtattctcatttttggtctagttgctctttctgtctccattattgttttgattaagacattttagcttaagttttcatcttgctgcacatttattggtcggctgtgagagcattggagacagaatcaatgtgaagccttttgtgtttcgcatacatgccaattattgtttgctaggaactattaattttcgtgtgttgatttgaaaattttaagtggctagggaattatttgatttttgttcgtgtctagtggtttgttttaatgtagattagtagattgtttttccttgacctaacaatattttttgtgatgaatctgattttttttcccttttgtttctagtaatagagctaggatcttaggttgatgttaatcagatagatgagagcataatgtctgatgaggctggagaaatgctagtggtttatgatgatccttcggaccatcgctcattatcactggatgatacaagcagcactgcagaatcacttgatgagaccagactttcattagaaaccacaaatgacacggttccgtatattgggcaaagattctctactcatgatgcagcttatgaattctatagtgaatttgcaaaacgatgtggattctcgatacgtcgccaccgtactgaaggaaaagatggggttggcaaaggacttacaagacgttactttgtttgccaccgtgctggcaatacccctatcaaagcctccaatgaaagcaaacctcaaagaaatagaaaatcctctcgatgtggatgtcaggcctacatgcgtattagcaaggcaacagaattaggagggctagaatggcgtgtcacaggttttgcgaaccatcataaccatgaattattagagccaaaccaagttcgttttcttccagcatacagaaccatttcagagtcagataagagccgaatccttatgtttgccaaaactggaatttcagtgcagcaaatgatgaggctcatggagcttgagaaatgtgtggaaccgggatatctgccattcactgagaaggatgtgagaaatttactgcagtcatttaggaagctagaccatgaagaagagagcatagacttattaagaatgtgcagaaatataaaggagaaagaccccaacttcaaatttgaatacactcttgattccaacaaccgactagagaacattgcttggtcatacgcatcatcaatccaggcatatgatattttcggtgatgcagtggtttttgacacgagccatcgattgactgtatttgacatgccacttggtatatgggttggtatgaataattatgggatgccttgcttctttggctgtgtgctgctaagagaagaaagcttgggatctttttcatgggcattgaaggtaatagagttacagtgtattatatttttggtttaattttctgaccatttatcatgtcatgcacatatagttgtgcatttggttttgttatatcaattaattctttctttatgtgacataactggagctagtgaagaatgaatgaaaaaccattatttatgaatttgaatagctacgatgaggggatggaagaggtctttagtgtgactggtgactgtcaaggtttcagctatgctcaaatcgcagtgggctgaatgtcccaagtttgaatgatttatttgatgtatatcatttgtcaaaagtataaaataatttaaggggttaaatgtattttaatttgcacctttgaaatggtagggcacttgttcctttcttctttccgcggttagtttgtatgaatccttggcctttgtctcataccaatagccaaatatgcatcactgattacttgtatattgttactgtgttcactgctacagtctccttgaacaacaagaaatttaagtttgatggaaaaactccttttgaggttgatcaatatctaagacatgaaatgaatgccactcacacaaaaatatatatatatatatatatatgtatttatataataactttttttaaagcataatctaatagaactttgttttgtcttggttttattttttttgaaaaaaaataaaaaacaaacttgtagtaaaatacaaggatggtgactggaaaacaatcactaaacgagcacatgttacatgcccgttttcatttctttttttttttaagaacagttttgattatttagttttacattgatttactcttttcattgctattttggttggaaggtgttcttagggttcatgagcggaaaggcacctcagacgatactcactgaccaaaatatgtgtctcaaagaagcaataagcatggaaatgccaaccaccaaacatgcactttgcatatggatgatcgtggcaaaattcccttcctggttcaatgcagtattgggggaacgttacaatgaatggaagggtgagttttatcgactctacaatttggagtcaatagaggattttgaactaggttggagggaaatggtgaactcttttgggcttcatagtaacaggcatatcattaacttatatggcttacgctcactttgggcattacctttcttgagaagccatttttttgctgggttgactacaatcgggcagtcaaagtcagttaatgctttcatacaacgattcttgagtgcacagaccaggcttgcccactttgtcgaacaagtatgttgttaccattgctatttcttcttcttctactaattattattagggacatttgtgacataactatccaatgttttgagtctgtaactggcaggggcccattgattccttttagtggcgaaataattttcctaaaagtgtaatttcatccaatttcgtcccaataggttctgttcgtgagtttgcgcacatgtaaggacatgattaatacttatttaatcgtgtattaataaataagtatgaatcatgttcttacatgtgtcttaacaaactcgcaaagaaacctattaggacaaaattagacggaattacacttttaataacattgggtagttttactgctaaaaaaaccaatggatccctaccgggttacaaacccaaaacattgggtagttatcccacaaatctcccttattattattattagttagttattctgccatgtcacaactcttgtcttgcttggataattttctaaatttactttgggtagttttattagcacactctttttttcatatctcacctctttctaattaattagttatttccaaatatagcattgtgtgaattgacataaacatccttatataattttaaaccataaactatatttcttagtacaccccattctaacacgttttgtatggacactaaaagaaagaattattagtttaagcaataatattgtacaaaagataaacataagtaaacaaaatacaactagaaaattgttagagaagtaattttgtagttaatataagaccaacgttcataaggatatccatatgaagacttagtttttccaatatggttttcaagtatttatcatggagggctcagatgaatggaaagatgtttgagaattctagctgccctagggttattagctccatgaaatttcctactgtcctgatttataaaattttgtgaatttttctctaatatgaattagaaaagggaacatgctacaaaatgatatatatatatttcttttcctgacctgtagtttatgaactttggtagaaaccccttgtgtttgatattttcttacatttgtgggctatgttatttgtgtttaatactttcttacgtgatgccttgtaggctacgttacttatcattctaaaagaaaaattcaacaccccatatctgctaatcttggacagaatgggatgaaaatagtaaaaattaagattagtaaaggccaaattaaggctaatatcttcttttcttattgttgagtgggatacatggataactttctggacagtgttatacagtttttaacattaaggacaataatataaggcatactctttctcaacatggataactatgtgagtgacatttgtggttgtacagtgaaagtttttgagctagatttagtcacatatatacaattgttttataatacagcaccctttttatttgtcactaagtaatacagtcattaaacaatcctgaggataaataaaaataggaaaaccaggaaacttgaaatgggataaaaatattaccatagcaaaccaggaaaaccaggaaacatgaataagaggttcggttcaaaattttctttttgcaactcgtttctgcatgtaagatttaaagttctgttacgttatatgaactttcaaaccatgaattgcgaaagaaatatgcaatagtagtcaagctttccaaaaatcctgctgtcttctaaaatgtagatgtttagatttggaattatattatacgaagaaaaaattaggctgcaattaaataccatgaagtcttaaaagagatttaacgcataatgttgacagggaaaaagttatttatttattttttttcaagaaatgtagggaatgatatatttataatgaaaagcaatgacaaaaaaatggcaaggcatagccttttaaatataatgacaaccaaccaagtatcacaatggccaatgaaggctgaaataactaatttttgggatctttagtatcaatcttcccaagagcaacccaaatttaatccatccttaaagaatatcatataaagcttccattgtgccttaccagccacagaaacatcaacacaacgaataatacaaacacgccgaagtttttttcaagttctttaggtacttggggttttgggctttctttttactatggcagtgtctaaacctgtaatttgaaagaaaaaggaacttcttagtttttaccaattatgttgattggctctgagacttgtaacaggctaaattgctgtaaattttgtctatgtaattatttatataatttcacaatgatttttcatgggcatgtggaaattttgaatcacatgagttttgtgaatatattgctaatattggggatattttttgtatcatggagagagtttgattaaagaaaatggactgagttcatggatggaacatgcatataatagtcaataggatctggagggtgtcaaaagttttatggtgaacaattttcctgatattttcttgcattgaacaagcaggctgctgctgctgtggatttcaaagatcaagctggagaacaacaaacaatgcaacagaatctccataatatatgtctgaaaacaggagcacctatggagtctcatgctgcttcaatcctaactcctcatgccttttctaagctccaagaacaacttgttttggctgcccactatgcgtcttttcagatggaagatggctttcttgttagacatcatacaaaagctgatggaggacgcaaagtttattgggttccccgggaaggcatcataagttgcaggtgccatcattttgagttttctggaattctttgtcgacacgctcttcgagttctctcaaccggaaattgctttcagattcctgatagatatcttccggaccggtggcgccggatcagtacaccattaaaacttattcagaatgctccaagtgaccacggggaaaaagttcagtttttgcaaagtttggtatctactcttgtaacagaatcagccaagtctaaggagagattagacatggcaactgaacaagtgtcgattctcttgtctcaggtaagagaacagccagtttcattgcaaactacaagagagataccatcattccataggaatatttgatgtgatacgatatatatttcaagcaactagaatagtcacatatataattttttcttttgttgaaattagatcatgctatgatctggtaaaggaagcaactagaataggaacatgctaatgggacagaaaatgtgttagttctgggagctggcatgtggactgaagtttttgcatggcatttttgtagtttatatatgagaaaattcctagtctttttttttatccgataacataacatttaacttgtcatattcttatagttataggagattgctttaatgagaaattatacgaaagaaaatatagaaaggaaaggtttgtatgtactatgtatgtatatacgtctgtttttgttccttctttttttttaagtaaaaaaaaaataaaaaattctaaacagtttgttcatgtacccttagaataattaatagttgattaattacttaaaaatgttcttaaaacaaaaaatgatttcaatgaattttaaaataaataatttaatacaaattatttgttagctatatatttgtacataacatttttttttttttgtacttggctatttagttaccataagtctaatttttcatttgtatagtttcctaagatagattcttaatttggtatatgtttgtacattacttttcaatgaaagtttaaatatcgttcttctcaatatatcattattctcatctcacataacatgtatcaaaagcaacccttgaaggttttgaaattagagttttgttacaatctttggtttgttttgggtttctgccatagtgtttggggtaaaaaattcatggattaatacttgtcaaatttggaagtgaatattcttcggttcactttgaatccctccaaatattttgctagcactttctttgtttcttccttcgactatctctgttttgattgacgggagccttgggggtttttcatgcaaaaaaattttcagtgctcaagtcagtatagattctggcttagagagataaaatataagaaatctagaatttgaattgagagagataaaatataagaaatctagaatttgaattgagagagagagttcagttgattcaatgaataaccaattgatcaatcaactctttgagcaattaatccttttgaattgagagagagagttcagttgattcaatgaataaccaattgatcaatcaactctttgagcaattaatctttttcccataatatttcacgctctttatagtagagttttgttaaaggcagaaaaacgactgagctcgctaaatgtagttgacttagcaataatttgaattttggacccctaactttgcgcttatgccctaactgacttggatgcgtgaatggatgacatcaacatcacacatttttcgttttagaagattgatgatgttagtggaaatagatttccttattctgtcatgaccaggaaaacttagtatgagccaactctcctaggcgtacacggttgggctgtggtatttcgttgttaggctttgggccttttttatttagtaaggcagagttgacttgtctgattggggtggaagctaaagagccaaggacaaatattttatgccacgtgtcagcaccctataatcttgataatggtaaccgtcattcttttgcatgtttgccactcatgtgcattttgagcacgattatcgggatcgagaggaatgtgattaggcatgccatacatgttgagatttttcttttgatatcacgtttttagttaccttatttatattttgaggaaacatcaactttctgtttactgttaggaaaatttctatttcttgcttttcttccctttcttcctaaaatttcaagttgctatttttttctttcatttgcaaaggctccagacatgtttgcatcagcgagtcttgaggaatttaagcgagctcgactggagggtcacaaaccgttgtgccccaaatgagattatactcaaccctcatcacattgaatttatgagtttttttgattcaccccatagtgattcttgtcgccttcatcagtaatgtgcatatcgaccaactcactttcaattctatttgtgccattgttggaaccttcatcatgggagcctaaaagggctgtcaatatcttccatggacatattctcgtactttaggaagaatgtaaataatataagtgctagtcattcttggcactcatataatacttctaacaagcatgacttgaacataattgatggcttcaacaaaatgcaatagcaatgtggactcatcactttaaagtgaggggaactggtacctaagtcgccttcccaaggatttgttcccttgtctaacaaactttttctcaacgtaagtagttcttgaatatttcttgtagtgtttatcaaatttataacaatactcattctttgattattgcattggacatcgtcttgcctaatgtcaagcaacttgatgatcaccttcaacatcacatagtcagtagccttatttctaagaacaaagaggactcttggctatgtgtagtgttaacctgaaaacttttcttggtgatgtggacattaatgtttgacacatggcaataaagataacatctcaaagttgagtagtcccgagtcacagcggtcgacttgggaggggtccctagccctatgcctaagttgactctaggaactctatgatgggtgttcggattccgataagttgattctaactcattatctttcagtattatgtatcatgaagacataaaatatccaaaaccaggtcccgggagctgaaaatacacgaattagcacctcaaaaaccagtgcccaagttgacaaccccagctagggtttcagtttttggatcgtcctaatgaaaatgggtcaaactttgcattgagacatgagatagacatactgcgaacatatttgaggcatcataattaggttcaaagaactttcatttttgagcactcagagcatccgctgcccgggcacctagcgcccaagttgacaatctgtcaacctaggccacttccaagcatcatatcaaaaatatgactcatgcatcttcttcgtcatcataaaaaatgggaaaacaagtgatttcaaggaagaaacaacccaacatgggtgccacaataagggaccagcgcccatgttgacacctggagctggtccagcgcccacattgacattttgtcaatttgggccgattctgaggagtttttctaaaatttatttcagacatattctcagttttcatctcggttttcatcaaagattaagattcaaatatttccgaggaccaaacggaacttccaggtggcgtaaaattggacccagctccaaggttgacatattgtcaacctgggttgtttccaatcagttttccgaaaaagtgttccagacatttttccatcattataaataatgaaaatacaagtgaactaagaaaaaattaaaaattataggggcttcaaaactgagcccagcgcccaggttgacctggtgccgggcccaacgcataagttgacaatcaacctggtgcactagtttcgatcattcaaatgttaattctactcggagcgttctctctaaaatggtcaaaaacggggtaaaagaccttgtcctcaagttccataaccttggaagtatcaaaacgacatcctggaagctccaaaataagcacctaacacttaggttgacatgtggcttagtgcgttggattctgcttattcgattatgattccatctcaactgttcatctagtttttcatagtaattaagagatatgaagtcataagagtcaaattcacaactccatattttctcttttctaacaaggtgatttacttgaaaactgggtagtttcgagtctcccatttttgtagaacaagaacacctctgaaaattggtgaccaccttcgccagaacatacaaatggactaagtaatgtcaaaatatccgttaggcatcaaaaaatacatcccccgcgtgttttcccactcacccaccgtccaagttgacatcacatgtcaacctgggcgttgggcccagaataggcttcagtaaaatggacataactcactcaaaattgatatgattgacacgattcaacttgcattttgaagctatttcaatgatctatcaagtcatgtatcacacttcaatctcaattctaaagttatcaactccaaatttcaccccaagggagttacgaatttaagctacaacttacccaaagcaggtcctgcagacgcgactcaagcttcaaaaattgacgattgacctctggagttaattttatcgttagatcatcatctacgatcaaaaatatcctaaatgtatttttccatattttttgattattctattgtcatttttataggacctcttttcttataaaaggagagctccacaagctcatttttaggttcagaaaattagccataaggtcaaatcatccctctctaggaattagagtatccagacttagccacttttctgtaatccatctcatatgaaagaaaacttgaagtagatgtagctccattactttcgcaatatagggagtgaactactataaatctttgtgtctatcatatatatacttaacttataattcattctcgccaatctagcgagcgagtgtggcccagagatctgtctcctaatttctgcgttaacattttgctgctttcattgagagccacaacttaaggaatcacttagaagatggttgtaatacgctcctcaagtgttgaaagaagatccacaacaaatggctagtagactaggcgcacgccagttactgaagttggtgatgggactacacctgcatctcagatgctaggtggaggcctcgaaaccaactctatagctcatccccaaggcactaactgctcctggtattaaaaccaacgattagattccacctggggaaccacgtgtgaaactagaagaccccaaggaggtcgatcctcaggttgaatagcttagacaaattgtggctaattcacaacaacttcgagactctctcaacaagaacacgaacagttccagaactggttcgtagagaattcgcacaacatcgaaagctaatgagttaagcaggagcaacaaagagctaacctgtctcaataaatcagagaagcttattgctttagttgcgagactaccccccgtaggggtcttttcaatttggtatgagagatttcccgttgtccaactggccatgtgggaactagtactcaaggggaaacccttaatgcaggtaaaacttctacaacacctcgtaaccgtgcaagtactaagcaaacaaaaggtgttgaggctccccagagggaagaaaaccttgggaaagagtctgaaaggactcaagctc

SEQ ID NO: 110648 - DNA, 3669 bp, Cannabis sativa
gatcaaacaatacacaaggaagatggatattgtgactttagacattttgaaaagtcaaaaacaaaaaaataatattatgcctttctcttctaacatgagtgaaatttcaatggagattctctttatcctatatatattaagtaagattatttgatttttctcttgatggacatatatatttgaagttgactttttgtagaattatgtacatggagagagagaatgtctccattttcatcatcttttcttaaagtttaatttatcttgtgatttaatatgaataagatattaagatgtatatagtggtgaatcgagaaaatatatggattttgaggatttgtacatcttcaattctggttaacaaagtaagcttggaagctctattattctcttttgtttctaggagagttgtagttttaaaaggtagaaataaattttttggttttgtttatttttttttttaaaaaaaatcttttgtgtgaaataacattttatgggaaaaataatcgtacgatgtatggactttgtagagagtgggtgctagcagagatattaatatttttattttgaagatttttggattcctttgtcggctacctctaaggttctttctctgaatctccaactccttagtgttggtagtgtgatgtctcagttgcgttttaaactgggtggttgggatgaggaattgatctatgggttgtttgctccagatgaagtggttgccatctacttggccctcgttttctacttgtgataagttgatttggagtcatgataattcaagcttgtattcgattaaaaagggttattggttcactattggtgagctaggtttaggcaaagcttcttcttctattggtttttcaggttgatggaagaagttgtcgagtcttaatgttcctccaaaagttaaaatgtttgttcggaaaaattctcataggttgattcctactaaaagtaatttgatcaagcatggactacttaaagatggagtgtgtcctttatgtgatagttattaggaaacaacacaccatgcattgtggggatgcccttctcttctccttctcacaaattctgtgagttccaacttggtgatcttttggctacttgctctgattttttttagttttactttatcttaaccttttacttaattctcaagtaaagcttattttagttattttctaaagaatttagtattagatgaataaaatggtgcataaaaatcagttgatgtctcttcaggttgtggttatttaggtttgaaatttttaaggcgattatcgaagattttggatcaaagtatcgtggatagatatagaaaagcatggagacagtcagcattagcttctccttccttgactgatcgttgttgggtgcctcctccagtggattttgctaaggtcaatgttgatgccagcttagatattgatggtggtttctgtggcatgggcatggtgatttgtgataatcagggtttagtcgttgcttttgatatttggtattcgatggaatattttctttcagagattgcagaagcattggccttacgtaatgttggaattcaatgtcgtcttcttggtttggataaagttcagtttgagtcaaactgcattaatgtgacgaaaaagattaacaatcaagtctccttggatacgtccttaggcttagtttttcgagatattagttgtaattttgctagtttaaatgttgctagtctttctcattgtcctagatccattaatgaggttgttcatactcttggtaagtttgctttgtcagttgatagcaagatataaaacctgattatcttgattgtatttaagacactattatgcgtgaggccatttaattaataatatgaccttgccctttttctattttttatagctcttgaaggaagtgttcatattttcttcttacaagttctaaaaaattaagccaataacaaataaataataaaacttatcataaaaaaagtgttttaagcatttatagtatgattcttaaaaaaataacaaaataaataagacatttatattatgtttttttttttgtaagaggactagtataattttcttttttaaaatgttctagtacaactttatctctagaagaacttttaatccatttttttaataattgcacatattttacttatttaagactaaatgtacagtttttaaaattttaaaataattcatagtgtctaaaataaagtttaaataattatttttcataagtataagaaaaattatcaagtgtgcacaaaatatttaacattgtaaacttttaagaattcattaaaaacttataagtggtcctaaattattataagaaaatttttaaaaatactttttttatattttatttacatttttatgactttacacttttgaagttttgaattaacaagaatacactttgcttaacaaaaaataaaaaaattaataaaaaaattaataagaaatcaacttcacgacaacggtaaatttataaataaactataaaacaatcaaaaaaataaacttatgacaactatatataactataaataaattataacacaattaaacaaacggtttattatttttactaaaatatatttttgtaaaaaaaaaaatggtgttaaaatattttttttttgtaatttttagcttattttgtaaattttgcttattataacacacacaatcacaaaaataaaaataaaaaataaaagctaattcttttctcctaatgcttcacatagttaaaagatgtaccaaaaatatcatttttattggtgggaaatgctaaaaagtattaatagtacatattactatatatatgttaaaatttaagaaatacaatttaatatatcaaacaatttagtatatatcaaagttgaaagtgtatgatttagtatttgtcaaaattcaaaaattactgtttaacacgaaaataatcgtcacattaataaaattaaacaaattgaacaaaaatcccttaattcaaccatatcaacaatttaaaataaaaattaatagtctaaaatttcaaaaatattatttagattaaggaaaaaaattcttaattaatctttaaacatagttaattattcacaaagtatggtgcttttaaaaacaatagtctttatagtcctgcagaattaacctatggtatcattgtgttttttttttttttggagaacatatcattgtgctttgattgaaagatattttaactttcttgttggatgtattatacgattttttttatattctctatcatataaaaaaaattattacactccacacattttttatgattttattttctttttgagatatcatctcaggaaattaaattacataaatttttaaagagattatttcacaaatacatacaaacaacaaaaaaattataaaaatatagtttcataaaattttaaatacttttacggtgttgttgtaattttattaatttgttattaatattttattatttatatattattttttttatgttatttaaatgtcatttttatataattgtatttattgttatcgtgtttttttttttataaaaaaccataaaaatatataaaaaaaaaatctataaacataaaaatgtaattttctttttacaaaaaatagtatcttatgtatttattctatttttaaa

SEQ ID NO: 110649 - DNA, 1649 bp, Cannabis sativa
tttttttttttttttagaaaacttcaataagtaaacaagtaaaaaattaagtagcaaaagtataaatgtaaaactttctttgtcaaaatataaagggtaaataccattttagaccatgtgttttgcataagttaccaattggaccctctattttgttaaatgacaaaattgaccatatattttctaaaatggtaaaaataggaccttgagctcacactacaagaaaattattaaataccaacagaattaataccggcggagccaaactgccggtattaattcggttatttgccagcggaaaaggtaatccgcccgtattacttcaaaaaaaaattttttaaaaattaatatttcataaattatattaataccggcggatatgaagtattaccggcggaataaccgcctctaataccttcggcaggaattcgatcacccaaaattaaaaagactaatattggcggattattagaggcggaatccgccagtattagtaagggattctgcccgtgttttattaccgacggaactccaattaatatcggcggatcccgccgttaataaaacactataaaggccccccttcactctgaaaacatttttcatttccccaatttttttccccatccgatcacctcccatccccatcgtctctttctcttctactcctctatctccagccatttcaccatatatttttagcattgcactactgtcaacctctattccaccaccattgcatacaacaggtaatgttttctttaatataattctttttgttattttttcctctgttttaatttttttttgttcttggtttaagtattgggtgcaatacaccggctgcgacactaccgagaatttagaacgctgaaggaggaaccaaaacttctaccaaacattaagaggttggttttttcagttttattaattttgttttgtctttagaaattttttgtaattggtatattaatttgtatatatgtgtgtatggttaacagtgtaagttataagtgtataattttatttatatatatattataagtatatatatgtgttgtatatttatatataatatatatacaatatatataatgtactatatgtctgaatatgtgaaagttttgattttaatattttatttgtagtaatatatatatatattatgtaatagtatttataatttatagggttaattatttaattttgttaaaaaatattatgttattaatttcttaaatttttttacaataggtacaaaattataaaattgttatataattgattatttaattatttttaaaaaatttagtaaaaaaattagaataaaattatattaagttttgaaaaaaattaattataattaaaatattttttaacaataattatataaatgtaaatacatttaaatgatttttatctatataaaaaataataataaaaaaaagtattttcatgtaaataattaattttagaatctaaactataattcttttaataataaatatttaagttaggaaaaaaatttataaaataattacttaataattaaatataaaagaattaattaaataataaaattataatttataaataattgaaaattgaatattaacaataataatttaatttttttgaataaaaaaatt

SEQ ID NO: 110650 - DNA, 6121 bp, Cannabis sativa
  modified_base (56)..(79): a, c, t, g, unknown or other
  modified_base (218)..(223): a, c, t, g, unknown or other
actgatagcgggatcatgtgtatgtcgtatccacgtaagttgatccctgagttatnnnnnnnnnnnnnnnnnnnnnnnntgcgaaagctgaattcgctaagtactgagtgctctgtacggattgctggatatctgatcctggatgtgccagcgagacatcctgctcggtctattcttcccgagcagatgctccaagcggactccacgtgtcaccattnnnnnnatgccacgtcagagtgcaaaatttggaacaacacatataaatgatcacatgaaccaaatgatatactaaataagtaatgaaaatatttctgtttctttattgataattgaaaaagattacattgaaatagaattttatttataacacaaaacccaacacatagggtcggtcggccagcctccttgaggtggctggtttgtcatttatcgtctcacttgaatgctcggtctcctcgttggttgaagtgttgagtagatgacttggtctttttgttggcgagttgtaatgtcacgtggcactgatattggccatgtagacatgccacgtcagtgccaaaaatcaggataacaaaactcacttgcccaaatccttatgatcttattaattctttaaaataatataagtaaaaagggtcgaatcgtgtttttatttgcttaaattattatatattatttattatttattattctcatttttacttgactgagaattgttagtgagtattaaaggtagttcacattgctaacgtgtggaaataaattgtgatatataagatgaagggagtattcctcccattgtcaattaattttaagaagcaatctcattcatcttattcaatggtattaaagccaccagatacttcctgtctcccattgtcaattgataactaggctttttaccgaaaagaggaataagcgttttcaatttctttgaattcacataagtaattggaaaataaatttagatagagggcttaaaaactgtttgaagtggagaaaatctgtacgcgtttcgagaatgaggatcccaacaaatcctgaaactcactattgagctagaatcttcttcgatgctttaagacacgtccttccctgaaactacctctatctctcgttcctctctttctctctctagagagacccttctttgttctctgtgatattcttttcaggtaagcttaaaagttgtctgaaagcaactcttttttatttatttttttcccttgcaatttatatttatataattactttagctccaagtttctctcattattgaaaataatttaaaatgatcttcaaaccgtggaatttggttttaatgctattgtttcggccaacgagttatcgacttatcagaaaggttctcgaggttttttaatttttattatctggtcaatacacagaggtatacatggtgtttccgattttgttttggaattttcggaatctccggttagttcatttgtggatggcaattacttttaccttttattttctcagtgatttatcgatttttcaaatatgcaggtttgaccgtatttggatatcgccctcgattacccgagattgaaatttttcatatccagaagggattgattttcccctttctttcttaggtttaatttctatactcttgtggtggtagtgctttttcgagttgtttttcaattgggatttctggaaactactacagggttataatcggtttggactggttgaatttgatggttcttctttgtttgaatattcataggttttggatatgttttctcatttgggtctctttatagaaactgatttgagtaattttggcttgtaccgggattttcatgctttatacggttctactaataagtgatttatgtatgtttcagttctgggttttagaatttgtaattttaggtcagtggtattaagaaaattaaagaagagaagacgctattatttgtgaattgggatggatgaatctcagggcggctcgaattcactgcctcctttccttgcaaaaacctatgaaatggtagaagacccttcaacagatacagtcgtgtcatggagttcttctaataagagcttcattgtgtggaatccgctggagtttgcaagagatttgctgcctagattctttaagcacagtaacttttcaagcttcatcagacagctgaacacatatgtgagtcaagttgtttctttgcacatgtgtttgctcgtacatgttagttgaaatgtttattttgctttcttgttattagattaaaatgttctgaaatcttagtaccaccaacagggttttagaaaagttgatccagagcaatgggaattctcaaatgatgatttcttaagaggtcagccacaacttcttaaaaatatccacagaaggaagccagttcacagccattctttgcagaatcttcaaggtcagggaactccacaattggctgaatctgaaagacagagtcttaaagatgagattgagaggcttcaacatgacttacaggagcttgccgtggagtctcagaggtatgagaatgagcggcgggcattggaaatacaaaagtgcggtttaaaagaacagtttcacaaaagcgaacagcaacaacaaggcattgtttctctgttatctcaggttttacagaaacgagggtttgccgtcaatttttcacaattggaggccaatgtgagaaagagaagattaccgaaaattggcacaaaagataactcaacggggagtcctgaattgttacgtatagataatgttggtaattcagttttgaacttaattgtggacaaggtagagcagttggaggcatccctgttattctgggaagatattgttcatgatttttcgaatgttcatttgcaaagtagttcaaacattgagttggatgaatctactggttgtgccgaaagtccatctatttcctgtgtacagcttaatattgacatcagatcgaagtcccctgggattgatgtgaactctgatcctgctccaattgttacttcagagccttttgtcgcaaaagaacaatctgtaaaggaaccagagaatgcggctaccactactgctactgtgcggactggggccaacgatgtattctgggaacagttcttgactgagaatcctggttcttcagacactcaggaagttcagtcagaaaggaaggattctgatgagagaaggaatgagaacaatcctggtgatcggggcaagttttggtggagcatgaggaatgtaaataatctcacagaacagatgggacatcttacaccagcagagaaaacttgagaacggttatggcatattaaaattttgatcccctactaggtctcctctcataaatttaggtatggaagtattaatcttagaaaattagacaactgtttgtttgatctccattttccttaatcaccttcattcaccctttctctcttttttctttttcattccccacaaaataccttatattcgaatagaatatctgtcttattttcatgggaacaacttttcccttgctggttttctctatgtgaaagcctattattgttcatgtgctaactatctattttctagtatgacttaattgtagtcatctcgtgacaacatatactaatttttttttttttgaattctatgtcttaatgggattcctcatatcccttcttgcctactatcatattcaccagtttccaagctcaacaagtcatattcctcctacttttctatacctttcccttagagcttgtcgatgttgacttattccttccatttcagtgatgaagaaggtttattcaccagtgcgatgctttggtactttgagggttcgtttggtatgcagtgttagatactattttcttgcatattattatattaaattgtgtttgtcatattttgtgtaatactatgttaaatttttgtttatttcaaaataatgtacttataaatgctcatataagtcaatactaaacatacaatataaaaatatgatatatatattacaatttaatttaatactatacaatgcaatataacataatacagtgtaccagagggaccttcaaatgtcatagttacagtatgagcaacgtttgtagttattatcttatgatcaagaagactttagattagctttgttttcttcacttggatgtggtgtttatcatttaatttgaagatgtggacatgcgaatatataatttctatgcatagccaactttcttgattaacaggcacaaatggctgtacaaaatttatataaataactgattaaatctttcaggaatagtttatactagtgtttaatttgaactaacatttagacaggatagagcatgtatatctggcatgttagattattattattaatgaatttgttgaatttctgcagtctttgaaacgtgctaatataggtagccaatgcttttcttttgctgatatatgggatttgtcactttaatcagacaataaagcatataccttttacctgttacactgaccaatatgaaaatttgtgtacagcatcagaagggaacatttgtttcctatccacatggagctctgcgtgaagattttctctgacttctatgagaacttatgcttgttggtactgaatgagtaagtaattttgtttatcctttttcatgttcttctatttcattcttaatattcaatgtcaattagaatgttcaatatgttcaaaatttttgtaagtgtttcggaaagcttatcttgaaattatacctaatgttattgttgataataatcatgttgttgagaatatgctttaactatcatttgcattttctgaaaattgcccaacttttgattctgataagcaagcatgctcacttaatttttctcgtcatattatagttgtatactatttgcctaatttttcttattagtaagtattagactagcttagcttctgataaatgagagctgtatgacgacgtgggtaaataattaggtgatgttatagcttttcctactttgataggtgccaaatgggattaatatgagtaatttatgtggacaactaagtggtcccatttcaaatgctatgctaaaaagctcaattcataataatagtgaagcgtttgcaatctttaccagttacctttttggtctacatttatggccataatatgcctgcctgccattgctgtggcacaaccaattttgtgttttgtagagctgatacaaagtctgacatgttaaatttctgacggacacaaaattgatcatttttttaacaataaaatcaagaagctataatgctagtgtgtaatgttatttatagccgtgtaatgctctctttaggtaaaaggtgtggagcaactttgtcttggtgatgtgttgaaagttgggaactcgttgcatctagtggaaaagttgcggatttacctttcatgctattttatgagtgtatatctgttaaaattatcgtgaaatattaaagacaacagcttgaatttacattgagaataggattaaaaaaaaaaaagaaacatttgggcttgttgtctcctagtggattgaaagcttttgtttttacattcaaaattcttgtcatctatttctcaatatatatatattgatatcttgtaacataagatactgcaaagtgttgtagcaaaaaaaaaaaaaaggcactgttaaggttaacatccaatttctttttattattaattttttctttctttaactcaaaacatttacaattacttctaccttgatcggctaaaacggatattaaagtagttttgtttgatgagtctttttaatccaatttgtttaactaaattcagaattaaactctaacatgaaaagtctgcaaaattgcaaaactcggaagtcttaaactaaagtttccaattcgaatgaactacacaaataatattacaattgattttgttttccaaataagacaattgattttgctgagcgatttccttacacagaaaattttgattgaaaaataaaaaaaaaaaatcaagaaagcaaacgcatgttaaatatatttatatatactagcaaaaaactacgtgcgaggcacgtatattaaattttatgttaggttttttctatgttatttgaaagtgagattattattgaata

SEQ ID NO: 110651 - DNA, 2494 bp, Cannabis sativa
aaaaaaaaaaaaaaacaaaatccacttctacacatgcaaattctttaactttttgttagttaaataaaaaaaaattcctataccagtgaattcttttccttaaaaaataataggcaatttcattttattatattaatatattaatggccaaaacaacttatttttagcttttaaaattaaaataacttatgtaatttctaatttaatcacattttttatgatattcaaacagctcgaaaagtacaatatttcgttaagtacttatcttaataaaaaataattttctaaatagtaaaaaataagtaaaaaattatatgtgtacttattttatacttggcaaaagtataagtttagaaaaaaaaaatgacaatagttttatatcgacctgggctgaaatattcgattattcagctgaaaaaggaaaatgggaacacacctaaattaaataaaaatctaaaaataattaagagattaaatataagataattaggtcggggaggtctataaaaggagtaccctatcttgtatgaatgcatacaattttctctttaaccaaacaacaatagaaaacgactttcttaattttgaaacaaaactcacatgctcttaattaatctttctccttctctatctttttcacacacactctgaattctttcgccattaacacaccacaccatttcaaaaaccctaaacctcttctcagcttacaaattttatatgctagctttactttttgagagccattgattattaataggaccattttcaaaatatacaagcatctggaatctggatatatatatttatatacatgcttttctcttatataaaacactcgtatatatatactctaaatggatatgaactctagcgaaatttgtaatatcaagtctgagaaaaagaatgctatgagaaactactatcgccagaggaaattcaagtggattttcgaggcctgcgccgccctactcgccctcatgcaatcatcaacttggcttccagtcgccgttgattttaccggccgttttcttcgggagatcatctccgtcttcaaaagccatctcttcatctttttcctcctcaacgctatacttctcgccgtttacgttctctccggccgcatcacctggactgttgacgccggatcgggtgccaacatgtacgaagaattcgtcaccaacagcgagttgacccggagaatccctggtggagaagaagaagaagaagaagaacaagaagcttctcctccggcgccggaacgtactatccgcgtcgtcgaagaagaaaagtatcgctcagaaaatgtcgcttcgacggccacttcggtttgtggtgtgggtaaccgaaacgactcaaaaccaaatggctcggttcaaggtcttgcggaagaagagaaggcgttagtggttgtgaagaagaagagttacaaaaggactcagtcggctagagtcgaagggaggaaggtaatcggtcatcatcagtctcagtctcagagagagttccgacggtcttgtacggacatttgcaggaaaataacgtgttccgtggagaaagaagctgctgaatcaagcgaggtgagtcggttgagcaatgaagagtttaatcagaccattgatgcattcattgctactcaaaagtggattcaaagggaggaatacatggaagagcggaaaacagagcactacatggctttggccatttgccagtgaagaaaaatgaactatcatgcagtggagtcaataggaccaaatgcttaattagctttgtttaatttagtctacttatattataattaactaggaagcatcagataatcccatctgtattatctgattaatcatatatatcttatcactatataaatatatatatgattatacagatggataatgtataggaatcaaatagcctttttaattttctttttccttatgtatgtttttatatttccttttggttctagttgacttgatgagcttttaactggtaatcaagataatgaatttccatattattattataatttctcgaaagagctaaatgccatattaattaaattaaattaaattaattggtagagtagagcagtagttgtattgggatccgttcttgttctgcatttaatatttaaaagtgggtttgttttttctttacttggtagtatatgaatgagtaagaaaagtgaagactgactgatctaattcttttgattggagtatattcagtgaattgtgttggggagagagagagagagagagggcgtctctgtaaaagtgatgacattccaatttcaggtctttcaatgcctaattgttctgtgtgtagtacattgtgtattacccatgattttcaaattagccaaagaggagtaaaggtgcttctccctgttctttttttttttttttgaaaaacactattattattattgaatagaatccataacaataacagagtggattggagaaggtatttctgttggaaattattttac

SEQ ID NO: 110652 - DNA, 11702 bp, Cannabis sativa
  modified_base (6803)..(6804): a, c, t, g, unknown or other
  modified_base (11645)..(11648): a, c, t, g, unknown or other
tgtattccaaaatataatgttgtaattattaattatacaatacattctatgctccaaacatgataatttactaatttaatacaatacagaaaaatgcggagtaccgaacaaaacttttaaagattgaatttgcattattagctataaataaatataaattgttaataattagtaatttttctgtgtaattgcatatagaatttaacgaaacaagcataaaacacttatgtacatatatatttgtacaaaaaaaaaaacatggtacgtaaatttataacatgttattagaatatatgatataaatatttaggaatatgagaatatgataatcaaaggagaggaggtcattttggtttctttttcgaaattatagagcatcagaggacgaactgatgaggcagtagaaatattatttatgatgttaaatataaatatattaatttataaataaatatttaaaaggtaaaatattgagggccgtccaaagtaaatcatgagctaaagaaagcaaaagagaaagggaatttgatctagacttttgaagcattgaagtacactcatcactattttaaaaagctagctaccatttttaagtgggtactctaaatcctccttagatatatataatattctatgcttttttctttatgtgtttttgggtttagtttaggtcgaacacataattagaatatgccaatgactacagcacatgttcttgcaacttacttgatatgctatatctttttatttcttctctctctttatatttatgtatatataattgataggtagggattatatcaaaaacatctctttgttttggctaattaagacaatttagctttcatggggtgtctcatatatatgggagtttcagttctttaagcactcccagcagatgctatactttatattttaattaaaataactcaccaatattttttcggaaaattactctacatactattttaatttttttttcaaatttaagtttgggtttgccccaataatttctatgtgggtttccatgtgaattttggttacgctttaagttgctccgttagttgctatagaaatttctatatgaaatttcgtaaaagtactccaaaaaaaattattttaaagtattttttcgaaaaattactctacatactattttaattttttttttcaaatttaaggtataggtttgccccaataatttctatgtgggttgctagaattttggttacgatttaagttgctctgttagttgctatataaaatttcgtaaaaatactccaaaaaaattattttaaagtataaaaatgaaaaagttacatttttcttttatttcatgacctcacacttttatattataaattatagtatatattattttattaatatcttatttacataatttaaattattattagggaaattgttccatatacaattttttaatatattttttaaaatttacagtttgagttgcttcggtggtttctccgacgacttctatttaagttgctatgtgaattttagttgcgatttaggttgctccgttagttgctatgaaagtttctatgtcgaattccgtaaaaatacaaaaaaaaaatcgttttgaagtgtaaaaattaaaaagcccttaaatattatatcttaatgcaattaccgaatttttttctttctattcaattgacaagttgaattaagtagttcataatctggttaagacttacaaagtcaatctatgtgaaaattccctatatttctatggcaaagtttaatcacaaagaaaacattaaataaagtaactcataaatttacatccataacaatattcaaagcacatattcaaatctcattttttagaatttcgatttgaattcctgaataacaattataagtgatcacactacatgaaagaagattttttccttcgcaaattcgtgccaacaaaactaggcacaatgtgccaataaaacttgcctgcagtactaggtcggtaaaacagtgtttatcggtgcaatagccaaatgcaccgacaaaactaggttatactggtgagattatgcatcgacataaattcaaacattgatgttaatagatgactaaatttgcccattggtgggtaaaatgacttttgccaccgcagttttgtattggtaaaaagtttacgcatatattttaaatgttgagtaaaacttttatcggcacgtatattttatatcagcaggtaaaactcttaccctccaattagaatattacaggaaatagttataccgacacacttatgtataggcaaaacacttacctaccattttttcgttgatggttgggtaagttttgtaggcgcatttgtgcgccggtaaaagcttgctttgttgttgtcggtttttttaaatttgattatttattatattttaatgattaatgatagtattttaatttattttaaatattaagttatattttaaagaaacataatcaaataaaaaaaaacggtattcacatatataattaaatagaatcctaattgaactactataaaaatatgtttgagttataaagttagtaactaaacaaaagtactaaagtaaaatattaaaagaagttcaggaaaaaaaaagtcaagttcaaaagttagtaataaattatctatggtcataaagacgagtaatatcatcgtcgttgttgttctgagtcttgagatgaagtgatgatgacctaacaccaggaggagtggggaatggcagaagtggatccatagcaagcaagttaaaacaagagaacaactggagagagatagccaaatattgagtttcctgttgtgcctcttgcacctgcctttgtaaggcctcatagtgttccatagtaacagtctgtgagccagcagcagaagacgtggccggtgctcttttggccgtaattgccttcaatatcgagagatggccccctgacatgttgagatcgcttactcagtacttgcctcataataggtaggtctcgtgggtactaggtaggatctatatcatcatgagcaggctgatccttagtgggcgctgattgatttgtagccacttcaactattttctcctacaaaaatcaaataaattaaatggtcaatttgaataccaaacaaattgaaagaaatatttaacaattaataaatatcaatgtaaacttacataagcttgttgcacgtattcattgtgccaagtgatgtctttgtaataaaacttttgaaaagtgtccacaacagctggaagctcctccgtcctgggatcagcttatatttaagtaaaaataagtatgattattatttttttcaaaaaaaaaataatacttatcaatcacaaataaatataaaaagttaccccattaacaacatgtgctatattggctttaatccccatccaccttgaagttttatcttacctcgactttatttatttcttattgatcttgcctgaaactaacatttttgtgttacaattaattatttattgttgactataatgtaaagtattactaagattgatactttcattacatatttgttctattttctgtggtctaataagcaatacaatcactctacacctcttgagttactccttctgaaggtgtcctgttcaccctctcctatccaagctcctcaatattttcaatccactttttcttacaatcggcccattagtcacacaatccttttgacattttgtacaaagcatagtctacaaaaacttgattatctcatgggcacacaaactttgtttgtaaaaaagttacacattaaaattgcattaaatataaatttaaaaataatatattaaattataaatttaagaataatataataaatatctcaagtctgacccatattgaattaattttaggtttagaaacagtttctcacgttaacttattcttggggacagtattgtagacataaatctacacatgttgttgaagtgttttctatttttttcgcatggactgcctatcgcctcatgaagtgtaatgtgtagttggataaggtgtcaactgtcttcttacccaatgatcgcctgacatgcttgaatacagaaaattatcattctagcatgtttgggatgacattattattttgttcgtgacagttgaatcgagtttccacttcctgaaagtacatagaacaaagcattaatatattgttaaccacataagatacaacaataaatccttctatatgggaacaattccaaacacattgcttatacacacacagtgactgcttgatgagatacatccacaagtagtgcactaatccacctagtatggttttgttagagagatgcatactacgtgaaccattatgtgaaagaaatctggtgggaaaatagtttttaacttgcataaaatagttagaatatttgcttgtatgttttctatgttacaaacatttagtcttctttaacatatataattgtttgaaatacacacataactcaataattgtgtccccaatttcttttttcaagtacttttggatacctgacgtcatcaaatattgtaacagcacatgaaagtcatgggatttatgtcggtataagtatacatttttttttctaagtttgcagaaaacctgtcaagaaattgtacaagcttaataaaatcttcaaattcaattctttcttgaacactaagtgtgtaacaagctggcaacttcttccatttcacattttgatcttcattcaaccagaactcatgtcgtatttgcaagttttgcaaatccattctcgctttctctgtatcttttgacttcccatcaattcttagaagagtacttagtaaaccttcaagcacatttttctcgatgtgcattacatcgagattatgttgtgagaataaattattttgatactcaagtttaaaaaatatactattttttgaccagtttagctcttaagcaaagcacttccatttgacacctctgaattgtttatgttctccaggcaaatagaatttaactcactgcaattttgctaaaatatcaaccccaatcaatactagaagtggttctctcttctcagccttctcgatcgtaattttttcttttccttctagggtcattgatttccaaaaaatgcctatggccaacatatcaaattttactgtttagggcaaaggaatgagtgtgttcattgtaagtgagacatgccatgtactctttcgtgcttcaatcagattttgagcataagcaaggaaattatttattatccacaacacagacacacacattgaaaaaaaaaaggttccattgtaggaatctcaggtttgaacacctatctcccacaattgattcaattcatcaattagcagtatcatgaacacatccatgtcttttctaggatcgatgttggaccctgaatcaataaaggcaataacaacgattctgatttcatgcacttccaaggtgttaagttatatgggacataaataactggacacaagctataggagttgctcatgttcccaaatagattaaaaccatcagtagccaaacctaacttaaaatttctaggttcaacagagaaagacgggtaaagtcggtcaaaccgcttccattgtccaacatcctcaggatgcctaagcacactatcttctttcaatctctttgagtaatgccactgcatttcctcagccaaatgtcttaaactctaaatttgttttagtctcggtgtgtgtgcgaaccacataactttgtgaggaaccattcacctttaccctttcttttcatccaacaagattcgccacatacaagacaaacatctttcttcttattctccttctaaaaaatgacccaattatagttgcacacatctattgagtcataactcaaacctagattgtgtaatctcaacttcgactcatagtggctcaatcaaggcagagagcaaaatatcgaaatattggttactccacctattcaaaactttacaatgcataagctttactagagcattgatacatgcttttttgcaatcgagaaacaactcagacttcatctccttaaacaaatcagcatacttgttgttttcattgattaggggtttattgaaagaatcagtaatgctagtagagtcgtcaaaccctagatctcttcttaacatgtctgtcaacccatgtgccatttattcttagtcatttttaggaagttgaacaccagattgagaataagactccatgtggaaaacccaagagttgtacgaaggttggatccctttgacaaacaaatgaatcctaatatttttaggtgtgtaaaaaattcatatttaaacattgcatgcatgggcatcgagataaaccagcaagatttacgtggttcctagcaattacaacaaactcgttgatgccacttcaaaactcgattgagtgttgtttcccagtcatccaacttttgtcagtcgacatcttcctctataaagtaattaacaaaaaaaaatacatcaaaaaaagtgtaagcaagggtgtttgtggtgcgagtggtgcagtttttgactattttttcaaacaaacccgcacatgcggcttttttaatttctcaaactgcacccgcaccgcgaaactaaaaaccgtggcaaccgcaccgcaaaaaatggtgcagttcggtgcggtttttgtagtttggactatcaccaaatcacaaatacaacaaagcttgagcaacacttgtcaaaaatatcataaggcttgaaaataaatatgaaaaaaaataaagttccaataacacaataatttatgggctttgggttgaacattcacatattggaccnnaataaatataaaaattagtattttcataatgtgcggtgcggtgcgggttgaaccgcatattaacaattcaaaactgcaaattacaccgcaccgcgcagcttaggaaaaattcaaaccgtgatcgcaccgcaaagaatttcaaatcgcatttttttttgcgctgcggtgtggtgggggcagtttgagcgatttgataaacgcccctaagtgtaagtgtcataatccaccttcttactctattactaaaagggtaaagaacctagtacaactatgctcttaagattgcttcatttatgtaagaattattgcagctctcataagtaagcaaactaatagtaagtttgtcaacttacgagaatgtgtaaggaggcatcctgaaatctcaactaatgaaacaatcaaataagtaatagctaaaaaaagtcctagatatttttaagaagcgtatttacgagttcttactaactcagtctcttcaaacgggtctacggtattttatggttgtgtaaaaattaaaaaaaaaattactatttgataatacaaaaacaattgtcctatcatatctttaatttataactaaaaagaacaaatgaataatttcatcttatactattttacaatgtattatgtcatttcttgtaattttatttaaattaaaatacctattttttaaaattaataaaagtacttcattaaattttaaaatacatattacatatgattaatttataatctatttcacttattattttagtttattcattatttatttaatattaaaaaattatcaatttaattaattttgaactgttaaagttaaatactattttagaccttgtattttgcaaaagttactgattggaccatctgttttgttaaataaaaatttagactctgtgttttcaaaatagcaaaaaatagaccctaagcttttttttcaaattaaaacttaataataacttggcctgaaagtatttatgataagaatgattatattttttttttttgcatctattcgtgctagaaactagttttaggttagttatattaaaataaaaaaactcgataaaaattgatctcggggtctatttggtactattttgataaaaaaacataggttttgaattgttatttattaaaacaaagagtcaaatctatacttttacaaacacaagatctaaaatggtatttgttttactaattaaaatttataattaagaataatatatatttaggctcaaattaatttgttttacttattgttaaatttaaataaataatattacaacatcatgatattttctgctaattttatttcatatattatttaatttaaaaattatttattttaaaaaatctatagtattaatttattaaattttaccaactattaatttattattatgtaattatttgtttaatattatgttaacccaaaaaaatttcctagtgacatggacatcaatgtttaacacataaaaacaaagatgacgtcacggagttgagcagacacgagtcatagcatttgacttggaaggggtccctagccctgctcccaggttgattttgagaactcagagatttaagttcagactttgataactcattaataactcattatctttcagtattctataccatgaagacatggaaaaatcaaattcaagcctcaggagctaaaattacatgaacctatacctcagaagtcaacttgggcacctagggtttcacccagcgcccaagttgacgtcctcaccagggtttcagattctggtactgtcttagggtaaattggtcaaactttacattagaaaatgaactagacataccaaggacatttgacatcaatgtttgaaacgtggcaagaaaaatgatgtcacagagttcagtagactcgattcatagcaatcgacatgagaagggtccctagccctgcgcctaagttgactttgagaactccgagatggaagtttagactttgataactcgtttctaactcactatcttttagtatactatagcatgaagacatcgtttaatcaaatccagccatcaagagctaaaattacatgaacctgcaccccgaaagtcagcctaggcacttagggtttcacccaacgccaaagttgatgtcttaactagggtttcagtttctaggatcgtcttagtgcaaatgggtcaaactttgcattgggacataaactaaaaataccatgcaaatgggtcaaactttgcattgaatcagattcagagaaaattaatttttgagcacctgaagcacctggtgcccgggcacctgtgcctaggtaaacaatttgtcaatctgggtgactttcaagtatcagattgatgttctgacttttgcatcatcttcttcttcttcataaatggggaaacaagtgctttcggggaagaaacaacaagttcgggggtgctagaattatggccaagtgccctggttgacacatgggactggcccaatgcccaagttgacatttcgtcaacctgggtaaattccaatgatgtttttcgagaactctactagaaatattctctgtttttagcaaagattaagattcaactatttctgaggaccaaacaaaacatccaaggggtcgaaactaggacaaagtgcccagattgacatatattatcaacttgggttgtttccaattaggttgtcaaaaaagtgttcttcggatttttttccatcagaaataatgaatattcaagcaaactcgggtagaaaaccacaatctcgagggcctagaaatatagctcatcgtccaagttgacttggtgcaagacccagctcctaggttgataatcaacctggtgcactggtttcgaacattcaaatgcaaaatttgatccgagcattcgctctaaaatggttaaaaacgagggatgggacctcgtcctcaagttttagaaccttgaaagtatcaaaacaacatcccaaaagccctaaaataagcacccagtgcccaagttgataaatggcctagtgcgctaggttcttcttatctgattttgatttcatctcgactgcccgtctagtttctcgcataactaagatctatgaagtcagagaagtcaaattctcatttctcatttccaacatgggaaaaccactcaaaaatgaagagttcgagtctctcatttttgcagaatagcaacatctccaagaactagtgaccagctttgtcagaacacataaacagactaagtgatgtcaaaatatcactcaggcttcaaaaagtacatccccatgatattttttcactcacccagtatccacgttgacatcatatgtcaacctaggcactcgatgtcaacttgggggttgggtccagaataacttttaggaaaatggccataactcactcaatatttatttgattgatgtgattcaacttgggttttaaagctatttcaatgctctatcaagtcatgtcccacacttcaattgcaattcagaagttatcgactctaaatttcaattcaagggagttaccaaaataaaccacaacttacccgaagtcggtcctactatcacgactgaggttccgaaaattgacaattaacctcagaagttaattttcacgttagatcatcacgtattgtcaaaaatagccaatttatatttctttattattattttattcctatttttaaggatctccttcatctataaaaggagagctcatctagctcattttttatattcagaaaactacccacaaggttagaacacttctctctagtttttctctctagaaaccagagcttaaacacttagcctttttctgtaataccatctcgtgagaaataaaaactcaaaatagacgtagctccgttattgtcgcgatacaggaagtgaactactataaattattatgtctcattatttatacttaacaaatatattttttctcaccaatctagcaaggagtgtagattagaaatttttgtctaaatttctgagtcaaaaattattttaatttagcaatgactagttacacattaactaattattaacaattatgttaaatataataaattactaattaaatataggattaactataataattttctaattaattgattttactaacaattaatttattattttggaataggttatgtttagaaaagttataaattaacttatttgttataactattagaaatttttattatcttgtaaaacttttaaattaactttaattatcaattcaaattaattaatttttttttttttgtattcctaaaattaaaattcattatttttcaatttttttcataataaactaacaatttaccaatttatattaaaaaatttaattcaacttaattttatattataattttttttctactaataaaatttcgacaatataatgactataataggacaaatttaaaatttttaaaacttataaatagcaacgaaataatacaaaacaaatgcatgcattattatttagatcactatctcaccgcagtatatatttagtcaaagaacgtacttcactataaataaatatttaaaatattcaaactcttctatcaaatacataagcatactaatttacctattactatttatttagcctattgatattatttatgaaaaaaaattatatactaacctttaaaatacaaaaacaatacataagtagcatcgggcatcaattccataaatgcaataacggactaatttcacaaaaaaaaagtaactcaaattaaaaataagaatatacacataaatacacaatcatatatatatatatttgtacatactagcaaaaattacgtgcgaggcacgtatactnnnntttatgctagttttttttttatgttatttgaaaatgatacaattaaaaattaaa

SEQ ID NO: 110653 - DNA, 2446 bp, Cannabis sativa
  modified_base (2379)..(2380): a, c, t, g, unknown or other
accattaaaacctcttccatataaatatatagatattattcatgctctaaatttattttaatgattgtttttttaattttttttatgggaatatatagaaatattaacattatatatttagaataaataaaatatattaaatttaaaaaaaaattactgatatatcttaaaaaaaattaatacatagtgtaatataaaaatataatacaaaatacaaaaaaagtaaaagtaaaattttagtgatttattttaaaatatggagtagagaagatagtactcttatttatttattttcaatgcacccgattaaactacccttattttaactgcttagctactttaaccaaaatgtaactaaaagatagtcctaggagatactctttaagtgattaatgcttcttgtatcatgtagcgaatctccactaataaaatggtacaatcagagaagacaagtaaattataaaatctcaagtgctaataatattagtatagataaaattgtacacctgatgagtgaagagacatcctgtaaaatgcacacttgtgcctctaacatttattctagttccgaaacaaagaaagaaactaaaaaaaaaagcctgagaatgttcatataaaataaactaagaatctgtggatgttgtcgcatcatctttgtgcttaatcataccagaatccacaagaatgggaatctcagctgccagccatggggcaagtcccaagcagagtgcatgtgctataccaaatctgggactgcatggcaaaaggaacaatttattagccaacaaagcactaactccatattccaaagggaacaaaagaaaaacagagataaagaagttgagaaaacaactctcagctcaagttagtatagtcaagacaaggtactcaactcgcaactaccatttttcatttttatttagtagtgaaatcacagcattgtttcaatgcacaacatcgatgaacccaacccggtaaaagcattaatggctaaaccgtttatgattttataataggctcatgaagtaaatgacaccaatgcatttcaaagttcttccaagaggcaaatgaaagccaatacaaccgaagtaaaaataagtgtgataaccaatccatgcaaaacatcaacaagtaggtgtggtaactaatcctattcctactacaacatgtgaccactgcatatcaagttcggaaatcactacttgtgtctagttcaagtgtgttgctgtgaggggtctggactctggtgcgtaaacaaacaacagtaagcaaatttcagtattataagtaacaactttttttaacaaatacaaaaggtttcacagatcaaaatgtaatccccagactctaatttccatcgttttctctgtcaatccatgattccaaggagaaaaactctgaataccacagaatacatacttaaactttaaatgtaaacagaaaaagataattaccaattctttgcccaaagaggtttgaaatgtacggtcaaacagatcttaccccctctatacatctgatcaaccaaagccaacaaaaaaaaaaaacattagcaatcaaattaataaaacaaaattatcattatgagatagaatattatgaaccttttgggttttgccgtcgatttgagggagctcgagctcaggtgcagtggttgggtaggtaacaggaatatcgaactgaagatcgaactcatacttgagaagattgtggacataccagcacttgccggtccaacgtgtcccctcgggattggctgcggagatgcggaaccaatcattgtcgttggacttgttcatctgggtgtaggcaatcaatgccttatactcctccttcagcctctgcgtccaggcagccccatccctcggcccggcctttatcgtcagcaaagggatttgggtcagtgttgatttcgtattgggatcccaaccctccattcttcaaccacttcctcgtcttcttcaacctctcctttgctgagccctaaccctggactataattgcatgaacccaaaatttaattgaggaattagaataaaaaataattgcaataacgaaaaaaaaataaaagaaactgtgtcaaacttttttaaagaaattttcttatttcagatcagttcatgcaaattccaagtttaaataattaatttagtgaaattctgggctttttttaacattaaatgggaaaaaaagtatagttatttgggacttacaggttgaggaataggggaaagattgagagaaggtatgtatcttgtgtcgtgagtctgacttcgactcggagagaactaaagagagatgcgatgcgttcatgcgaagcagatgcgttgtttgtctctcccctaaggaaatttgattttctatacttagaaaatcaannaaaattttccctaaaccaaaaatttaaaacctaaaaaaactattccttttttttcaaaaccccaaa

SEQ ID NO: 110654 - DNA, 8210 bp, Cannabis sativa
caactagcgctgcaacctaaattacaacaaataatcgtgtagaaattcctattgcaactaacgctacaatcactttagaaactcaaaccgtaaattttaaaaaaaaaaattaaaaaaaaaataatacatgaaataatttctctaatttttttattctaaatttaattatattctcatttcatttttatattttaattccatccaaccatagaccacctaaatttaatatttaatactcttgtcctcatatcaaattacaaagtaacattaatacgttcctcctattgaaaaaaaaaaaaaaaaaaaaaacaagtacatggataagaccatgatattaaaaataaataattacatcctcgcactaattactgacttattaccgaccactactgcaaatccaaggcagtattagctcaaaaatttcaagatacaagtgaacaaccagtcccaaaaaaaaaaggtcatgtttaaacaattttgttacttaggtacttagagaacctaatatataaacaatgtctaaatgaaataaaatacaagactgcagagtgaagacagtccatacaaaacgaagtataaagttacacacacatatctatctgtctacctatctaatccatctacttactgctcctcttcttcaatgaagaggtcccccttttcctttttttattggaagattgatccctggttttgcttttaatacactccaagcaaaaccagtcatcctgaggaatatcttcaaatggaggatcacagcaatcaatatggcaaccaactccacaacctttagaaccatcttcattaccgcatatcaacatcacatcacctctatcacgagacccacatgccaggcatggtacatcgttgtgatctggtggtgtcagctccaccacaactttctcctctgcaatttcttggagtttggcaaatgatttctcagcccaaccgtgagtgttgtacagcacatgcttgttgagggaataccctggtttgcatacgtattccaccaagtaatcagctaccacacacggtatttcgtgctttagaaactcctggatccatgcatccacacgtggcatgccgggagagataattgcaaaatcaacgcttgagttgaggaagcgagtgtaaggtggagatgttgcgagtatggtcccatccccagccttcacgacacgcttcagggtgtcctgtttgataacattgcatatggcaaaaaattagtcctctttagtactgatttttaaatcgtaaatggtctaacaatctgaaccaattgatgtgaaatgctaacatgaaaatacacacaaaaaatatgttaatttcaaaactcttagccagagcgtgagccattctgcctacttacaagacaggttgaaatccaactccactgaagaacaccgttttaggattatatatgcatatacatataaagtgaaaaatgttaatgagaaaaagggtcttcacatgttaagcgaagagaaagaaaacgcattatgatcataatcacttatcaattctaaatgcaataggctgtgttaagacaacgtaccaaaggtggtgctatacattcaccataaatgagtatgcgcattccatgaagagcaccatgacctgttctttgcctcaagagacgccacttccttggagcttctaagtttatagcaccatcttcattaaggccattcttgtaccattcataaggttcttcttccaagaattttcccgcctggttacaagccgttaaataatccatcttaagaatccacctgcatgaaagttgcaaacaagagttataagcaaggttttaaaaaacgaagaaaaactacaataaaataggtttacacctaaaaaattagcagaaaaccttcataaaatatcataaaattcataacaaacaacacataatccataaaaaagtcataaaatttatgaaaagtactaattaggtcttcaaatgataatttatattcataaaaggttcgattacttatgaaaatagtaaaagttctaaacatatatagaaacatattcctcattctaactcaaatgtcaaagaagtcataatgatcatcactatcttcttctgaatgagagagaggagggaggagagagagagagagagagagagctggtgagattgggggaaggaggaatggggagtcggagaagaagacagctgcttagggtttactttttaaatctatctactctattgaaattatgttagaaaaggccccaactaacacccataaagtcaattacaaatgaaacccaattggtgaggactgaggcgtgcacctcatacgcctcaacacaaatcgccttagaggcatacgcatcaagaccgcctcatcagggttaagcataggcctcaagtccaatagctgaggcgttgcctcagaatcgttttttcaccgacacgccttaaggcgcgccacgcctcgaccgattttaaaacaatggttataagttcataactagaaggaagtccatattaatcaaaagacaaacatcaacaaatataccttccagatgctgctgcagcaaaaaatttctcagtccggcgaataggatccggagcaatgaagtgtgtggcctggtaagaccactgatgcgaatcacgacaaaattttcctttcagccgcctaataacactctgaaactctttccgctgaagtcgatgtccacttaaaataaacattgcaggttcatttttaacactgtttgcaactcctccctcttcctttgaagaattaggtctgcagtttgaatccctttccttaaccttcatttgtgtaatattagattgaacaaccgactgttctccatgctttttatcttgacttccattttcattaccactgttagttggcatgctctccttctcttcttccgcagagttctttaacttcttctttctcgatactttttggggttttggtttaggacctgattgttctccatgctttttagcttgactgtcattttcattaccactttcagttggcttgttctccttctcctcttcttccacagagttctttaacttcttttttctggatactttttggtgtttaggtttagaacctgtaacagctttgttttccactttatccagcccaccattgttttcaagctcaatctcttcgctattaacaagttcatcagatttcactacatctgccacatccagaactttcctcttagtggatttcttctctttagacgttttcctcttcaatccatctacctttgagcttggtctgaccagagcagaagtagtgctatccactgcattgtctgtttcatttcctttctggtcttgttctgaggtcatttccttaatattagtgatggcttcatttgatacatgctgcttgcttgcagatttcttctgtgtcccattatcattttgtttgttgactacattctcacacaactgctcaaccttttcttctggagcttctgtttcatcatcaagagattctatttgaggcatagcattatctcgagatctattagcatgttctgccactgcttttgtgggtgcttcattgttgacaataggagaagacagttgagtcttcttggtcataggagatttgtcactctcttctccactcaaacaagttgctgcattattttgggacgtattatttttgcccaagtaaatggaacccttttggttagcaatagaaacattcttcggtcttgtacccaatgtcttctttgaacccgtcttctttcccaacggtttagtaactgacttctcatcttcaaccaagttcaaactagaagggccattagagttattagtatctggatctctgttactttcataacagataccaacctgctgatcattctgcacttcccctgtaatggcagccacaggtgtagaattcttatcaacattgttaaagtccagaccactagataaggttgtttttacttgcttgaaagaagatggagatgtcttctcatgtttagaattagaacccttgggatcattcatgtcattcttgggttcccttgtgttggctacaggtgtaaaattctccttaacaaaattgttaaagtccagaccactggataaggacgtttttagtctcttagaagaggatagagatgcattgttactttcagaacccttaatatcctgctgaccattctggggttcccctgtaatgggagccacgggcatagaattctcctcaacaaaattgttgaagtctggaccacgggatgagaaggataaggatgtttttacactcttgaaaaaggatggagatgtcttctcatttgcaagagcatgctgcccgcagtctgaaattgtaggttcagaaatagggaggccgctttgtggcgatttagttaatttagaggaatgaatggtaacatcagtagagtgtgattcaattgcagagttcacttttgcaaatacactattagagcatccactaccaaaaggagctcggctagcattagtctcatggccgccatcacaagaaggcgctgacctcagcccaagaattttactgtttggtgatggactcttcctaaagcatgatttcacattatcatttatctttcgcaaagtgggactaccatagccatttcgtatctcttttggaggcgaaaaatcagttagcttaactccagaatgtaaatgtagtgtgtcaacataatcagagccaattcttctctttgcttgcgctaaggatgaaagattattgactttgggttcacccataatgtctctttcaaagccactttcattgcctgataatctcttcggtgtcttctttgaagaacttgcagcaccaaacctctcattagaaggaaccctgtcaacactccgagaattagaagtccagtcattccttgcattcttaccatcaggagattcataacgagactcaatttccttgctgtagtaagtccctttaaggatgctagaattctgattcccaaaatccaaacttgacgctggagacattcttttcccctctccatgcactgaaaacttgtcgtcagtggcattgacatttaaaggaatcttagactgtggtaaatcaggcagaatatgtggcgcctctgcagctattttgggtgacgtatgtgtctctggaaagctagttgctatattgataggacttctatgcacgttttctactacatatggcctaagagatgcattttcaacctcatcctcagaatcctttgcctcagcttccatcatctccaactcatagccactgttgagagaaaatgaaatctaagaacaaaagtacgcataaaaaagcaactgataatcatatgaaagtgaggtaactgtctttgagcgaataataagtaacatatgctgaatgaataattttccgaacattgagaaagaaaaaaatatattttaacgatcaccacaccttgtggtatagtcaacttctggaagaatttcccactcccttaagctgccagcagaagaagcacgagaagaagaaaagtcaatgactaaaatttgggaaacttgtgttattcactgtcaatgataagatgctagatcacaccaagaattccactaaaacataccaatcttccagccaacgatgattgaccaactttatcttgtttaatctcttcgcaagctcatatttttctcctacacaaataagtctcattaatttcgattgctatttaaggcttatttagtggaagagaagagaattactgtagaagaaatatacataacataaaacgtagagctacacatgcaatatatgtgattcttttttctcctcttgagttgcacattgaattcatccgagaacaaatggtgtaagcgaattgaaaagaatgattacttgacaaaaacaaaagcaaggcacatatatgtgtcatgcacgtttaaatcccatcaattatggtgaaaaaaataattaccctcaaatttgtagcaaatgagatgagtgactttattcgccaccaatggcttagaaaaatgtgcacccattaaggcaaccatattctgagaaaatcaaaagaattgattaattgaagtaatgaagtatctagaattccataatcggaactcaggaaaaagaaaagaaaagaaaagaaagataggtataccataatgtcttctctgtcttgtcgctggtatccagtcaagcaaattataaaacttttagcacccggtatgccattcaagtctctaagtggtctgtacattacctgcccaaaaacttaaatctcaatcaaactagcacaaactaaagagaacccaaactcagtatcaatgcatgtataaaatttcaaaatcaagctacatatgaaaatctcaattagtattccttatgggcgtttggtatgagatttagacttaatgaaaatggaaatgtaaaatttaaattaaatttgaatgacaagagatttgtgtttccaagtaagtcttactttttaaattaaaatagtgataatgttaatcccctcaagcttatgggtttcatattctctccaagtctactccctccaactctattctttccaactcaaactcacataacaaacacccaattaagtggtgttcggttgaaaggaataaaaacatagctagaataaaattaacattccaatactttaaaataaaaccaaacaaaagaatagaataaaattgtttccttccattctatttcattactccaccttagggatttaatttggaaaggtatcaaccataggtgatggataaaaagcatttcactgttgatctattaggcggaattcatcaatgccagactaattattctaaatgaacattgtcatgcaacataagctgaaattaacaaaaattattcagactcccttgtaaacccaaaatcaaacaaccatgatagagctaaacaataatgtataaaccctcaccgtagtggcgtcaacaagcattccagcgtcaaaactatgatctacccacaaaccagtcactactgttttgcaatcttttcgagcagcaacacatagaggatcatcctgaacaaataataaaggttttagaccacttaaatttcaaaactaacatatgaattttgaaacatagttacaaaactgaatttatttctttattttcccaccatttcaagaaaacaccaagaaaaataaacccaatttacttaaagtaaaacagaaaaatccaattacaatggataagcaaaacacttaagagcacttacatagacaactttatccacaatcacatgtgtgcagttttggcaatactgcccagtatcaactcccccaccttccacaagcttagttcgaatctacacgttttattcaaccaaaataggtgagaaaaaaacaaaacccaaataccgaaaagaaaattcaacaatatatgaaatgaaaagactgaaataccttgtgttcattaatggagtcgaatccaaagaggacgaaacggacgccgtgaaatagttgaactaattgagtagtttccattgtcgaatcgaaatgtctttctgggaaaagcaagaactaggcaaagaagaaagaaatctaacacagtaacaccatgaatgagaatcagaagcttctaaatctaaagaagaagaagaagagaagcagaaggagaaatgggtttttggtgtgttgaaacttgttgtggaagagtcttaactaaaggagggaaattctgatattttgttttttcattcaaatgaataagcgcgataataattaaaaaaaaaaaatatggcggaatttggacgttccacgtggcacaaccaaggaccgatctataacacgtggaatgtccctgacttggataaggctaggtgaatgatgggcttgaacttgggagtttctctggcccgtgtaagaaattacatggtaactgtgatcagcctcagcccagaaccccttatttttccttttttttctttaaaaagaaaataaaaaacaaaaaattacccttattattttaacctttatcccaaaaaaaaaaaattactaaagggagattatatttacataaaaaaaattagagtgattctccaatgcacccccttaaaagggatgtatctacttgtttcggcatatagaaaaaaaaaattagtctattttttttttcatattcatgtatgttatagctatttaaggtaccttacaaaattttgagaaattcagaataatttacaatctagaaaata

SEQ ID NO: 110655 - DNA, 5035 bp, Cannabis sativa
atatatatatatatacaaattcttcgtagagtccaaaagccacctgaaaaactgatacacttacttcctttctttctcttcaccttttatttttcttccttggataccaaatgggcaattgcttatttcggtggtttaaacgtatagttagttgcttctaccgacgtcctataacctatggtaatactaataacccccataactcgtcatcatcatcatcatcaccaacacctccttcttctcctcaaaaaggaaccattttagaaagaccttatgatgacataaaatcgatttacaagctcaaaaaggagcttggaaggggtcagtttggggtgacctatctttgcaaggagaaatccactgggagaaagtacgcttgtaagtcaatttctaggggaaaacttatcaatgaaaaggagatccaagatgttagaagggaagtcaacattttgttgcatcttaatggtcaaccaaatattgttgaatttaaaggagtttacgaagacagggaaaatctttatttggttatggagttgtgctccgggggagagcttttcgatcggatgatatccaaagggagctattctgagcgtgaagcagccaaaattttcaagcaaattgtgaatgttgttcatgtttgtcatttcatgggagtaatgcatagggacttgaagcctgagaatttcttacttgccagtaaagatgacaacgcacctattaaggccactgatttcggactctctgtctttatcgaacaaggttactctccttttacaaatgacttgtttttttttttttaattattattattattattatttgtttgaaattcttggttttacaacttttgcataaaaataataacaacaatttttttaattgaacaaaaattcttaaaatggttttgttttgtttcaatttttagtttcaagatagtattattttattaaaaaaaattatgaatttgttagatcttgacaaaacataatataagtagtcaaatttaattgatgtgtatctactatctacgagtcaataagatcactcaagaagagcacctagttagtcaacaacaaaaatgactagttaatcaaccaactcattgattattattatgacggctggagctttagatgttttagttaacattagaattatcattgtgaaaccaatgttcatttatttataaatgatcttattataagtacgcatatatattaataatgggttgattaagaaactgggaacgaggaatcgaggtaggcataaggacacacacaaagttatttattgtgaaactcaatttcaaattcaattgtgtgttgtggccagaaaaagtgtacacggacattgtgggaagtgccttctacttggccccagaagtattacaacagaattatggaaaggagatagatgtgtggagtgctggagtcattttatacattcttctaagtgggtttccaccattcgggggaggtacctttcttttttccattttatttcccctctttgttagtttcaattttttataatatatattttgaaaattttaaaaggtttcaccgataaaccctttatctacttcgatatttgagagaattttcagtccatttttttaacactcatttacattgtaattgtttaggacatcttacaaaattttgagaaatttatacaaatagttcaaatatagtttatttcacacgcgtataaaagagtctcgcgtataacagattgtttgaaccctattttgggtatgttaaatttttccgaattactcaaaattttgtaggatgttttacataaccataacgtaaatgactataaaaaaattcaattaaaaattcttttaaatgccgaaataaataaaaaatgcatcaataaacttttaaaaaaaaaaaattgtaaaagcaccttaaaatttttaccttccaaattgccaatttataattatcctctcaatttttttgaatggttagaattcttcttaaactattactagtactaaatcttatttttttgtgcaaaagagatgaatactaaagaattgacacgtaaaattgttactcttaaattattatgacctagagttatgtaccctaagttattgttgaattatagaattgcacttctaaacccatagcgttactacaaccatgtaatgtataattaattttgttagagacggataaagcaactctagtgaactagttaattactcttctttggagtaggttaaatatttagcatgaactaattactcttgccaaattttttccctttacatttcgttgcattctttccctatataacttgtttttttagcattagatttcttaaaatattgcaaggtgatgatatataatatatatatgtacaattaattttgttagagacggagaaagcaatttgtgactcaattttagaaggaaatcttgatttgcaaagctcgccatggcctaccatatctgcttcagcaaaggatcttatagctaaaatgttggagagggatcctacaaaaagaattacagctgctgaagcaattggtaagtgtatatagtatatatagtttctgttacaaactttattaacttttttttttttttggttagattgtcctttgttcctaccagttcttgtaaagtatatcatattcatgaattcatagtactgttaaatttataatttttctttatctagtcgactgttaatttgtttatgcattatgtatttttcttaaccagaacattcatggttgaaggaagatggtgaaacatctgataaacccattgacagtgctgttctagttaggatgaagcagttcagggcaatgaacaaaatgaagaaacttgctctcaaggcacctttttaatcattatgcttcgccgctcattttattaactaatctctctctaacttacaatatagaaaatgtataccataccattagattccagatgcacccacataaagcaaatggaaccacatgcatcttacaattctaacatagtatcagagcaaaacaaataaaaaaatttctaacaactatccgacccaaaaaaaaaaagccgatcaaagtagagccagaaaaaagagccgccaaatctaaagaaaaaactgataaaaaaagtagagccaaagtcaaaaaagtcacttgtgatttgaggatagtgagccaaaaaagccaccaaaaaatccaaaaattgattcaaaaagtagagccaaaagagccacttgtgattcaggaatagtggaccaaaaacaaaagagtcaccaaaaattcaaaaatatcgatccaaaaagtagagcaaaaagaaccacttgtgatcagggataatgagcaaaaatagagttatatcgacttatccatgatgatgagtaaataaaatagctaccatcgcattttagttataataaaagatgatatttgtagacatggtattagctttagtgtaatagttaagatagattgcatatagcatagagataaaggttcaaatcattttttttcattttaagtttactttcgcctcagtcttaaaaaaaataaattacgccctcttaatttaaatcttgaatctatcactgattaaattgctcaacaatatacttcttcctctatttttttcatttttcgtttagtccaacatgaagtagtaaaatttgaagaatttgttaggtaatagcggagaacctttcagaagaagaaatccatgggttgaaacaaatgttcaacaacatggacacagatggaagtggcacaatcacaatagaagaattgaaaactggattgtccaggctaggatccaaactttctgaagccgaaatacaacagttgatggaagctgtgagtactaaaataaatctacaaacatccttccaattttactttcttgatcatatttgtccataaaaaagaaattggatctcatccttcttcatttccttttttttacacattaatgtctttcttggtcatgaaactaaatcaattgttgttttaacaggctgatgttgatcgaaatgggactgtcgaatatgacgaattcattactgctaccatgcatcgccatagacttgagagagatgaaaacttgtacaaggctttccaattcttcgacaaggatggcaatgggttagtatggtttaaaaaaaagttataatttgacaccagacaggtaactaaatcatttttcaactgtaatgatttacattatttttcttaccaggtatatcactagagaagagctaaagcaagctatgactcaatatgatatgggtgatgaagctacaattgatgaaatccttgacgatgttgatactaacaaagtaattctttcttctaattcttttttttcacacaattgtttttgttcaccactctttggtaataataataataatgatgatgatgatgattttggtgcttttttatgtaggacggaaagatcacctttgaggagtttgctgatatgatgagaaaaggaacatagattagagaaacaaataagatgaataagcattaagtagtgacatgtgcatcttgcctttaatatattttttttctttttatcttttccaaaatttggggactctgtagatttgatattactttgtaataagtttctcttaacaaagcaaaataaaagcttataaaaatggtatttttacatgtttaatcgtatttcttaatttaattccaaacataacttgcggatcttttaattaacgaaaaattgcggtatacgttcccaaaaattttaacttgatacagataagttctaatctgttagaatttgggataaggtgaatggacttccatctcaaaactaattggcaatgtactattacaaaaacatcctttaaaggcggtttttaaggcctttcagcatcgattttaatgaacttcactaccgacgctgattcaaatgacgttgtaggtagggctgtacagaaatttttgtaaaccgcccaacccgaataacccgactaaaccaaaccgacaaaaccgaaaaaaaatacaaaccgacataac

SEQ ID NO: 110656 - DNA, 5233 bp, Cannabis sativa
aatacagtacaattcagtgaagaaaagcgaaaatctaagcaagtttcagataagtagagaaaacaagaaagaaagaaatatgaataaattctaaaatgagttgtcgaactgcatataaattggtccacattgctgaaaatagttagtgcacccactgacaaagtatcagactaacccttcggtacaagcaatttttatacatggtgggctcattgatgccaaaagctctacccaaataatccaatttgacccaacaaggaataatgacacgtccacgaccaaacaacaaacaatttgcattccctaaatattatagaagttgccctttagtgattatcaactgcacaagatccaatgtggctaatgtataggcaattcgagaaggcaccaacatttagtgctattacattttgattaagacttttagagtctataatttaaatttaatagtatggtttagtttttgttaaagagtttcttacacgttattgaagatgattagaaatttgtgaaactaagatttgaacaaatttttgttcaatcttatcctcaacgcttaattttacaaatttctagattgaatctcacaagttacctcattcagtgaataagagcatttctagtggtattgttcttttagttaagatagctaaaaaattaaaataaaaagtcatctttattgttgttacttcaattatacttaccattagtatttgattattttaatgaaattttataattttactctttaaaaataaattaattttataaaataatagtattttgattaaaatactattaaaaaagtacttaaaaaaaaagctatttagccttattctctatttttattaagcagtatatttagagaatatgattggagatgtctaacaaattgaaattatctttaggattaaggtgtaaatttatgcacaagtaactatttggattggagctttaggatacacatcttcttgtacatttcttttttcttaagtaatgagctctcagttaaataataattacattgtacaaatatttttattgaaaacaatgagagaaagtctccaaagtgctggggagaagtggaagtgaggagctattttatagaaaaactttaatgaaatggcattgcaaccaaaccaatcccaagccaaccccaacagtataaaggcaatctgaagccaatagaatacaaaacagtctttggaaatatatgtgatttctttatacttagttgtattcaacgagggagataggggtgcgggagggtgccatggcccccaaattctttttgataatttttcaaaaataacatataaaaaataattaaaaagaaaattaagtaattgtttattttcttttaatgtattggccgtgttaatttttaggttagcttcattgattgtattgtagctaatggttttggttcatcccttcttttcatgatcttcttctttttctacccaagaatattagttggggttgagttttataatcaaagattagggagttacataatgggtggagggtgcattctcaagggcctatctttctagttagcttattgtattcaatgcttataaataataataatattataacatagggattggaggagtggtcaaacttgtattacctctctctcctttagcacatttctttttctattgggattccaatccctttcgctccctttctgctatcaaacaaagaaatttcatataaatgtgagaaaaaggcctaatatcatcatagtcagcaaagcaacaatttcagcaattgcgggcactttgtctctttcacttagtctctctctctagttttcctcttcacatttttttattgttaatttttattatctctaatctctaaagattaatttacttaaaatcgcaggcgggcttttgttctattccctttcaacgttggactacacacctagccgttttggctagctacacaatgctttgcatctaggtttttatattctaaaattactcaaaagccagaaatatgggcacaaataactattttatttcagagttgtcaatcccaattcattactttcagcttcaaatatccaccgttttctgaagattctttgattgatttgtcttggctcaaattaatcatgacagcataaaattattaacgaacaaaatgatagatgactagacagtacataccaaatgtataactaaagtttgaagagtattcttaagaagaaaaaaatggggagtttctagtttggtttactccaaagttgagcactttggagcaagtattggtgccaagaaccaaaaacactcaaaacgttggtacaagccaagagaatagaaatgagatattgttagaacaaagttgttattgtagcttttcatacaaattaagctatttgaaaacaaagatgaaattttcaaaaataaaaaataaaaaataacaaggggagttagtaaagtagtcagactaactagctagtaaaaatcaaattaatttcttttttttgtattcttcttcactaacaaaatttccttttcatgtacaacctcaattttttttttgcctttctcacattctatttgttcaaacagaaagacagagagagattcaactgtaaaaaagaaaatagaaataaaaaaaggggtcatatcagaaaggcatgatatgagtggtcttagtatcataacaagaaatgaaagatttggaactaagccgaaagattttaagtaagtccgccgacatttgacgaacagatggcgtgcaattgctctgcatcagaagcaatatcttagtcacgccgttggcctttgccacggcctcttgcgccgccctctctcggtagaggtaacacacactccacaacaccgtcaccgcgtgttcggtggccgcactcgacaccttcagtaatctctgaacaatcctcgccacgcaattcgagtctccgccgatctctgaccacccttccttgacggacgacgccgtttcaagcagcttcagcaccttttcggttacagaaacgctcagattcggctctgatagcgatttcgctagggatttcaccgcgcctagttggacaagtttaactttcactcgccggggctttgatattgcgattaggcacgataatccggcttcgattaggtttggatctttttcgggactgattagtttcaacaattcagataatagctcttctttatcggcaataatgagtttcgattccgcgtcgatggcgatggattccaaaactctagccgatccaattcttgattctacgctcccttgttgaagaacgagaacaagcgagcgcaagcaatcgcggttgctcttcaacatcgagtttctcagcttctccatgtctttaatctcattacgaatcatatccatagccctaaccacaagctccaaaaaatcaatgcctctggaagctccagcactggcattgcaaagaaattcgaccagcatcgaagcgaagtcatctgctccggcgagaaatttacggttctcgtcggactccctggcgaaacaaacaatctttgacaagaagtcaaaggaggagcccgcttcacggtccgctcgttgaattaactcagtgacttggctcttggtaaggcaagacttgggagacgattcggcggagtctactcggtgcttgactgattcggaccagatctggatgagccgttgcaaggtccgattggggaccaattccttgctctgaagtacctgcatggtggcgggacacgtgttattgccattgtcaagccagcgctggatgctagagcgatcgtaggttacgccggtagataagctcacaggggatttcatcacgtcaagtgatatcggacatctaaacaagctcgggacagtgatgtacaaatcgtccctcaccatcttcttcttcttttacttcttctcgttcctttcccactttggaaacttgtttggctgaagagaaaacaccgagaaactcaacgggaaagcgagagaaacggctcctatgaaaaaataaaataaaaaagacaatgaaaaaaggaaacagaagatgaagaaatcaaagacaccagtgagtttaaagagagagaaagagaaaaagagtcaaaggtacggtgacgtcagcatttactttttcgtctgatttaatacattaatttatttttatttaaaaataataataatattcttcggctgggttattggtcaaacaagaagactattttagtgatttcattccaaatttaaattagtagggaagtgtttccgcgtagagttacgtatattaatgcagtgaagtttccaccgtttattacaagtagagtttggaaagttttggatgtagtgataatcaacggctgagatgagagcaaagcttacacgtgggttgtgaagtgaaaggcgtataatatggagaagaacgtgggggtagtggggacgaggggagagtagtgaaataagtgaggagacattttgggtaaaaaaaaaattatttgattattggtggttttgggcttgaaggtgggcccaaacgaagggagtgtgtgtgtggtgggggcccaggggagggttcgctcggtcggactcattacatcatttgtacgtttgtagtagggaaagaacaagtagaaggaatacaaaagaaagtctttttgatttgtggttgtgtaattaattaaggttttttgtttcgtccttcccttttttttatgtaaaaaaataaaataaaacaacaaaagctggagatccatcaaatcgatgataaaaaatgataacgagcaaaaaaatttataaataaaaatatggcaaatataattattagtgctaattgactaatacatgagtgatgcaagagaaaaatatgatgaaatagttaataatcttttagtggggaacatctatcaagtcgtgatttttattttttaatcaccagtagtaatgacggaaataattagtgctatctacagttaagttggcagatactatatgttcatttatgatatggtgtggattcatttattaagatttgtctagtaaagtagaagaaattatatatacgtgtggtacatatagtgtcaactcatatttctaccgcttgaaacatagatagtgagtattacgtccacaccatttaactatagaataattacacaagatatcattttttttatttcgtaaaaaaattacatttttacgtttaaagatttttttttttatatttttacggtttttcatagaa

SEQ ID NO: 110657 - DNA, 3007 bp, Cannabis sativa
ctgcacagcatgtttaaaaatcacataatacgcctatgttagttagggtgttacaattaccgtggctcgccattggtgatttcaatgagatcctctccaatgaaaataaatcaagtggttgtctcattaatgaaaaacaaatggaaaccttccgcaagtccttagatcattgcaagttacatgatactcccttcgaaggcgagcgccttgattggtgttttgtgaaccaccattgggaaaacactttcaacatacctcaagtttaccatctggagctatttctattgtctttacactagtagatacaagcctttagcaagataaaagaagaagtaggtttcgctttgaaaagatctagctttcggattcacaaagcaaagatattatcacggcttgctggaactcttccttggctaatgatctgataaaggatgtgcttgccaacttagaagattgtgctactaacttacaaagatggcatattagtaagtatggtcacatgaagaaaaaaaaatttgatcctcaattaaaagtggaaaatctgaataatgctcccctccgtactgctgaagcgatgcaaaatttgaaacactctgaagcaatccttcaggatttgtttgaacaagaagaaatctattggtaacaacgttcacgggttgattggttaaatttgggagatcgcaacactacgtttttccatgccaaagcttcagcaattaaaactaataacaatatcaagtttttgcatgatgaggtgggcatttgggtaacttctaaatctgatatgacagctgctattcacgaatattttgtagccattgtcatttcttcaactttagatgatgatgctcttgctgctactttaaatgtcattcctacaatggtcacaccggagatgaactcgaaactcctaaagccatttgcagctgctgaagttgagtttgctttacactctatggctcctgataaaagtcccggtattatggtatgtctctaatgttctaccaacaaaactaggctattgttggcgacttggtaactgaggctgttttaagtgttttaaatgaaggtgctgatcctactggtttaaacaaaacacttataaccctcattcccaagataaaaaaaccacagcgactgcaagactttcacacaatcagcctttgcaatgttgtcttaaagcttgtcaccaaagtgcttgtaaaccgtctcaaacatgctctcccttatgttatctttgagactcaaagtgcctttttgcctaatcgtttaatcactaacaatattcttgtggcctttgagttggtaaatgctatcaagaacaaaactacgggtcgcaaaggtattgcatctctgaaattagacatgagcaaagcttttgaccgtgttgaatggaaatttcttgaaaaaatcatgagcaaaatgaggttttctagtgaatggattactgtcattatgagctactagcgtactaacattttctcctttcttttaaatggggaagtgttgggttcacttattccaacaagaggtctttgatagggttgtccgctttcaccatacttattcctaatttgttctgaggggttatcaagagtgctccaacacaaagaaaccagtggtcatctcaatgggtttaaattaacacgtcatgctccttcagtctctcacttgtttgtttgctgatgacagcctccttttttgtcaagcaatgagtcttcctgccttgcaataaagaaatctttggatgtataccacaaagcctcgggacaggttctaaacccaattaagtctgttatgtctttctcgccaaacacaatgctagctgcccaagtttcctaccaccgacaactgtaaatgccaatctgtgagtgtcatgaacgatatctgggtttgccatcctacttgggagagataaaaaaggaatgttcagtgacattaaggagaaaatttggcgactaatgcacacttggagtaaaaaaaatttctcaacaggtgggggcgaagttcttctcaaagctgtggtccaatccatcccaacttatgcaatgagggtcttccgcttacctgttcatttctgtaatcaacttgagtctatatggccaacttctggtggggtttaaatgagaatgacaacaagatttattggcgctcttggaaacttttgtgtgaaaggaaggatagtggtggtatgaggtttcgttcttttgtgcattttaaccaagcaatgctcgttaaacaagcttggaggcttctacaacaacctgactctttacttgcaaagctgttgaaaagtcgatactatccaaacaactccttccttgaagctaatctaggacactccccttctttaacatggcaaggaatccattcgggtaaaggtttactcattgttggtctaaggtggaaaattggtgaaggatgcagagttaattgtgctagggatcattggataccatgacactcaaacttcactccatactatttttcttgacctcctgatgcgattgttttgaacctgaccacagatgagagacaatgggacacggctctgctcactcaatggttttcttcacctgatattgatcgaatcttaaccattccactgacttttttttttttttgcaaagatgacacccttatttggcatcccaactctttgggtatatacactgtccaaacaggttaccatttggcagcttctcttaaggatactgatagcagctcatgttcatcatcaatttcctcatggtggaagtttctttggtcgctcaagttacctcagaaaattaagatctttgtttggcgtgtctataatgatgctctccctgcttcaacaactctagttaagaggaagataattacagactccactttatgttatcaagcttgggaaaccataggacatgccctaaataaaatctatttcaatataattagattgactaattaataaaatatcaaaaatcgtttcatgttgcacgcttcacatgatttatttcatgat

SEQ ID NO: 110658 - DNA, 2579 bp, Cannabis sativa
  modified_base (33)..(70): a, c, t, g, unknown or other
  modified_base (2529)..(2548): a, c, t, g, unknown or other
ctctctctctctttttttttctctctctctctnnnnnnnnnnnnnnnnnnnnnnnnnnnnnnnnnnnnnnctctctctctctctctccaacataacatttggctacttaaaatacttctaaaaggagagaatgatcttgtggacatgctcaaattttttaccaactagagttcaaatgaagaataagcaccttgatattgtcataacctgtcatttttgcagcagcaaacccaaaacaactctgcatttgttcattgactgttgctttgctctatagtgctggtggaatttttttcgtgttggtcgaatcagtgtggagagtaattttgtaacctggtttgaaagcaaatgaaaaaagtggtagaatgataagaaaacatgtcacattgctttgttgggctttatggagaagccgcaatgatcttttctggcaacatcgcatgttgtaaattctaacaacacagactcgaaccaagaacaatcaaacaaatcaaaactgaattgacaatgaaaaatcaaaccaaaaaactaaagcagaaagaaaaaattgcagaaaactaatgtaaagaacaccaaatttttatacaagatcggccaaaccaaagggcttacttcctattattcccctgagttatcttctccattaaaataatgaattacgagtttgagttgttgagtacaccctagagaacaataacagatgaataccttaaaactcagctcgagtttcaactctaatgtcttagtctagtttcctaactctcttcactctgtttttctctctttctatgtctctctccaacagaataatgtacatatattttctttcactttcataccattaataatgcactaactaacataacagaatgctacaacatttcagataaattttatcgaacaaattgtagcattcgaattcactaacaattgtttgttaaaactgttataatccattttttttgttgtatgaattatcaaacaacaccgcatgttcaagtgagacaaatcagaagtggactaagcctgttatatctatgaccaatgttattgtagatatggggctctattttctcaggaaaacttttttggctttgaatttgttgtgagggatcgtgatggtaatcttattgaagcttaccaagcttgcaaacttggtgtcgtgaaaccagatatttttaacagcgggtatgaaggaatttttgagttggataaaatcccatggtaagaattctttgttcagattacagaacaaataaacatgagggtaatactatatatagttgtatggtgtagtttttaatgatgaaggaatactagcataacttctgatttcatgccttttaattgctagagcattgtcagagatttgattttgttactgaatcaccttatactgaaaaacaatgctagcaaactaatttgataaattgatcaattatctacttattaattatgtggaatttccattttttgttagtctattcattattggtaaacatgttgatattttttttatatggaaagaataattatttgatgataaaaaaatagacgctgtaattaaatggatgttctagatggcgtcttggaatttaaatgaaggagaggcttgacacgaaaaaatggtgcatgaattggaacaagcccatgaggaaagggtatacagtaaaataaactgtcgttgcattctagagaaaattggcattagttgtaaaactgatgagcgagtaacaaaagcaaacgatcagagacttagggacatgggcattgataaattggagctcaaatttgatggaaaaacttatcttatcacaattgagtcctttgtgaatattattggaattaaagatgacggggatagtataattctttcggtgacgaagacattgtgatgtaggaaaaaattattagggactacaagcaacaaactgaaaacacctcgattaggatcctcgcaatttgaaaatggagagttttgaaagtttgaggtgatgaaaaagaagaaatgaggtgggcaaatcaatttgtacctcgattaggatcctcgcgatttaatggacgacccaaatttcttcttccaaaagcacactttcatatgatagatgggaagttgaaaatatgacatttaagagtcgccttggcatttattattcatcattgtatgcctcgagtaccgtacgcattaaaggagaggtcatctcaattgtcatgccatcactgtaacttctcccaagagatgcgccctcaatgcacgcgttgtcaacaattatattaaaggtgccgcatgcgtggtaccttcaaattatgaccctttacttgatgacaactcacgggatgcattcacaactccagctgctaccacatgtcaagaacatacctccaagaaacagaggagtactgcaagctcccggatcttagagagtcctaaaagtttgagggtaaatgttattcgtatttctaagcatgtgatgtggcatttaaaggaaggaattagctgttggtagaatttattttaccaggatcttnnnnnnnnnnnnnnnnnnnnttattaacatcctaaataagaactttctaaa

SEQ ID NO: 110659 - DNA, 2790 bp, Cannabis sativa
  modified_base (2765)..(2765): a, c, t, g, unknown or other
cgctacagtttgtgagcgtcaggcaactctgaaggctttgttcctcactcgcgtgtgagtctcactcgcccacatagccacatgtgtgtcacacttctccttgaacattcgggggagtttttctactgtatttttgtaaataacaaactttaaaagtaatatatttgaaattaataaacaatataaatgtttatttttgcttgtagtataaatatttatctaaaataatattaacccaaaatagaaaaaaaaacccttttatttatttttgtggaatctatttcaaaatccatgccgactgacaattgtttctgttccggacttgtcattgcctgtttataggttaatggatcgtcatcaatactgtaaccaatgaccatattaatttcatcatccaacccataacgagctagttttgtggaaggatcatatcaagtaactaaagttacaaaatttaaagcatacaaacttggttggtttgatgaaaacataatcctagtaccaagatactggaatggtgaacatctaagaaaatactaccaataagtgcacaaggtccaatgaccccataagttgcaaaatgatccaatacttactcttaagtaggtggccttcagattggacctcgaccaaaggtttggaaaacaactggtactcaggtcggatgaccattttcaaagtgcagtatgttcaaaaatcattgctcttgagcaatgtcttttagacgagacataccactctaattttaaatatttaattagctaaagatccgttagatcatgtaataattttataattcagtaaatgtaagttactacggtaacaacacatatcaaccaataaacgaataaagatattaattatcattcaaattgtatcaattttatatttttttttttaccaaatatagcaagttatttaattacctaaaaatgtgtacaaacggtttgcctaaaccaaatacctagactgacaaaataaaaacttgtgaaatacaagtgacctagagtcaaaagtcttctcgatcacttggggggcaactatacacccgtacaagaattggtaaacaacaagcttaaagcaaaaaagaaaaaataaacatttagacttaagagaaaaaattcatattacaataacaaagcaagataagtttgggattaaaggctatccggctagctagttgtcttaaataaaatttaaatactttccaagtttaaaagccacttggttggccatattgtacttaaaaataggcccgtaggccgaactgataaaaaatttttaaaatatcaaaaagtaggagttcaaggctttttgtatgggtcagacacgtcttcagtaacatgagtctcattttcttgaatggtgaaagggttgttaccaaccatctcagcttcttccttggctttttgtgcatcacagaaactaagataatcatctttgttctctttgagataatcaaagtttgcctctgggtttgccttctgtaactcatgaaagacgtccaaggcagctaattcaaagcttttgacctccttttgaagttcctcccgttccgcattaaaagttaactgtttagagtcaatagtttcctgcaaggtcttcttctcctcaatcaggttcatttaccttggtttctaaattttggagaagagtgtagaggttttccctctcatatttgagagcattcacttctttggacaatgcatcaatgtccgcctcaagctgagttatggacgatatatctttaatctctttgcttaagtcttgatagagcttgttagcagcaagaatttgcttgttaacctcacccaattgaagaatcttttgcttggtctccttcttggcgtcttccaatcctatcctcagtgagttggtggtagttgaaaattttaaagctacagacttagcacgagagtaagtgtaggccatattcaaattaagttgaacgataaaacaagattaaaacatgtacgacataaagcctatatggaaaagtagaaggaatagtacttactcgggtggcttccttcagcattctacccatgagtagctccataaaaatatcctctgtcatagccagctgattgtttaccttaggcaacactcggtcctagtagaacgtaagcatctccttactcttcttattcttcagattcaatatgagaggagtggccagtgtctttggcatcccggacccttctatgtttgccctttgaaacctttggttagagtggcagaagcttgagacttggcattctttttggccaagggagcaggatcgaggaccacaacctcgagaccatctaaggaggcaacatctagattcctcgtagttgtcccttagggagtcttagtgttcagggcaatgatttttggcattatatcgtcatctttgggttttgatctgagacttctggccaaaggcatcacccaacctcttcttaagagcacatagtagcctctatgacatgacttcataaaaagagagaatgtttgttagaaaacataatcaagcaaagacaaacaaggctaagtaaatatggtctaccttgcacgtgtacggaagcaccctccaaaataagcaaagaaggagcatcctaatcagaagagtcctcttcttcttcctcaaccacaacaacttttcccattccttccacctagacaaaagggtgagtaggctcttcacgaccatctttgatactaatgggccactcatcaagtacttggtcaccttagggagccttctgttgggttttatgccntaaataaaactctgtttcaatgtaa

SEQ ID NO: 110660 - DNA, 3906 bp, Cannabis sativa
gatttgccagtcaaactaacgcccgtctcctccagttaaaaggccaattttctcaccttctcaaaaacaatctatcgatctccgaatatgtggataaagctcagtccatctctgatgcgctgatgattgctggatcaccagtctccaatcaagatcttgttatgcagctcatcaatggcctcggtcccgaattcgactcggttgtctccggcattacctccaggagtgacactctgtcatttgaagaagttcaggcactgcttctttctcatgaaacacgccttgaacatcacaattctgtcactgacttatccatgaaaatgcaagctaatcttgcatttggatcttgaagaactgacccatacagacccccaattggaactaatcgtggttcccaatctgacagcaatcgctatcgttcgtttggtcgtggatcaggtgccaaactattgtgtcaagtctgccttcgtactggccacacagctgctgtgtgccactaccgttttgacaagaattgggtcactcccaaatacgatacctctaatactcaagctctattagttgaaactaatttttctttcgatccacaggccctaactaccaacatgatacctgaaattggggatgatgagtcttggtatgttgactcgggtgctaccaatcatatctccactggtacttccaatcttgacatggcaaaccactacaatggcagtgaaactgttgctgttggcaatggtaagaaactatctatatctcatattagccatacttctataccatcttctttaacccatcatcctgttcagctaaattctattcttaatgtcccttctatgacaaagaatttagttagtgtttcccaactaacagctgacaatgatgtgtttcttgagtttcacaaatcgtgttattttgttaaggacaaacaaacatggactgttcttctcaaagggaaggctaaggatgggctatatcgtcttggaagtgactcttctgccaccattcaatgccatcttaatactgtaccaaataatactagtactactcatttgtgtaattgttcttgtcattccataaacattgcggactcttgtaattcagatatcagcaataataataaatcttttcctgcttcttactcttctcattatgctctatctgtcactaaacaaaatgacattaacaattggcatcacaaattgggacacccctcccttagtaccatgaccaagatattaccacatataccttacactggctccatccagaacctacatttttgtactgcctgtcacaagggaaagagtaacaaattaccattccctccctctaatagccgagcctctcaaccacttgcccttattcatacagatctttggggtccgtcccatatgccttccaaagatggttttaagtactatgtacacttccttgacgattttagcagatattgttggatattccctctcacaacaaaaaatcaagcatttgatgtgttcattaaattcaaaagtctagtggaaaaacaatttgacttaccaattaaaagtgtccaagctgactgggagggtgagtatcgtccatttgctcggtttttagcttaccaaggaattcactttcaacacccttgtcctcgaacaagtgaacaaaatggacgtgtcgagcgtaagcataggcacatcactgaaaccggcctcactttgttagctcaagctggtttaaggatggagtattggtggcatgccatgtcctctgctgtgttcaccatcaacaggcttccaacacctgttattaacaacatgagcccgtatgagtgtctcttcaaaaagaaacctgactacaggattttaaaacctttcggggtgcagctgttttccacaccttcagccatataatgctcacaagcttgagctacgatctgaacaatgcctctttttggggtactcttctcatcacaagggatatctatatgagcaccctgatggccgagtcataatttcaagacatgtttcattcaatgaaacacactttcctgctacattccctacttcagaaccctctcaggtacatgattctgctccttgtccatcattcaccttcaatacatctaatattagtctccatactaatccaccaattacttctgccttgtctgcaacaaatcacactactggtactgtggctcctgagacttcaaatgtaccctccccaccaactgagacaaatgatcatgtaccatctccacacaatgtatctccaccaactcctacaccaatcatagcacctttccttgatcccgagaccatatcagccataaatgcccatcccaatattcctcaggaaccaaatacttccactacaccaatcccaccaacatgtgaacctcccacacttaatgaaccttcatcatctgccccatgccataccaccaatactcacacaagaactcacaccatgagaacccgcagtcaaaatggcattaccaaaccaaaagcttacatggccactagatttcccctacccgaagctctaattctgtcagaaccaaagtccacctctgctgccctaaaacaccctcagtggcttaaatctatgcaacatgaattttctgcactaaaaagagctggtacttggtctttggttccctacactcctggaatgatagtaatcggtaacaaatggcttcataaagtaaaacttaatgtcgatggaagcttggacagacttaagtcacgacttttcgctaagggataccttcaaaccccgggtatagattatgaagaaacattctcgccagcggtcaaacctaccaaagttcgaatcatactcacattggctgtttccttcaattgggtggttaaacaactcgacataagcaatgttccttaatggaacattgcaggagcaagtttttatggttcaacttgaagggtttgttgatccctccctgccgaaccatgtgtgtttattgcacaaagctttatacggccttaaacaagcacctagaggatggaaccaaactcttaaagggactctcattcaaaggggtttttctctatccaagtctgacaactccctctttacttatggctcgggcaacactttaatcatcctccttgtgtatgtggatgattttttggtcactggacccgatgttcactttgtcaacaaattcatctctgagttgcatcaatcttttgctcttaaagatctcggcagtgttcactacttcttgggaatagaagtatttcgtgatcaaacaggaatgcatttgtctcaaaccaaatacataactgatcttcttgtcaaattaaaaatggatggtgccaaactgtgcccgaatcccacaagtgccagcacaccaaattgtctcttactgatggtgaacctttggaagacaagactctctacagaagtacccttggtgcgttacaatacctcactctcactatacctgatgtggcttacatcataaacaagctcagccagtttattcatgcccctacaaccactcactgggaggcatgtaaacgcttgatgaggtatcttaaaggaaccatcttgcatggaattcacttcacacctgctacatctctttccattcaaggatactctgatgttgattgggcgtcatgtgtcgatgataggaaaagtacagggggttatgttatgttttttggaggtaacttggtctcttggtcggccaagaaacaacatgttgtggccaggtctagttctgaaagtgagttcaaggctcttgctaatgctactgccgagataaagtggttggtctccttgctatctgaacttcacattcctcaaaatcagtgtcctgtttcatgggtcgacaaccagagtgcgactgctatggctgcaaaccctgtatttcatgctagatcaaag

SEQ ID NO: 110661 - DNA, 7993 bp, Cannabis sativa
tctcaaaaaaaaaaaaaatagatggtccaatttataacttttgcaaaacacataatccaaaatagtatttacacttttaataaaattatttcactaatttcttacttgcagttttataaatattagaaaataatgataatatataatttttatcaattttttttttaatatagctaaagggaaatttatatttttatggtttttaaagtataagtttgtaaaaatatgctttttttctctaaaaagtattttatgggaaaattttagaaaaaaagtcaaaaaaaatatagaaagaattcagtataaagtacttggttacccccttatgataattggttactcctctctggttaccataagggtacttggttagcctttattatttttccatatttttaactttttttttttttttttctcaattttcctctaactattactataataaccgtccttgataaaaaaaaaaaaaaaagccgcataaattaagtaataaaatcatagcataataaatgatctttctaatctatcattatttttttctttaaatggtttacaccaatatggttcctgagtttttgctgaatacaacaaaaacctgtattttttataaactaaataagggaccttctgttatgtgaaatagtaaagaaagtcctttaaacttagttttaatgaaataaatttttgaaaggaccaaaataccttctgaactgttattttttattttctaacaatttaaatatagccaattaataatcttaataaaagttaaaaaaaataattcattttataaagagctctattttcatgatacatgaggtattttcttatccttttacattatcgtatccttcaccataatgagaaagccctgattttttcttcatatttctttaaggtatttcttcaaaaaaaaaattcatcttgcgttatcttttgggttagggttcatagtaatttcatcttcctctaaaactgtagagttattcaaattttaaggttttcatagataattatttaactgagtttttaatcttgctttggcgtgatataactggaagggagtgaaggaatgacatctcattgcaacaatgaaaacatgcctaatttagtagggtgttacaatttggtattagagtcaccaagttgtcttccaaagatcatcatgatatgtacattcatcatcagagataagctcgactcacgattcagtaagcctcttatgttttagtagtttgttttattagtatgctataagaaaagtctgataggaagcatgctagtaacttgatagctgaattaatgcatgttttattttcttgaataagcagtaattagaatttgacattgactgcgatatgaccaggctagctcactattttgcaggctattctaatagaatggatgtcaggcggaacatgagaagccaatgtaattcagttggatcctgtggcggtcaaggagttcaacttcccccaaatgttcgtggccgaggcagaggcctaaagggtagggcactcgatcgaggtaatgttaacccactgcaggctgcccaagattaggaaaataggtttcttgatatgcaagccaggattagtgcacaagatgaataaatccaacgattaagatagcagaatgctcttgtaatgcttgatcctgatatgcaaatggctcttgcctctgttatgcaggtggggccagttaatgttgtcaattgaatagaaccactatatgaaaggtttcgtaagcaggcacctccagtcttcttgggaggtccagatatcatgaaagtcaagcaatggttaactattattaatagatttttgaactttatggaagtcactggcaatgacagggtgacttgtgctaccttccagttctaggaagataccctgttttgctgggacatgacatctctcactcaggacgtcattgaaattacctgagaagagttttaagaattgtttaatgcaaagtactacaacaaagcagtctgtagtgcaaagagaaaggaattcactcagttgacccaaaaagagaatatcttggttacataatacacaacacagtttgatagattggctaggttggcctcgggaattatgttaactgattttagcaagaaagaaaattatctggatgggttgaatcccaagattaaacgaaactccacatttgtattctgcctgtcattttctctaggagcccttggcattccactctggatagtcttttagaacaaataagaatacccaagtacctaaaaggcaagtgctctgcatgcttgactttaggccttttttcttattcttgtggagtctcatgcgagagctaccttgtggcagtgttctccatggaccaactttatgcactttatcatttgtatgagaacatatttgtgtttatatctcttttgccacatacatttattttggttatgtattgacacttgggcccacatgggtggcttaactcatgtctacttagtgtggagtgctcgctagttaaaactaacaagttttttttacatctttggaaccttttaagtatatataacttagtttattccatatcttagtgactttagaattttaagttgaatatattttttggcttattttattctgatgcttattatctttgtaacgcggggctttaaagataacattatttttattaccaatggtggcttgcgtttttgctagtttgagcgagttgtcgacatgggtgttaactatttgggtactcaatttcagcacgcaacccagttgtcaaagtctctaatgtaggccattcgagatgtctttgttaaatggaatttttaagttatggctcattagagcaccctcatttgtcttttatctcgttaagtgtaccaattttgctccctatccgagatgaaattttgaaaaaatattcatggcaacattttttaatattccatgcttgtaaggtgatgtgttagtaatgacattgagatttatttttatcttgttgatataccgactttgcccctgtctaagatgaaattttgaaaaaaatttcatggcaaaaaattttaaaatctcatgctcgtaaagtgacgtgtggtaatgactaagatttattttgtggtgtggtgaagtatatttatggcttataccctatatgccccccaagttattaaagtattagattacttttgtaacttgtttaggtgaggacgtaacattacaaaagaaatatttttgtaaaaagtacaaacattcattaaaaataagcaaccaattgtctaaaaaagaaatttaaatgtcgtacttttgaaatggtacttaaaaactaaaacccacaacactgttcaatcttgggaacataaataaaatctaataagggaggctccacgtggcctctcctagcaacttttattgtcttggcaagcgtgttcaaaagttgtggctcggaaaagttgagtctcaggttggggttgtccttttattgccatgctgttgcattctcttgctgccaactgatcccattgtactatgctatttccatagtttgttggaaacttcacagccaaatgtctcactgatgttgttgcccctaatgcgataagtaatggtcttcccattatcacattgtaaattgatggaatgtccacaacgataaattctgtcatttttgtttgcagggtctctcccattgtgaaggggagagttatttttccaatacttgttatgccttcgccagtaaatacatatagatatgtggggcatggtttcaaatcgtgagtctcaagtcccatcttttcaagcgtggacttgtgtaataagttgaccccacttccatcatcaataagtattttccccactctctggttggaaatttgggtggttatcaccaagggatcattatgtggaatctgtacatggtctccatcttccccaataaaaataatgagactttttgtacgtggttgttttgcgggacattgaggtggtggcacttatgcattgttactactttttaattcattaatgtagcacttttgggcctcattacttattctagcaaagtgtggatctccagtaattactaagatatcatctccttctaatggtggtgccatatctacactttggtcctatggtggggcttgtgcactgtttggcagcttgggcattagttttgacttgcccttgtgcttgggcatttgccccctgcttgttgctcgtataacgagcaagtggtccagcttggatgagatcttcaatttctattttcaaggctttgcactcattggttgtgtggccaacgtctttgtggtatcgacaatactttgaggtatctcgattttttctgattcccttcattggctccggaactctaaaattcacagtttgctcattagtgaggaaaatagtttctggcgtttcagtcaattttgtgaagattgtgtaagaggttggttagtcctccctttcttagtattattgtggtccccaccatggtcatttatccttttattggaagtgttcgcatcggagggttatttcttgttggagtgggggtagcttctattgctctagatgaaagaggaaggttattggccaaccttgcctcctccctattgatgtacttttgagctcttttcatgaactcatctattgtgtgagcacccttcccatgcgaattttccaaaattagaacccattagtaattcctgccctactgccataagtcttccactatcattaacgtctctagccttggcagcctcgacattaagtggttgatataagcttttaagctttcgcctagttgttggttcataataggaagggaggatcattctaattttctggccttggcgacacaaaatttcttcttgaagtcacgtgagtgttggccccatgaggtaatggagtgcctcttaaatttcttaaaccaagccttggcttctccaataagtgttacaagaaataacacacattttaaatcaccaaccacatggtgggcatacataagtatgttgaagtcacttgtgtgtactccaaaatctgtactcccatcatacttggttgtgatcggcatcttaaacccttacagatatggtagggccaatatcctaggagagtaaggttctagctcctcatctgtatcatacccagcgtcattttggttattggtcaccattagttattgtatcatttgttccaaggcattaagcctaaggttattggctcatccttcctcgccatggccatcttgggggatgttgtgttgatgtcccccattgatattatggttgttattttctactggtgggattgggttctgccttctattcaaattttccctcaaatcaggttgtctttaattgaggtgttctcgcaaataaggtcttcttatgtcccttaggggatggttgttgttgcgacgttcataattgtgaggtgcattattatgaacactaatggagtagcttttagagtcataccgaccactatccttagcaaagctcgctgtcctttgttgttgtggatgatgaggagagagtgggggctgctcggagtatggctcagagtatggtgtcaaaataatttctgattaagacacatagctattttcttgggtaggttggtgccttgggggcatcctttgtttttgcccacgatatgttggcctctgatgagcacgatctttgcaaggagtagtgcgtcacctatgccccctaggcagttgagcatgtggtgcattaccatgggaggtggatcaccttggttcttgcagactagtaccaattgacggattagggtaccttataggtgacagtggtgctcgaataggagaaggttgctctctcctttcttctccacccatgttattattctcacggttagggcttggaggaaaaacttgggtctcatggacttcatgaccacttcaatctaatggtacataggtttcttgtgcatgtcttgcctggattccaacatttggtaaaggttggtagtcccccctccttgttggattattcatggaggcatgttctctccttgggtgcccacttcttctcccaggtggagaaggatctcttggtacaggaggttggtctccatgcctttgggcttgctcttggagctctctattgtggcacaagatttttgccaattggacgtgcagagttttattttcttggaacacttcatgcataggtatggacctgactagtgggcgctccctagatggagatgaggaactctcacaatcttggaattttccctcatcttctagcataggtagcatgggacgcttttctcggcgcctaaaggttccctctctatgtagttatggagggataaaggttccttcactttggggttgattaacttccccccttgggacttcagcatcctccacaaaattggtcctcctcgtactcaacaccattgttgtgaaaaaaaagaaagtaaattgatgcgttttccagttgaaaaatagttaaattttaactgcagtgctctcaatgaaagcatcaaactgttgatgcagttttttgttaactgatctaagaagattgttaaaataaagaggactgcaatgaattaatttaactaaataaaaccacaataaatacaccagagatttatagtagtttatccccccatgtcgcgatggtaataaggctacgtctatttttttttttattgattgggtccgacacaccagagttatgttctcaagagtgtgtggatagaaatacagtaaatgatttctaggtgaaatcttaatcgagtcttaagaacatagaactcatgggagtctcaatattcataaatctaagcaaagttggtggttgtaaggtatttaggaacaataaacaaataaagtagaaaaaaaggatgtgtatcaatggtattttagtgtcgactaagtatggtggactcaagaaaaaatatgaaggaataggtatggtgttcttggtagccgtcaagtaagtaaaaaaggacccttcacttcagcctcttattctccttatataagttgtagggtttgttagtgatctcccacatgtcggggtgtctcactaaaaaaatcttgtaaatcatctttaataatgactaaaaaattacaagaaaataaatatctacaaaaatctccttgtttataggcaaaaatcccacaaatattagaaaatagttattttcgactaaagatgcaccaatttgaaatggagtgacaagggatgtaacctctcaacttggaattcatgacattggtggtaagtgttgaaaacatgtattttgggttgccactgtttgcatataatgccacatgggttgtggcagtgtcctctaacacccctcacttaattacactactcaattctcgagtgaagtgtaccagtatgccttgtgagctgattttggacctaataacttcataatttagccatgactatgaaatccttggatccatcttgaaattgtctttccaatgcaagttgaaccaggtcatttggataaaaattgagagagctatgcctattttactaagggtagtttgtgttgttttgtcccagttgcgagcactgacatggccaactggtcagtgttcggcctgttgagttttgtgccctaaataaaaatcatttcaatataatcagatttactcattaatataagattagaatataatcatggttatatgtttaaaattttaagtcccatgatttgtcaatacacttgatttagactaggggtgtacatcaaaccgctcaaaccgcccgcaccacaaaaaaaaatgcggtttgaaattctttgcggtacggttgcggtttgaatttttcccaaaccgcgcggtacggtacggtttgcggttttgaattattaaaccgcaacacaaaccacatgttttaaattttaaatttttatatttatttaattaagcccatacatatgagcccaacccaagcccataaatcttagggcaaaatccataactcttc

SEQ ID NO: 110662 - DNA, 5000 bp, Cannabis sativa
  modified_base (50)..(53): a, c, t, g, unknown or other
ttttataaaacacagtatttttgaaaaaatttccgtgtgacagtattttnnnnaaaattaacccaaatttcagtatttttgtaagtttcccttattatatatccttccaacgaaaaagacttgagcatcatgtaaaggcatgcatgcattcatataaataagaatcttcgatctttatctttacatgtaacttttaataaatattcttagaaaggaagcataagaatctaccttatcttatccatattatcttttgttcatttccctcacattttacatcaatattactaaagtggatcacaaagaataacttaacaccttcattctggctattattatataaattgaggtgcagggacactagtatcatccaaaaaattattaaggccctaacaaataaaagaaaagattgctcagatgttggggactctcaccgcccaaacagagacactaaaccatgtccatggtctaatggaggccttcagagcttttgattcaaacaacgacggctctatcactgaggctgagcttggtggcataatggggtcgctgggttacaacccgggtgagcaagaagttagggctatgatgcaggaggcagacgtggacaaggatggtcttctgagcttggaagagttcctggagttgaacaccaagaatatggagcttggtgggctcggaaactttctcatgaacgcagctgaggcactgaacaacaacaataataatggtggtgatggagtttgtgatcatatggttactggggaagagctgtttcaggttttggagagcttaggagtggtcaaatttggccttgaggattgccagaatatcattgcttccatggatatggatggggatggagctgttagcttagaagactttaatcttgttgtcacctctctcctctagatcatatatatatatatatatatatatatgtttatcattataaataaattatggaccatgcaagttatacgtacgtaaacataatgtagaaatgggcagaaaaaccagctttgttatgtgttgttgaccagtcgatgatcggttcaggtgattctagctagagccctgttgggactctaataaataattaataagatcacctgtttgtttgtgtatcattaatatatataaagtgtaagacatatatatttatatatttatatatatcctagctagagagagactctttttggacaataataaataataacgattattgcatgtctatatttgtgtattgagtaattactatcagaaattataaattcaacgtgagaacatctatattggaatgctaaaatagtgggtgtagttctatattttatcacttttaagaagaaaaaaaaatgccaaatttggcaagcaagtactaattttgaccgaagaccgtttttaatggagatgtaaattagtgatctatgactagaatataaaagtttacttgcccaaaattaattcgaatttgtcacataagcacagttgggattcaaacgaggaccccacccacatacacaccccacataccctccctatgatcattgcccacttgaggttatttgagttagcctacacagtataatatgatgattcacatcataataaatatactgtttttataattatttttatgctatttttaatattttattaaaaactttagttattttattaaattatcaactttttatatttattttttattgttttatataataaaattaaagataaattattgttttttattttaataataaaatcattaattaaatattaaatctcgcatcaagtttttaattgtgcattgaagtacaatattaaaaattgatgcaaatatattacaaaatcactttttgtgccaaaaaaaagtaatttttatatatctcatcggagatgatttaaatatataacattatgtcaaattaacacacaataaatgcaagttttttttttttggcaattttgccattaataattaattatagaattaatatatattatttaattataaaattattctattatctatttattaattcatgattgttgtccaccaaattagcacgacacgtgttaccgccgagactataagatccataggtaatgtggcatgagatgggaaggactcacaaacaggtctaaaataaacctaacaccttgcaataaatcacaaagctaagtccagaaaactcaagtctaaataggtcgttgaccaggtgggataggataaacattaattatgcgccgaaaaggaaagatctaggatataatatggcccatggggtccttgacctctaagatgactttgccttctaggaagactaagggactctagtcttgaatggatctgacttggaaatagggaaagcatgtttggacagtacattaggtgccctcattgtccttaaatgaaagaatattttagcttgtctccaccatacaaaaagtaaaggtaagaaatcagaataaacatgctgctagatacgtacgtccactactcatacatccacatttccaaagcataaagtggtattttacccgaaaactagactatatgacgaggacatcatttttgacatgtgtcaagaaggaagacaatctcgtaatcccacatcccgagacaagatagtcaacctgtgagctaagcacaagcccagtgcctaggttcacataagggggcattcgggtaggtacttagatcatgcaaagtcatttccaaagtaccttcccttagaagtctaagaaaaaaggtcaagtaaaccttaaacaatgaactgggaagttgagggtgtcaactcgatatcttagaaattaactaggagctaggggctaagcccagcacccaggttaatattttgtgcattaaaattcatcaattttgattctagaaatcaatatcttcgtgccaactgctcaacctttcaactcagacacatgagagacatgccacaagcatgttacaagaccaagaaccaatattagaacatttctgatttggagtacgagcacccaacgcccaggttaacattctcaatcaacttgggagacacgacaactagggtttggcttattagaacttctttggaccttgaatccttaaacccaacaaggaaggatgctaggacttaagtttttaataaaaatagtgcccaggaggggcaaaccttggcccagcatccaggttgacgaaatgtgtcacccgggagcaagtcaccgactcttatttcctgagtaacgatcgtgtgagttagaaaaaactcaatctacatgagtattttccaccaaaaagaacaacgagcatcaaaaagacgaatttcaggtacctttaatctagacccagcgcccaagttcataatcacccaactacaacgcccaagttgacatgttgttgacctgggatgcttctaatgagttttccaaagatgttttcctggcatttactcagtgtttttggataacaaatgagacaatctagtggtctgaaacccaaccagtgcccaggttcacattcaacctagcgtgtgtggtttcatcagtcaaatgccaattctattttgggcattcttcgtactttagttcaaaatagggaaagagtcctcgtgttcgaaccaattcatcactagaataccaaaacgaatcttgaagggcccaagagttgctcctaatgcctatgctgacactcaacctggtgtgcatggttctattgatctgagttcacttttgtgtcagacattatgttagttttctaccataaataagatattaaaattgtggaaagtcaaacaaatactttgatatttcacattatgacaatgttgaatattggaaaactagtcacaaatcaggtggtcgcaaatcatcacctgggccacccaatttatgaacgagaaaaatcttcaaaagccaatgaacaactttaccaatatcaagaaattatcaaagtggtgcgattatatcacttagacgactcaaaatatgctacgaacaagtttttcaaaatctctagctctcatgttgacatcaaacatcatctaagccacaggaatgtcaccctgtcgcaggctatcgatcttcacgtagtaaatcatccataactcactcattacaactttgattgacgcaattttaagtgcattaaaaaattattttcaagatctttctattcatgtgtaatagtcccatcgcaattctaaatatttctagtccaaaaatttcttccatttcacaatgcaatttttgtagtaaataagctgaaaatgatccaacgaatgcgatccaatcttccaaaattgaagatcaccatctataatatatgagtatttcttaaaataaatttgtttacctaaattttgacgggagtgatgtggcgagtatgataacacgtggcacgagactatccgagactaaattaatgagaaatatgtaaagttgctacccctaggggatgagattaagtaacaaactcccaagggtatgtttaagcaatcacccccgaaggagagtaactacccccatggatgtttgagcaatcacccctagcatgagtaactacccacaaggatatgtttgagtaatcaccccctaaggtgagtgaccgcccacaggggtatgtttaagcgatcacctctagggtgagtaattatccctaggggtacgatcaccccctagggtgagtaactaccccaagggtattttgaagtaattaccaccaaacgtagacacatgtggtgcatggttgtcgtcagctcatgtaagatcctttggtttcttatatttcccctatagttgttaaatactctcacgggtgagataggtatctacccccaaaagtgggttagacagccatctccccctaagggtaggtcatctacccaggggtagtaacttattctaggggttaatgcccaccccctacactcttatggtcgtaatatcacacccttgttacatatgacatggatagtgcaatacttgttgggttttgtgcccta

SEQ ID NO: 110663 - DNA, 5208 bp, Cannabis sativa
  modified_base (5154)..(5170): a, c, t, g, unknown or other
ggtaggagagtcgatttgatcaatagtgtggcagcatctttagtacgctggtcaaaagtggcagtatcttggaaggaagtattctccttagggggtttagatccttccaattccttgccttaagctatcaaggattcaagcagttcatggtccatgtatccatagtcatccttgtgattttgcttccagaactcgtagaaggtttcaatggctaggtctctatagcccgggtgtgctctgattctgtcacctttgtcttcccagcttccacctcctccttgagttcagaaatctcactattccaggcagttagtagcctgcttaagctttctctttggtcctgcagctccctcacctgcctctttcactcttccaagtccttctccaactttgtggtagatggcgtgtcttcaatatgctgcttaagttctttgacctgattgttggcagcaaacaaatatttgttcatctcactaagctgagtctccaagtcttcaattttcttcttggtggcgacgccaaaccctttgaggcgagcataagtatgcccaaacttcatagtcacttgaaacaatgaagaaattcaagttagataaggcagtacggtatataaaaatgctcctagtagaaaggcatcacttgctgaggaaagctccttcaaaagtccaaaatctaggacctcgacagacttgttgtccgagtcttaaagttattcccccacctgggtaagacacctcttcatgtagttatgaaccacctccatagttttctctgccctagccgggggagatgtccgactagatgtctagcggtctttgcttgacttctggtggcaggaggaggataccctaccaagttgcccaccatgggctagttggccaaaggggagtaaggagaaggcagcggaagacttgcgcagatagagctggatcctaatttctaagcatctttggcttgggattcttttccgaaacccccattggttctagagaaggtatttcagatcaaaataccaactgatttcaaaaagagaaggttgcggctagcccatctgggcatataagatgaagagggaagacaagtatttgatccccttcgaagacaactatgctggacagatcctgaaatagttggttatatcctgaaagtatgaatggagcaacaaaatatcctcatgtcctgcgtggggaccaaaccacgccatccaattcttaggaggggcatgggtcaggtattccttacctggcaggtcagtatcgagactcctgaccaactttttaactacaaggttcttgaaccttgcatgagtgagtgtggaaggagaagacacccaagctacctctggctcccttttttgaggcaaaggctttgaaactgcgagctcttcctcaatatgatcaatctctacatgggacaattccccattatcattcaaaggctccctagcctcattacacccctaggggattgtctgtgattgacatcatagtctttgaccggcctctgtgtaggttaccctttcttcaggctcagcaggtctctcagcctgacctgcctgagcagcccgtccctttgctatcagttcaataatgtagggaccagtcgaaggtgctgcacggtaagcttgctttgtcctggccagatttggatcctgaccagtatgtcgtgcaagagtgacagaaaccttagcctgagaggcttctttcactaaggatgttctacgtccctctggcaaggtgtccaggacacctggccagataatatatgtccaagaagttagaagacatttcctccaacctcagttcatttccctaatgaaccaatcataaatctctcctctaacttgttcaaaatgttggtggttgtgtattacaggtttaagagaaccactactaacttccaagtcagaaaaactacccgaagacctggccagagaattactagataatgaactacttgccggagtgcgggctaatcctcgaagagaatgctgaggagatttgtgtctattcagtgttcacctccctagtagtcgtgcgagttcatatgtgctaaaaagggaagagggaggtgaacatccgaacagcataaaaaccacatgagcaatatctaattagttggccagagcaaaaacacctcgcataggccgaccaggattgttaccgcatctaaataacctattctacaaaagaagccatgaaaattaggttttttgtgttcttcaaaacccatgattcaaagatatgaaaaataggggaaatattcaacatttttaaggtagaatccctacatttatctaccctaacacgcccatacaacccatggaggatgggtgttcctaagttctttgcatggaggtttttacctccaataatggcgtaataacaaaaataaagaactttgaaagaaaaataatggttttaagaagatttctcactggacggatcctaggcaaggcctggacggtggaaggatggctaatgttttcttgctacacgaaggacggttgactgaagaatacagctaaaaaccttgagttttcttgaagtttttcttaagtttttctctttggaacttttctaagagtaaaaaaaaatgaaagtgaagaggtttgagaaggaaggctttatatagggttctcatgtttaatttccctccaaaaattaaatggaaagtgcattcctataaaatcgctacggggaagcgggaagagcaaaaaatgcatttatgggggaatgcagctgtcaccacgatcctcccataaagcgtgatttgaaactatcattatgatagctgacacctaatggatagtcgaagagattgaaagttgaccgttcacttctacatggaacaattgccaaaatatcgatcatgtgtagcacatgtacctgtcagcatccgtacaagtatcgaaagtccccatccggacaagtggttgcacgagaacttaggggaaaaatgttatcccaaaattttacacatctgacatgtcactaacgcaaggcataatctagccagctctaaatattgcaagggacttttgggcaaaaatgtgcctagcatatcccatatgaggctggcatccatgggctgaagatttcctttaaggaagtatctggctagaccatcagcatgtcggctagataagaaaagattgacaccttgtaagaatgtttcataagtaatcccacaagaaagacaaatctagaaaagagcctaatcgggcagtcaatatgtcggccaggagaaacggtgccaggaatgttggacaaagctatactagccttggtttctccctcaaacagcttccacaaatatctctaattgtatcctacaaatatggatctaactgatctacccgtgattgtaggagtttctagacattgtaactgcaccctagaatatagagatatttactttctaatcactccttttacggagccaattgtaataacctttcccctataaaaagtggatgaattaacaaggaaaaggacctgaaatcataacctcccactaagagcactttgttgaatactctctataaacatcttgagagttgtagctagaattcactttgtctttgttagtgatctgaatggcattatctcataattaatacaactaaaaggggagtaggtcattacccatatataaaggggccgaatctctataatcattgtgtgttcttcctatttatatattattcttaactttttactggtgattaattagcgtttattagactctgagttagttggcgaatttcctagtcaacagtccattgatataatcaatataagtagtgttgatctcacttttagtcaatgacaatgagtcaattataacgattagaaacaattaatgataataattaaacaataaaaacatgaatttattataaaggctcggccccgtgatagtggtaatagcctactcccactttacttatattgactcatgagaacaaaagcaagaagtttttgatctttcttgaagcttttacagagattttagcaacgtaagtgctctcttgaatgaataaatttggatccctaaatagtaaaatggctctactatttatagggattacatcaatttagttttccaaattaaataagaaataaaaaagggaaagtaattactttcataatacaaaaattgtgtgtagaaatcccaggagaataggaatttaattgataaataaaagggaaaaatatttttaaggctttcacttctacatttatcctgggcgacatatgcagaatgatgacgaggtagatgttggtcggatggtataacataccttgtctggatattctagatttctcttcaaatcaattatttacaaatgccatattactttggacggtacaccatggagcatacttcccatccaagttgtgagatattcttcacgtttcaatcagatggacgccacatcatcctgtgcagaaattgggatagcatttgcctctcaagtcctcgtgggaactcttttctcgcacgtggacttattcggccaccaagctggtcagatgggtgacacgtgtttggttctcgcactagtcttaatctgatgtgactgaatgaaaatgtgaagatctgaatatctcttcggtatctggggcatttaatgttgtcttgaaatttgagcctcgattggaaatgtgtgatgtcgtacgtagtccccaacatttgtgatgagtacaccttttggggggaaaaccaaaatttgaactttggattaccaaactacctctttaactacctatataatgggtcaaaaattcttttatactcatttagccatttttactctcaaagacatcatagcataaaattttttttcctaaaatcttcgaagagttcattgctcaaagcttaatttgtaggagttgtccaagcacattcgaaatcttcaaagtcatgagtaagtcttctttcttctttttattttctttaaatacatgtgttatcttgaactgctttgtgaattttggactcttgctttttcccacgagttaatacaagtaaaatgggagtaggttgtagcttttctctctctggagtcttctaggaagtatgcaaaaccgttccctctctgctagtttggtcccgagcatggtgatttgttggattttatgccctaannnnnnnnnnnnnnnnnataatcagatttacttattgatatagatcagaaataac

SEQ ID NO: 110664 - DNA, 1007 bp, Cannabis sativa
catttttttgggatcctctgaaaaaatgattaagtcaccatatatattacatagtcccaaaaaagtaaaacccaataatcaaataatgcagataataacaccacacaaaaaataataattaattagctaatcaaaacaaaccccaaaagaatgcatagtttcttgatctaagtttataacaaaaacaaatgaagaagaagaagaagagaatgtaccaatttatgtagtacaatggtggtctcatccactacaaaggcaaacagtggccggagattggctggagaatttgagaagcgatgaagatttgtagttgctggtgtcgacattttctgccttggcagagtgatcaattcaagaagactagagtttgatcacttttgagttgagtttttatatatttataaataaataaataaaatatggtactactactgtactgtactgttgttgtgatatattattaattgaatattattttgaaatttaataaataaataaataaggacaaaagaagggccttgaaaactgtaaaagacagtacataagatgttcatcggtctctgcctaccttccttattcaattcatcaccatcattctttttagaagtatcaaaatccgtaaataaatattaaaccatttttccaacaaaaaaagaaaattaataaaagtttataaatatggtagggtttaccagaataagagaagaaatacaaatattttctattttcttattttgtctttctgtaaattgtaattctttatgcaaatattattttaattggtgagagactcagagaggcataagtaagaagaaggtgaagagttggtcaaatttcaattttaatttaattggttgattattgggcaagtttatatttgattttaaatgctaaataatattattttgttttgaaataacaattaatatcaagtgatatactttgtgcagtcccttcgaatcacaaaaaaaaaaaaaaaaaaaaccaaaaaaaattaaaaaaaaaaa

SEQ ID NO: 110665 - DNA, 11769 bp, Cannabis sativa
  modified_base (51)..(52): a, c, t, g, unknown or other
  modified_base (84)..(85): a, c, t, g, unknown or other
  modified_base (1472)..(1479): a, c, t, g, unknown or other
attttttattgtatcacttttaaataacataaaaaaaactagcataaaatnnagtatacgtgcctcgcacgtagtttttgctannatatatatatatatattaatgattagatatgaatacgttacttcattatataatacatataatctcaaatgtatatatatacattatgttatagaatatgaagcttccatatggacgttctccaacagcttttatatatatattgttttgaaatgaatgtataggaaaattggttcacatgtaatctaattaattgccaccaacaaatatatcatatatatataacaacatgcgtatatatcttactactaccctaccatgtaaaaacgaataagtcttgtttatataaaatataataaattaattaataaatattaattcttttgtttttgtatttgtgtaattagtggttacaactcatatatacatgtatataaaatatatatgttgcttctcaatcttattaaagacgatgttcatgtagtaccttataattagttatccattccccatctctatctctatataaatatatatttgatatttgtatatagatgaagaagaagagaagaagtaggtgtattgatcattgtattaataatattatattatcaaaatataaaaagtggctaccacatcacataacatagggatggggtgctccctttatagattacttatataaattatattattactttatctataggactacacattgatttaacttgttttgaccataattttttttttttttttttttcattttggatgttttttaactagttagaaaataaatatatcatatatataaataaaataacatgttttcaaaaaaaaataaaataaaataacaagaatataatataaaaacacataaaacaaactgtaatttatgtaaataaaattttaaaaactgtaaaaatatttgaaattccgtataatcgtacttttgtaaattttttattgtttttgtgtatttttgaaataatcccaaacagatatcgttatgtgagaagattgttgataaaaacacgaaaagagagaggggaacggcccaatgtatgggccttatgaaactgaagctcattatgggccggctggcctgtaagaaaattgttgataaaaacacgaaccaaaagagagaggggaacttcccaatgtatgggccttaagaaactgaagatcattatgggctaagcggccccaatagcgagtaaccaaatacgacgtcgttctacaatgagattagaaaaataaaaaaacgaaaagagagagagagagagaggggacaggggagtgatctgctccgacggtgttgacgagtttaaaacgcagatctcaatgatctcaaatccaacggtgaggattcgtcttccgaatcatcagagaaaatatcaaaacaaacaaatatacctttactttctctattctctctctctctctnnnnnnnnctctctctctctctctcttcgtttctcttccacagaaaatttcaacgccggccggtgctggaggtggtggtggtggcgtagcttgcgtctcctcagatctgaatcctctctctcctgatctatctggtaacgcctcatacttccttcatcttcaatttttatgttttccatttccttcgaatgaattaattaatcaatttgagtgttttttatatgttagagcaagttatatatatttgaaatcgccatggctgctccgcctgcaagagctcgagctgattacgattatctcataaagcttctcctgatcggcgacagcggtaccatttttatttttctttttaatttcagttaaaatctattaatttggggctaaatgttattgtatttatctgatttgatgttgttttttatggactgtaatgcaattgtaaattagtttcgattgattataaaatgtttctttaatttgttaaactttgaactatttatggaaactgtatgaatctagtcgtcatcatcatgcaactaccttagtgacattgtttgttgaaatggtattgttattgggataatgctggtttagtttgatttgatgggacttttttcagtttttttattattattgttaaaatctattaatttggggctaaatgtaattgtattagatttcatttgatttgatgttattttttaaggactgtaatgtaatggtatagtttattactcattggatgttacatttaactgtaattgtaaattagtttcgattgatcataaaatgctcttcaatttatgaaccaagccttgcttttgttgaactttgaaactatttatggaaactgtatgtctctagtcatcatcatcatcatgcaactacctgagtcacattgtttgttcaaatggtattatttttgggatatgttggtttagtttgatttgatgggacttttttctaaactattttgatgagatgagacaagagtcactatacatgtttgttgtgggttctgaatcagtttattttgttgtgttgtgctttacctgtcttcgggatggggtggtaacattgcaggtgtgggtaagagttgccttcttctgcgtttctctgatgggtccttcacaaccagctttattacaaccattgggtagggtgttttaatatttgtaattttgtagtccttttcctctctccttttccttatttttctttaaaataaattcagttttcactaatatggactttattttataacagcattgatttcaagataaggaccattgagcttgatggaaaacgtatcaaattgcaaatctgggatactgctggtcaggaacggtttcgaactattacaactggttagtatcttactcgttgaatatgtgagagcttcatagtttttcattagctgtatactccggttgttaagtgaaatatgtgacctactggtcttagaaatctaaggataaataggctttctcatcaattgaataagaagaacactaatgtgaattggcgttttgttcaaacaatatcaaagtgaatatttgattatagtgacctaccggtcttagaactctagagattaatagtctttctcttcaattgaaattgaataaaaggaaaaccaatgtgagttgatgttttgttcaaacaatatcaaaattgagatttgattatagtgttgtaaggaaaagataataattgggggataaatctttttttattgatctatttattcattgtgacgaatttatcaaaatctatccttctgtcaatttataagttggatgtttcctcaagaatttctcgccctttttttgcagcttattaccgtggagccatgggtattttgctcgtgtatgacgtcactgatgagtcatctttcaacagtaatatactatttcatgcttttatcatttgtcagatctgctgtttttttataaaaatgtgtgacaactggctattgtttcatggtattacaactacttgcaacagtaagcagtgtgttttgctgtgccgttgtatctaatccgatttcttcctgtttttagacatcaggaattggattcgtaatatcgaacaacatgcttctgacaatgttaataagattcttgtgggcaacaaagctgatatggatgaaagcaaaagggtttgctctcctctcgcattatctatacattatgttatatggcggtgattgtgaatgttgtcttgattcatacccttttttcaggctgtccccacttcaaagggccaagcccttgctgatgaatatggcattaaatttttcgagactgtaagtagttaccttttttctacagacggttccaccgtctatcaaatttttacactttattacaaatgctgaaacgtacccgtttgttgcagagtgctaaaacaaatttaaacgtggaggaggttttcttttcaatagctagggatatcaagcaaagacttgccgataccgactcgagggccgaggtatgtgcaatcggaatgcttttcatttttcaaattaaaccatgtattagttgctagacttagatactgttattgaatggttgcagccacagacaatcaaaattaaccaaccggatcaggcagggggttctgcccaagccgcacaaaaatcatcttgttgcgggtcttaagaggccaaggaaatcgcgattcgaaatggttaacttttcaaaagcaaccatctccatgatccatcctttggctggaaaaaaagaaaaactgattttggtaccaactatgtcactggcgattgtattgcttttctctatgtcataattctaaagttagtttgggtgtgaaaggtagaccaagtattttcttaccaaattaattacatattattagttcattttcttttcaacttttttattatattattattgttaatctttattgagcttggaaaaagagtatatataaaaaccatttcttttatggtatatgatgagttgggtgtgtttaatgtatctcaactctgatttcaaagtcttttttagtttttatatttttctcgatcaaacctagaattatctttttgttttataaatgagatactaatgtggcaaaattgtttatttgtataaaagcttaagtataaacaatatgaaaaataaacacatcttgttaaatatacaatgaaagtttaatgataaattctgtgaagacatcaaagttcaactttgaactctgaatagcaaaagtatttctaaattatcaaaggcattacaaatgtgcctttttttattgtcgaattatgtttattttttgaaataatgagatgaagtcacataccaaaattaccaacaaaactaactgaagccttgagttgaatattgttgttattgaaaagaaagtgattcatgataagcttgttgttttgttgagtgggattttgagtacattgaagggttttataaggccaatggattgtctaatagagctactgatggctaggtccgttatcgctcgtaggtgggtaaagtctccaattgtgatgctggtttcgatatttcgaatgctagagatgatttcggtgtagtgttgcgggattcttttgctagtgttcgttttggctatgcttatggtagattcggattatctcaatgttatcaatgctctaaaaacttatttggttgattgctcttatttaggttgcattattagagatattttagcttattgtttatgttcaagtgatttttgttttgcttattgtcttagaattactaatagtgttgtttacttcttggcaaaactatttctttttttgaatgattattttgttttgtagtcgagctatggttatattagctgtattaatgcttttttgcagatcgattcttattaattaatgatattgttttaacattattttttctttccctaggaatactcacgaggttttaatgaaattagttttcgttttaaaaaaattgatttattaaaattaaatatttaaatattaattttgtgtatattaatatatattttaaaaaattatcgttagacaactatatatatatccaaccttaaaaaattcacttaaatgttgttgttattaatttatagttttttttttttttttgagtattttaaaatttaaaagattaaacatagttccttaatcaagtcgtgtaggctgattgtctcgccaagtcctgtggcagtttaaggaaagtggctccttctgtggttactagtttggttcaagtttttaataaagtcacttaattatcaaaaaaaaaaaaaacatagctccttaatgaatttttaattatattatttgcgagatttatcatcatgtaacttttgtttgatttgcttattaatagaaattttatttattttttttaaaaagaaaatcctttaaaccttgtaccaccatattgctaaattattatttgtttattcattgttaaaattatagtaattaattaataatagaaaaataagattaactaaacttatgtctatgttgataaggttataaatggataacaaaatacataataataataataaaaatttgtatcttcaaacaataattaaataaataataataataaacaaaatttgttgtgagaatattgtcttgccatcttattatccaaagtaacccaacaatgagtaagaatgtcaatattaacaacataactacataaatagagtaatagagtgtaaatatttaaatatatagaataatttatattgtaaatacttaaatttaatttaataataatacttcatttatattttgtaacttttttaagtaagttattatccacatattgatatattaaaataatttttaaattaaaattaaaaaattaatagtgtgaaccaatcaaaaataatcatcaatttacaacgaattaaacataaatatttatttaacaactacaataaaatatgagtatttatataacaaattagtcagataaacatataatccaaattgttattcaagattaaaatgaattattattagattgctaaataaataaattaaataattcagtaatgattatgaattaatttatgtaattattattttctaataaactcaatcatcatattattcatagggttcaatttcaattcacttgcttttttttttctcattctattccacaaacaatatttcaacgaccggccggtggtggttgtcgtggcggtgacggtgtcgtctccttagatctgaatcctctatttcctcatctatctggtaacgcctcaaactctttcctcttcaatttacaattttccatttttctttgatttgaacgaatcaattaattttcagtgttgtttatggtaggacgactcacctatttcgcatcgccatggctgctcctcccgctagagctagagccgattacgattatctcataaagcttctccttatcggcgacagcggtaccaatttcttgtttttgtttcagtttattaaatttggggttaaaatttattgtattgaattaaattagatttgatgtattttttaaggaatgtaatgtagttttagagattattactcattggatgatatgctaatgctcaatgatatgctaatactcattggattattactcttcaatttatgaaccaatccttgcttttgtcttgataaaactttgaactttttcaactgactgagtcacaatgtttgttgaaaatggtattatttggataattttggtgttgtttgatggtacttttcacttttcttataacctaatgtgtatacaatcagccccagaatgagatgagatatgaagtaccatacatgtttgttgtgggttctgaatcagctctgttttgttttgttgtgttgtgttgttatctacattggggattttgggggtgaatgacattgcaggtgtgggtaagagttgccttcttttgcgtttctctgatgggtccttcacaaccagctttattacaaccattgggtaaggtgtttttaacatttgtagtcctgtttttccgctctccttttcattgttcttgtttaaacttaaagtcagttttcaccaatatggactttttctgttttaacagcattgatttcaagataaggaccattgagcttgatggaaaacgtattaaattgcaaatttgggatactgctggtcaagagcggtttcgaactattacaactggttagtaatttactcatcattgaaaatgttagagcttgatagatttctgttggctttatactcaagagtattctgtattctgccctcatttgcagcttattaccgaggagctatgggtattttgctcgtgtacgacgtcactgatgagtcatcttttaacagtaagatactatttcatgcttttattcattgcaacagtaagctgtgtgttttgctgtgcttctatttgtcgatgaattgtaactaatcttatttcttcttgtttttagatatcaggaattggattcgtaatattgaacaacatgcttcagacaatgttaataagattcttgtgggcaacaaagctgatatggatgaaagcaaaagggtttgctctcctctctcaatatctatacgctatgtgatatggtgattgtgaatgttgtcttgattcgtaccccttttttcaggctgtccccacctcgaagggtcaagctcttgctgacgaatatggcattaaattttttgagacagtgagttgttactttttgctactaatggtggaactggtgatcagatttattttttactttattaaatttgctgaaacgtactcatcggttgcagagtgcaaaaacaaatttgaacgtggaggaggttttcttttcaatagctagggatatcaagcaaagacttgcagataccgattcgagagtcgaggtatgtgccattggaatgcttttcaactttcagatgaacatgtatgtattagttgttagcatcgtagggagggagagccttatttacgtactgttattgaacggttgcagccacagacaatcaaaattaaccaaccggaccaggcagggggttctgcccaagccgcgccaaaatcatcttgttgtgggtcttaagaccgccaagcaaaaagcgattcaaaacgggtaactttagaaagcaatcattcatcctttcggttggaaaaaaaaactgattttggtaccaactatgtcactggcgcttgtattgcttttctctttgtcataattctaaagttagtttgggtgtgaaaggtagaccgagtattttcttatcaaattaattacatattattagttcattttcttttcaactcattattaatgttgttttttttttgttgagcttgggaaaagagtatataaaagcctttccttttgtggtatatgatgagttgggagaagaggcatttttgagtgtttctcaactctgatttcattcaatgcattcctatgaagtactcactttattttcttactttcaaactttttcaattgaagattaaaattgattaatccttaccctttttaatatatatataaatacatataaatgtttaaaatgatcatgttcaaagcctatgcatgtggcaatatgggattggttgggttctgcaaaggcttcaaatataaaacatttttctttatataacaataaaaaggaaataaaagtcttaatttataaattaagatattgttttgacaaataatttagataaaagctgaaattgtatgctaaaggcaaaaatacacaccatttttttaatcacaacacacaccactcattcattcaatgtaaaatcttttcaagtcatgtactttttccaagttactttttgagaaagttaatgatattttagtattcatatttcatacttgtttgaccaaaaagacaagaaaaagttaccattttgtttttatagtacccaatgtgtctcaatttagcattttaatttaatttaataaaataaagttaaatactattcaataattgtaatttgaatcttggagttaaacaagtgaatatgtatgttaatataaaagtgaattattacattgctaactaaataaatggaatcagtttgtaatcataattaatttatgctatgctaagtagagtggattagattaacaaaataacattattaatgaacaagactcccaccacaaattactcacaaatgagcaaataaaatcattaattgtatatattgctcggagctcttgttctttttctaatcgtattattagaagccatgctctcccttctaatctgattttgcttttgaaccaagatttgttgagttaatcaaattggctccttttattcaaaatagaacacccttagtaatatgtaattatatagtaattatagagagataatcatatatgggcacaaattaaattttgtgatcaaatagattacgtatagataaactacattactagaagaataaccaaaatatgcaagataaactcctcaactcatcaaataaacatgatatcaatttagtggcattatgtgataaatatttatatttagaataatattttattatatatattttaaaataaaaaaaaaaaagaaaagaaagaaaggaaggagaaaagttgtggagaattgaaaaagcaaagctgaaatgaaatgtatgtaattggttagaaaaagaggaatagctttaataatagtatgaaaatgtgatcatttcttcatgggatagaaagaggctttagagatatgttatgttttgtaattattgactagtagtattgtttcattctatcttattatgatgtgacgctgtataattgattattaatttttataatcttttataaagtaaaataaatgagatttgatattgaattagatcagtaacgatattatatctcataaggatgctaaacactatagatgctctttaacatttttcttttatctatccagggcggccaactcaagagtagaacaacaagagtctatactcaggcccaaaaaataataaacaaaaatgccctaaattcatatttttaaaataacatattttgtatttttactattatttattaaaaaataaaaatattttctaaaaaaatacttaatttatcttttaagaaactaaaacaaagatccaattatatttttaaaatactatattttaaatttttaccactatatatacaaaaaaaccataaatttttcatataaaaaaagttcaattagatttttttagcccaagatccccaattgtcttaagacgggtcatatctatctttttatatatttttatggtcatttcaaaatttcatagattaaattatataagactcagtacttaactctaccaataacgatatgacatttaagagggtgctagacactagtagtcccttttagtattggattcaatattaaattacactaataataatattacacttcataaaaatactatataccataagtaccctttaacatttctcttctatctatttatatatttttatgctcatttcaatatcttgtagaaagcattttgtgcatttgaatatcttatataataaataaaaataaaaagtatatcaaacaaacaaacataaagatcattttttctttctttttgaaaaaaaagttttgagtcaaagcttaaaaggtaaaataatgtccttaaagtgccttcttatatatccaatctatggtatgccataacttaggtccccatgcataaaaccaaaaggatatgaataaaacaaaaaaaaaaataaaataaaataaaataagtaattcaaaagagaaagtaaccaaataatgaaaagtatagtacactaacaatatgttatttataaccaatcacaaataaaagaagttcatatatatatatatatatatattttttttaatataaattgagtccacaaaaaatcataatcataatcatatatatcattcatacctaagtttcagagattgatctgcatgaatttacacatatatttaaatatatagtttgttgattaataatgataaggtatttatgcgcacaaaatcaaattgttcattaaaacatttcacatgatcacataacatataataatgcatgattttggtccataaataaatgaagatgacatataataaacaaaaataaaataaaatacacctccttgtatttagtaacattttcactatattattattgttcactacaaaaaaactgttactttagtgataactttttagtcacaacatagttttttttgttactaaatgtgatttttagtcacaacaaaatattacttgtgacta

SEQ ID NO: 110666 - DNA, 5954 bp, Cannabis sativa
tttgtaagttttttttaaaaaatgccatatttagtataattaagtatttatgccatatatatcaaaatttatctttattttctcatatttttgtaatagcccaagaataactaataaggtacttaataagccgtacaaattaattaacctaataaattaggtatttttcccgcaaacatctattaataaacttatatagataataaatatatatttatataagaacgaagcaaaaaataaaattaaagtgaaacgtttacatattttatattacatatttcatataatgtacggagactctaaatttttaataaaaattatagagttagttataataatatatatttaattatgttaaactgacttttatgaatgacattttataatttcaactagagctaccatcctacttaatttaaacctatcttcatctgtatatataaatataaattataaatatgagacttgtattatatatatatatatgataaatgctaaaataccagtggtatcaaacattcttttaagtgtcaatatcgttattggtctaactaaatattggatcctatatagtttaatataatagcttttacagagtatcgttagtcaatcgcaaagggacacgtcttgagggtgctagacaccactgatacccaataacaatccaacatagatatatgaaagtataaaaccattaatttttaacactttttcttggctttcgatatatcacagctaagcattagcaagtttggcagacccaatgggtaaggtgtttgtgggtcgtttaaggtagagacattgatctataaataagggaatgggaaagtgaaagacgaggttaggcagtgttgtatatatgcttatttttatgacctatttatagcttttatttataaataaattaatatgtataatatcatacttcatacacaataaaaacatgccacaataagaataagagacatatatacttgtttcattaatgtttaataattacattagaaaattctaaatgaatatgattcaatttcgacaactacgtacaaccattttcaacactaaatatttagttgagggaattgtagttttcgaaataatgatgcgataataatcataaataaatggaaaattatataaaatccacttattaataaataatgactggcctttattttatgttattgtagtccggctcaatgtttccaaaactttaatcctaggctatgctaggactcttgtgctaacataataaaatttgatcggcttttaagcttggaactaatttgtttgatgaaagattaacttaattttgtttacttataagttataacggtataatatttatcgaaaaattataataaatgatacaaaattatagtattatgtaagtaaatgtcattattttaaaatttatagagaaatgacttttttacattatttattatttatattgtcttttactacataaaaaaataaataatttttttcatattttttctaaaacatgtggtatagttcctccaaatgaaaaggtctctacaaacgtcatttatagaaagttgttcactcacggttgccagtcccggaataagtcttgtggaatgatagtcgagtctagaagagatttcccgaataactatcatgttctctccgggtccagtcttcaggataagcttgtcactctccaggagaaagttctagttggctagttgtctttcttggaatgatagttttggatagtcgctccaccaggctcaatcctagctattcggaagcatcatcagcgagtgtccatagtccgtgagtttggaagcttatgtatgtttccagaggctctgatactgaagctagtgtgaagacttctctctaagaagagtaactaacttaacaacctcatttcttgcagccaccgactttaggatcttgatcctgagcctataaataccaccttgactttgtcatttttttagatatgagatgacatactaaatagagatgagattgagagtttggcagagaaaagattgagaggtagagagaaaggtgcagagaaaggagagagattggatttggattttgtaagaagaatcttctatagatgaagaagattcttgggtgtaagtgtgagagttgaaacacttaatgaggactcaacagagaatctcgtctcgactgtattgtacctattcttgctcaatcaataaaaaaagatttttatagtgttccagaattggagtagatacatagatcacattgatatataaaacttgaaccagtatatatcttggtgtcgatttttttttttgtatttattattttttagtttttaatactctatttacccctatttttcatctgattgttgttctcaatttgataatattgtcattactaattgtttgattgtttagagttttattgatttgttctacacatttagtcgtaattttcccacaaatcggagcttggtaatcgataaagatcgcaaaatcaagattcttttgctccaatcttgaaaaaactttgaatgtcatcaatggtgagattcaaattggagaaaatcgacgggactagtgactttgtcctatggagaaaaagtctgaaaggaatcctagtgcaccagaaagtctccaagattcttagagatgagaagttattggcagaaaagaaaccagaggaaaaagcataaatggaggagatggcgtactacacgatcatcatgcatctatcaaacagtgtttgaagaaaactcatcttagagaagacggcaaaaggagtttagaataaattggaataattatacttaaagccatcaattgctagcaagattaattttttagaaaggctatacagttttagaatgatttctttcctttctttaaatgagaatattgatagatttaatgagattattgtaggtttggctaacaataaatcataaggttgatgaagaaagctaggccatcatcttgttgagatcacttccaatcgcatatcaagaagtcaaggatgctatcaagtatgggagggatgttatcgcgttggaagatgtacttgcggcactaaaatcgaaagattttgagctacaattgaagaaggaatacaagaaagaagaagtgtatttggaaagaggatgataccaagaaactgagttcaaagagtaaacaccatcactttcaatcaagatctaagtcaagagaaaaggacacaatgaagtgttacttttgtggaaagtctggacacttgcaaagatcttgcaagaagtacaaggagaaacaaagcttcaacaagtctcataatggaaataggaaggaccttcggtaccatcaccgcaggaaggattatactgcaatcgcgaaagatagtgacggctgctccacagacgaagaattattctccatctcagaatcttctatgaacagggagtggattcttgactttgaatgcagttatcatatgtgtccgaaccgagagtcatttttttattataagtcagttgatagaggtaaagttataatggataataatcattcatgtagggtcattggaattgggaaggtggccatcatgcagtatgatggcagaatcaaggtgttgacgaacgcaaggcacatccgaaaccttagacaaaatctcatatccctaggtgcacttgaggatgaaagaaacggatacaaatccatgcacggaagcctaaggatcaccaaagggtctttggtagtgatgaaaggagaaaagatcaatggtttatatgttctccaaggagaaactattccaagtggagaagcaagtatgatgaaagagctagaatcagatatgaagttgtggcatcacagacttggacacatcagtgaacaaggcctcaaagaactgcaaaaataaggtaaaattgaaaatttaaattcttgtgccttaccattttgtgaagcttgtgttttagggaaacaacataagctaaagtttactctagcaaggcacacaactaaaaggatactcgaatatgtgcatgctgatctttggtgaccatagaaggtgcctactctctccggtaagcaatactttctttcaataattgataattatagtcagtgtgtttggacctacttgttaactaccaaaaatgagtgcctggaacagtgtagaattcgaaaaactcaggtgaaaaaccaaacaaaccttaaaattaagaaccttaggactgataatgggttggagtttgttaactctgaatttgacaagatgtgtcaagaattcagaatcactaggcatagaattatagtgaagatcctaaagcgaaatggtgttgctgaatggatgaatcaaaccttattgatcaaagttagatatttactattcaattctaggttagaaaaaccattttggggagaagccttagaaattacaacctaccttttaaacaggagcccaaatagagtaatagacctaaaaacaccttatgaaatgtggtacaacaaaacccccccaacctaacgcatttaagaacatttgagtgtacatcatatgtacaccaatctattgacaagatggaacctagatccgtgaaaggaaccttcttaggttatgcctatggaatcaaggggtatagaatctatatttctaaaaatggtaaaccaaaggttgtgattgctagaaatattgttttcaatgagttagaatatccttacttgacctccaagaagggtagtgtgtctctgtacgttacaagaaaaataaaaaataaagacacctcaagtgtggaagtggagtacggaataaagctcctgaaaaaagtttcataggcagaagatagtgtggaaccagaggacaaagcacaaccaaaagctattgtggagctagaagaacaagataacgaacactaaatagaggtgtcggaagggtttggatagacaggtctggaaagttattagttggctcgtgatagaacccagatagagatttatacttcggcaaggtttgcgaaagcagacataatagcattttcacttgcgccagttcaacatactaaagttgaagagcccaagctatgaagaggcaatttcaagaggaaacaagtataaatggcttcaggccatggatgaggagatggattcactacggatgaacaaaacttgggtagttgtgccaaagtcagagaacaagaagattgtggagtgtaaatggattctcaaggtgaaagaggaaatcaataaggatgaacccacgaggttcaaagtcaggttagtggctaagggctttactcaagtagaaggtataaactatactgaaatcttctcacttgtggtaaaatacaagacgataaggctgatgctgtccttggcagcacatttggagtttgaagttgaacaacttgatgttaagactactattttgaatggattcttggatgaagagatctacatgaagcaactatctagattttaggtggaaggaaaaggagttgaattggtgtgcaagcttaacagattatagtttgaaatagtctccaaggcaatggaataagagattcgatacatatatgtatcaaaatggtttcaaaggagctgcgtacgatcactgcttatattttaagaatctagaggaatctaaagtcgtcttcttattgctctatgtggatgatatactcatcatgagcaaggataaatctgtaatcaaaagtatcaaaaccaagctcaaaagagattttgaggtgaaagagcttggaccagttcaaaagatacttagtatcaaaatctcatggaaccggaaggaagggactattagcctaaagcagtctaggtacatctagaagattactcagaaaagtagatatggaatctatatcttttatccaaatatagaagtgaaacgatgatttactttgagcttggcttaatatagataaatgatagagcgctcattttagtgataatattagttaactgaaatatcat

SEQ ID NO: 110667 - DNA, 2661 bp, Cannabis sativa
aatcatacagtcaagtacaagcccatactcgagcccggttttgcttgtaaagaaaaaagatggtagttggcgtttttgcgtggattacagggctcttaaccgagaaacggtcgctgataaattcccaatcccggtgatcgacgagttactagatgagcttcacggagctacaattttctctaagatcgacttgaaatcgggttaccatcagattcgaatggcacctcaagacgtggagaaaacagcatttcgcactcacgaggggcattacgaatttcttgtgatgccattcgggttgaccaacgccccagccaccttccaagcacttatgaatgaggtatttcgtgatttttgaggtgattgtgtattggtattttttgatgacattcttgtgtacagtcctactcttgaatctcatgtcattcacttgcgagcggtcctcgaacgactacaacgtcaccaactgtatgccaacagaaagaaatgtactttcggtcaacctaaggtggaatatttgggccatgtagtttcgtccgagggagttgcagctgaaccgagtaaagtggcagcaatggtttcatggccgaatcctcaaaacatcaaagagttgcgtggtttccttggactaacggggtattaccgaaagtttgttcagaattacggaagcatagcccgacccctcacggatcaattaaaaaaagatgcgttcatatggtcacaagaagcacaagaagcatttgaaacactaaagcgtgccatgtgtacggttccggtgctggccctaccggactttacaactcagtttgtgttggaaactgatgcttcgggcagtggccttggggctgtcctcatgcaaaggagtcgcccaattgccttcttcagcaaggtgctttcccctcgtgctcgtcttaagtccgtctatgagcgcgagttaatggccatcgtgttggcaattcagaaatggcgaccctatcttttaggccgcaagtttacagttcgtacagaccaacgaagcctcaagtatcttcttgagcaacgtctggtgtccttggaacatcaaaagtggcttaccaaactactcgggtatgactttgaaattcagtataagccgggccttgaaaatcgggcagccgatgctctttctcgcgtcaatggggaggccactcttgctgctatttccattccaaacttattgtccataccagatttgcaagaacaaacggcagccgaccccatgctctctactatcatcaagaacttaagtaagggcgaaagttgtggaggatttatgatggtgcagggatgtctcaagtttcggggacggctagtgcttccagccacttcccccttcatccctctattgttacatgagtatcatagcagcaaggttggtggacattcgggagtgtttaaaacatttcagcgtttggcgtctgagttctattggcaaggcatgcggaaaacagtacaacagtttgtggcagaatgctccgtttgccaacagaacaaatacttggctcaatcacctgcgggcctgctacaaccattgccaattcctgagcaagtttgggaagatatctccatggatttcattgaaggacttcccctctcccatgggtttgattctattcttgtggtggttgaccgtcttactaagtatgggcactttatcccgctccgtcatccatattcggctccaacagtggctgctcattttgtcaaggaagttgttaaacttcatgggatccctcgctccattgtctcagatcgagacaagatttttctcagcctcttctggaaagagttgttccgtttgcaagggacggcattgaaacacagcaccgcttaccacccacaaaccgatggccaatcggaagttgttaatcgctgccttgagacatacttgcgttgttttgttagccacaagccgaagcagtgggtccaatggcttccttgggccgaatattggtacaacacctcgcatcactcttcttctggtatgacaccctttcgcgctttatacaaccgtgacccaccaccgttgctccgttttgaatcagccagtacgaaagcttcggccgttgagacgctacttcaagaccgtgactcggtcttagacttgctcaaacaaaacctcatccgtgctcaacatcagatgaagcttcaagctgaccgtaaacgaagggatgttaagtttcacataggggacatggtatacgttaaactccgtccgtaccgccagcgcacggtggctaaacggcctaatgagaaactgtctccgcgtttctttggccctttccaagtgctggagtgtattggtgctgctgcttatcgcttacagctgcccgctgatgcgcaaattcaccccgtgttccatgtctcgttgctgcgtgctgctcttggtactcatcaacaagcctctcctctgccacctggtcttacagcagaccttgaatggacattggaaccagaatctcttctcgccattcgtcctggtactcacaaagtcagcccacaagctctcatcaagtggcgccaccttccggaatatgaagcaacttgggaagattttgaggtgattcgctctcaattccctgatttccaccttgaggacaaggtgcgacttcaggccggcggtattgatagaccaccactcacttt

SEQ ID NO: 110668 - DNA, 1867 bp, Cannabis sativa
ggatgctcaaccttagccttgcccttacctacacatgcaaacaatatttgtgagtcgatagactcagtaagaaaagcataatcataacataaatatcaaccagattataattaggcgtccacacacccaatcataatcctaatcctgcgtcccacgcgatactaagtctagaacgttcgtacgacaatactattgaccataatatcagcctatactcggtactttagtcgtatcgatgtgatagcatcaatcagtacttaagccaaacatacaattgtcggtaaccaatataattctatatatactgttaccgctatttcaatgcaatctattaggcttaacaaacatgtacgctaaatatgtaaacacatatgcatgtcaatatactaatcttaccttaattaattccaaattcaggtgtgccggtcaacctgagtgaaactcctacttgatggtttacaggcccctaaattatgaaatttgtaagactgataagtgatatgctaaatcacttttcggggactttaaacttaaaaataaaggtttccctattgatctctagcaaaacaaagtcctaagtatcgagaaacacaagaaaaacatcaaaacagggaacttgcctaagaaacggtaggccatttctaaaaaacaacaagctattttttgggtcctgcaccaggaaaaatggtaggctgtttcagaaaaatggctgcaaaaaatgaaagtccccccattttgaaccaaaactatcccaaattacaccaatagcttttgaacaactaaatacaacataataaactaattccaagtagtaaaaccagcaataacacaaaattacaaaaattaccatagttgagccaagtttgagttcttgaactcaaacttgctcaaagccaaccacaacccttaaatctaccccaaacaagctcaataaaatttaaattaaccactgaaaatagcagccaaacatttcaaacctaaacagcaactattcggaaatttgcatgcttaaactaaacaaaaccttcaaaaattcaaagggtaaaagggttaggcttaccttgagttaggatcactacaaccttgccaactcccccttgaattgcaaaaaataaaattgaattccccctgatttccttagttgaaccgaacaagagagagaccaaaaacccaaatttctaattttcttatcttttttccttaattcccactaaagataatccaaccttatttttccttccttagtggccagctgccactactaagacatgccacctaatcacaaggtccaaaatgacctcatacacataactaaagggtaaaataacttaggggtaaaatagtcaaaaatcacaaccccgactaatcccaacatttcaaatgtctacgtaggtcgccccctattttaaaaatactaaaccacactaaagtgattctataggtcatacatcgcgttccattgttatcggacacaaaatacgaaaaaacataaaatttatatttcgcataattagcacacatagaaatcaaatatatctccataaatttataaatcataactacaagtctaattccaaattaaattttaattacctactaatttcattctaaaattaaacggtcgactttacaaccgatattaactaggggtgttcacggattggtttggtccggattttcatagtttttgaaccaaaccagtataacggttttttcaatattagaaaccaaaccagaccaaaaaaatttgtcaaaccaaaccaaacctaaccattaagaacggtttggtttggttcgaaaccacggtttatgtggaattgataattattcatatttttttagtaattgtactatttttactaagttt

SEQ ID NO: 110669 - DNA, 1892 bp, Cannabis sativa
gagagagagagagagaaaagaaaagaaatgtgactttttttttttcaaattttctaactttgaataaaagaatagatcttattaattatctaacatatattagcttaattgagattatctaacataattaaaaatcactaaaggacaaataactcaaatggcaaaaaaaaattattttgcccttgcctaagccaaaaaagcatccttaccacctagggctaatttggtcaaaactaatatctcgaatattcttggcatcctcaatgtttatctatattatcctgctattactagaatactaaaccataagaaaatgtgatcctatcggccaaacgttgcgttccaatattgtcgggcataaaatataaaaaatgcgaaatttcatatatagcttaaatatacacctaaaatttaaatctatcaccataaattcataaataataattgaaaatcttattctaaattaaaccctaattatctgctaatttctataataaaattaagcggtctttatagggtagctgttttctaggctgtgaggtttgtctcctccaattcctcgacataaatcccacaatgtcaagggtcgcctattgcctctaaaactcaaccttgttttccattattttttccacaggagaggcctgacattgaattttcatgccatgatgctacaacaacgtcttcaattctttaacttcaaaggctctgatttcaccgacacttctcaattagtcaaggactcttcttttggcatgctagcgacacaactacaattaaatctttatttttgtatcatttttctctttattagcgaaacatgtaaacattaacaaactgaagcataaaatagaactaattaaaactaaaactaaataaaaacacttagaaaaagctctaaaataacataatataacacctaacacaaattttggtagattctatatcaaaaagcaataaacaacaaatattaaaaacaagataaaagaaatgaacaaaacacaaccaagtttatactgtttgggcctactgagctcctccaagagattccactataagcaaaacaatttgttacagacttgtcttagatcagctgagatcgatttggacaacatgtacgacttagatggaaagccatagaacccttttacacccaagaacttgtgctgtcactcaacacttacaactctctctcacatcccatacaaatctctcaaaagtgtttctaaatttctctctctctctcctttgacttcatgaaaatgaggacttcagaatatataagtattagtctgtaacaccaaataccgaaaaagtcctttaaaaaaatttgtaattagaactgttaggtttataagaagtacacatcacaattttgttatggttttctcctttataagagtctttccccctgtaataattcattgaaacatcttcaagtatgataagatatattcatgtatcaaataatacatattcaaaaagatcaattcttacatttcctaataccttcattactcaatcctttattagggtgttaaatcagcctatggttatttaagattagatttggttcaatcaagattggttgttggctagtgcaggtgtagtaattaggggccataatgttgcagcaaagcaaataaagtgtcgagatcaatgctggctgcagacttcaagcaatattcaaaagtttatggctagttcaagcctatgagatgtataatttcaataaatattaatatatcaacttcgtataatttcaataaatattatcttggttgtattatttgttagagattttataacaatggaagaaaatcaagatttattacaactctattgtaaaataatacaaggactaaaataagagattgattaaatatatgcta

SEQ ID NO: 110670 - DNA, 3785 bp, Cannabis sativa
atgatagattttaaaaaagaaggtacaaataaaagagaacaatataaaaagggtatagaatgtaattttctctatatattcttctattatttttgttaaggggccctaagctcgggcttagtccgtcttagtcgagcaccgactctaaatttcaatagcttcttataattatttatagatatataaactagttgagatattcatacacaaataccaattttagcttaatagtgaaaatctataaaaagagggtacaaacaaaatgttatctgaaattataattctggttttcatttaaaactaactaaagaattcacttccattattcttggaaaaataaagtcaaaaaaataacagatatcaataataaaatttatttttattcatttatttgaaataatttaagagccctccctcccattcttctggttttctctttactattttccacatcaatcttgagttttgattttccttccaatttgaagtagtcagaatagtcctgtctcaaatttcagatcattaattaaacaaaaaaaaaaaaaaaaaaatattaatttcatgacaaaattatggtattaagaaatttattaccttcctaaactcactaaattcatgataattctttgtttcgagtcgaatctccaacgacattccatcctgttgctcgaattttcgagcaatattctcatatgtagacatgccatctctcaaaaatagagaattacatttactcccacaagaacaatcattccaattagttgcatcatcccaaacttcaaatctcaaaaatagaaaattagatttaattaaaaaatcaaaatatgtacccgaaaaaataatcttaataggtttttctttttaccgtggctaaggcaaatgcaataagaaaggcatgaattgcaaatcaagtaagccaagtaacaatcttgattgcaaatgctacataatacagtgccttgttgatcactgaatcgaatactgctcaaagatcttcgcaaaaccctactcaaacgccacaaattttgctcgagggttctaaaaaggcgaacgaaagagagcttagtagagaagtaagaacccgagttttgatcatttttcgaagaaaaattgtgtaaaagcattgcttctttacacaagagttcctcataaggaataataggcaaaactcttagtaatgcataactttgcctagcttcttccccgaaaggaaaccaatcgccaatcgcgaaattcaccgcctcgccacaattaaaacctatttttttttcaccataagaaatagtcaaaagacatgtgaataaaatttagggtaaaaaaaaggtgttatgaaaagaattttgttaccatggctaaaaccagagtggtatgctttgggaaatgttattacaaattcccctggcttttgtatagctttgtaaataggtacattgttttgaagcaaaatatttgggggaaacattgttgttttctctgcaagaagtttcgaaacaccatttttttctttttcttcgccattgtagatgtgattgaggacgattttttcgaatcgagaggcgaaatcacaaggcactccgtaccaagtttttggtgcaccagagtgatgataattaatgctacaatgaaaagaaaaatgttatcacaagggtattatagttatttcataataatattatgaattttgagggaaatattggaaaatgaaaaatatttttgtacctgtataaataatgatcttcaacatgccatgcaaacatactatataacatgccaatgtatagcataggatctgttattccctatttaaaaaaagaaaaaaaataaagtgtataagaatgtgaaaatagtaatgataattataattataataataaaatgaataaaaataagggtttttatttattttttattctttttttttttttaccggaataactctgtccaataaacgaagtgtagaatttggaagcttggaaagattctgtgaatattaacaaagaaatataaatcaatgaaaatagactttttataacacttttaaaagaacatctgtgttataaaaaaagtgttataataaacctttaaattccatttgcttcttccaagattatcattaggattagatgaaaaagcacttccatcaatattgattccatactcaacaaaacaacccttttttccaattaacatttcatgccaaaaattcttttctataagaagagaattagaagactgaaatcgcctcttaacaaacactttgttagccatagtttcgaattctctataagtatattttctgaaaataaaaaaagaaacttgatcaaataatcatcacttaattcatcacaaaaaataatgtcaacatacaaaattaccttcctctcttaaaaaaggtgaacttgtccttagaatccttaattcgaagaggttgaacatttgtttcgaatttgaaccctttaatctcttttgagagtacaacattggcttcaacacaaggttttatgggagaaacaatcttacaaattcctaaaaaacttcaaaacaaatcggttagaaaatgacatcgaaaaagaagatgagaattattagaacataccatattttgaagcatgagatgaaatggtttggagatagtgaaatggatcatcaaattcctccattgttggatgatatataggacattttggaatattttctatccattgtaactcaaaatcatttatattattattattcttatttgagaagacatgttgatctgttaattacaaaaataatcaaaagttcattaaaacaatattaaaatatatatgtaggatttaatgaagttgaataaattagatgaaaaagactaacttgtgttctgtgaaggcattgtttttgagagaaaaatagtcgtatgaagattaagatattataatatgtttttcaattttttttgtttgtaactttttgtaattgaatttatatataaatatatttaaaagaaaaagatttaaaaagaaaaaactgtacaataaaaccgccatttacactgttttgagtgatattagttttttttctcttctctttttttttctttttataaaatcaaaataattaaaaaattatatattttaatttcattaagaaaaaaactctctaaccttatccatatataaatttttaaaatgcaatctttatccggattttgaagtgtttttttaataacatttgggtttgtcattttgttggtaatgaatttttacgtattaaaattttttattttttttttattataggacataattattttcaaaaatattaggtacagtgttaagtttttattattatttttttaattgttttattgttgtttttaattattctattttgttgttttacaaatgttatattattttttgtaaaaattaactcactcgtataaattctccttttcataattgattattattatcattattatctatgccagtttttagagtttctagttgaagaataccttatatccaaagatattgcaacaataccatattttttgttcaatattcctattatattctcaaattcctaatccaactctcttttcatattattatcaagtagattttcacttttccatttcatttgtaatcattaaattttaaatttttctatttgaaaagaagaaatattttatgttataataacaataatcaattattctagggaaatttacaaggtatactaacttttgctatttttttacaaaaatactgccaagcggtattttttacttttttact

SEQ ID NO: 110671 - DNA, 1124 bp, Cannabis sativa
tttttttttttttgtatttgtgaaataatcccaaatttctattaatctttttctcctcctcaggtgtgactgtaaccaatgcatattttctaatttttgtatagattaaggtgtatttataagattgtaattgtcataatcaaattatgatattttcatttatttctcatgttcatacgatattataagttaattaaacattacataatacgacagatacttaagaatacacctggcctatgaccatgagcagtgatatatattaagacagttactaaaattagctaatatgggagaaaagttgaaagtgattagtttggtattaataattgtaacatttacaattattaaaatccaattaagtgaagctcctaacgtgcacgggtcacaaaactttgataaatatatatattatatataatataaactatacatatatagatctttatatataacaataatgcaatattcaatgattgatagatgattaatgtcacgctgtaaacctaatagaaatgttggaaaaaatcaacgatgaaaaatgtaaattaattaaataaaataatcttaaaactttgtatatttattattgacctaacaactatacatgattgaattgaataattaaaatgaaaagaaaaaaaaaagggtgttatgatggatatgcacctgtgctttgaagaagtaaatagaaaattatgacgacacaatataacaactttcttgttaataattataaattgtaggccccttaacaatctagtaatacgacaataatgactacctgcaacttgacttctttattaatttattgttttttcttcttaaaaattatgtgatatcggaacattaaatcctatgatcatagccgataatatataccacaaaattttgaaaaacacaatacatatctcatataaatatatcaatgcattaattaattcaatttttaaagtctaacttctgttagactataatctataatataaaatagagtatataaaaataatatgtaatgaagaaaatagtataaatatatcgaaaatatatatgtaatgaaagatcgaaatactttcagacattgatttttgaacttcaattcctgcgatagcttcggtattgga

SEQ ID NO: 110672 - DNA, 4388 bp, Cannabis sativa
  modified_base (2684)..(2688): a, c, t, g, unknown or other
ttttttttttttttttacattaggcgggttgtacttaaattttagcaacccgaactctagattgggttagaaaatatataggataaaccgcccaaaccgaccgatgtacaaccctaaaagaaagagaagagaaacaaaattacaagggtcatcgccaatccaaatagcaacttcatctaatcccaaagctaattttgacaaattgtgtgcaaaaatgttagccgtacgtttgacgtgggtgattgaggtgttggggagctaagataaagttaaacgaatcttatttatgaggtccccaaaaagggagaggtcttctttggttgtttttagagcgtcagtgattgatttacagtctgtttcaatttgatggatgggaaaacattcttaatagcacaatcatagcgatgtgattagagcttttgctttaagaattgctgcatctcctccgcctatatgaggcgttgcaaaagctgccaccacttcactatcactgtttcgaatcactccaccgaatcctgcaaggtaattattttagtcacatgtcgcatttgtgttgagcttgaggaggccctttattggaagattgaaatttgtggaattggagggattttcaaaccccctcccccttccacttccctctaccaaatattgcctatccttccgttactctccttccttccctttccatccctcccaaatccaagctaccaaacatacactaaacacctatttgaggttggttagcaaaatgttcatccaaacacatcgacaataacataagttttactcagggaatatactcgtaaaggtgagaagagtatatacatctacaaagattaatcagccaaagtggtcaataactttagagaaatttctcaatacaagagaggccaagtaattctttaggattatatgttggttaataacaatggagaaagcatccaaggaagcctctttggaagagtcgcacctttgacgctaaaacacacaagtcacaagtcacaagtcacaagtcacaagtcaagtcaccacgcacgcacgcacaacacatttactcgcgcgcctacaaccttcttttcttcttctctctcttctgttaactgacgcccccagcgcaagatagcaaatttccattagtcaaaacacaactataaagttaattttaattgtatatggttttggttggtcctaaaacccttgcaaaaccctttgattaatttttacgttcatcgacgacctcgcacgatcgatcatgttgaagccactccagctggtgaaggagaatgcgtctgcgcacccgaaaacctggatcgccgttggactcggggtcgccggagtcttgattttggttgagactagccgccgccggaggaggagaatcgccatggttggtaataaagaggatttcggtgctttcttggagcgatttgaacttcttcctttccttcagcctcctccccctgccgctagactttctctttctgaactcaccttcgccatttccgacatgtatgtattccaatatttatcctttatgatgatatcatgtatgtatgcgtgtattttgtgtttagatatattgtttttggattgtggattgtgtagatttgaagtgaaagactatttgacggggtttgggaatccggattggcggagaactcatgaggcagctgagaagacggcgttggtagtgacttctttgctgaagaatggggctaaatgtgttggtaggactgtcatggacgagcttggttttgggtaagactcggaaacctgtctttctacctcctatacacttagttcggagggaataagatcacggttctttctatatttgcttttgacctttattttttttgggatgtttacttttaggataactggggagaatgttcattatggtactcccgttaatccacatgtaccctcctgcattcctggaggttcatgtagtggttcggctgtggccgttgcagctagacttgtcgactttgctattggtaagcttgtttgccgattttttcttaattattgaataccgactcagctatggtgatcaaacatattggccctgcttctttttctcttggagatttacgttcagttttattgcatttcatttattgtcttcagggtaggctttatctgatttgtctaactgttgcaatgaaagtcatgatttctagaaattttatactgatgacacaacatcatgattgggatttgattttgtgttgtatcagccatttccattcccgtggatcatttgtgctcctaatagccacttttcttctctctctctttgttctttctaatgcgccaaacaagacaggcacacagtttttacagagtaaaccaaaacatacaaatatctgtatcttctatactaatcagatcccatatttcctttcgttttcctcacaaaagcttttggttaacttccattatttgtgcgtatacgtacatttgttttcactaagccatttgatttacaattttatgtactttttaacctttacaggtactgatacaactggatgtgtaagaataccggcatcattttgtggtttaatagggttccgcccctctcatggagctgtatctacaattggagtgttgccaaattctcaaagtttggatgctgttggtatgccagaagctgtttctctctctctctctctctnnnnntctctctctctctctctcgttttttttcttcatttgcttctgattttatttatttgatcaataacttgtttctgacaatatcgttctgtattatatttaggaatcttttccagcgacccatctgttctacatcgtgttggacatgtcttgcttcgactgaattcagtggaacctaagaggcccagacgtcttatttttgctgatgatctttttcagctgtctaagattcctacacagaggacagtacacgttgtcagcaaagctattgaaaatctatctgggtgtaagttgcagcgcttttcgaactaagttatttctcaactatcaatcgtggtttaaatttgtatttttttatactgtttaactttgccatttagaaaagggttaggtggggattctagtttaaagaaaaatagtagcagtacttgtaataaatagacggaacttgtggtattgtggttgccaatgatttatccatcttcctagtgtgattgatgtcatatattgttgtgataaaagtaaaagtgatgataactgtgtggtggttattttcttgttggttttgcagaccagccaccaaagcatatgaattttggaaagcatattgcttcaaatgtgcccagtctgaaaggcttttgtgaagtttcttcaaacgttcaaagtggagcatttgctttgaaagctctgtcatctgcgatggttacattgcaaaggtattcaagatagggttttatctatttaacttttaatttgtgtttattgaaccaaaccaaccaaataaactgttaactgctggagtatatatcttcaagctaaatgtttaaagccgtgtggaaaactcgctgcttttgtgcaatagtttaacatttttgaagtactggcattaaataaattattgcctgaaagatgaattagtatttgccaaaataaacttggtttggtactttgttcgtaaaaatggctactcgttcccatgcatgttgcagattatggaacagcctggtcttgtagataattgtagactggtgatgtcttaaaaagttaatagtaaatgtgctaattctttaggactgattagtattatggaactttcaaataatgtttttcttctcaagacttaatcctgggttatttacccaaattttatagggttttctagtattagatttggttgtgatctctccctctctctctttgtattaagttgttgccattgcagcttcagtcattggagccacctttgctgacttttgactgattaatctttataaattgaatagtactcttgtttattttttcgttgaggatctttaggatttggtgctctgtttttctaagttctgtaaccatgcaattttcttctcagatatgaatttaaatcaaaccatgaagagtgggttaaatcagttaaaccgaagttaggacctggtgtatcagattgtgtatatgcagcaattaagacaacatatgacaatattaaaaccttgtataaagttaggactgagatgcgagctacccttcaaagtttactaaaggtattatccttttcttctttgaattccttctgtaagttattgatatttgtatcactgcccctttttttttgaaatatttgcaccaataactattattattaaattatttaagaatttacccttacctattttaatactcacaatttaggcatttcttttttatag

SEQ ID NO: 110673 - DNA, 12991 bp, Cannabis sativa
tgacaatatatgttggccaatacaatccacctacagcataagtgaattttaaatacataaacatcattattaacccaaaaaggcacaaagtttggctcagtgtaccacttttacctgcttcttgatacacacagtaaaacactcttgcataataaccacaggaagtagattatttttaggcttgaaattctggacccagctaagaacccttgatggaagggtgctatttttctggaaaggtaagagctctgacagacgagaattatcctgctccaagaaacaataaaaacaattacaaaaatccaccaaaggaaatctatagaagctccagatttggggagggaggcaacttgcagaaattgtgataaaaggaaaaggtaccttcgaggaaggaagaacagtaggaaaaggaaacaacatttccaacatcttagagtcatcctgtgtacgaagatactcagattcaccaaactggaaaccaaaagtatagtctgttccttccgctgcagaaaatgtgtcactctcacaaaatatagcctttcgtaagacctcatcatttagaggaggcaagtagaaatttctggataaatttaatgctttccaggctgctttattcctagaaaggatctcttggcacacactgataactggattttctggacagaaggctctcaaaagatgtaatttatttgcatcagtttcagtcattttctctccacctgtgatatctccattagtgtcaacattaatcagttttttctccattagtgtatcaaccaaatatttataccaatttttttcagagcaacccccaggcaaaagttcatgtttattgcctccaattttttcaaatgatcgaataatattgttcttatgccagtcatcttgacaaaggtatcggaagatgtgatcaccgtgacctataagacccgataatgacacacaaaaagcttctgacagtgttaaaccggcaatgctttgaccgtgacaaaaaccatcctttaaactgccaaaatcagcatcaacgtcattctcatatcctctgccagctgttactgaggatgttattggaatatgccgaatcagctgcagtgacttcccagcagaaacaattgccctagctatgtccttgataaacaaaggacaagcttgaaggtccacattggtccggtccttccctttagaactagaaatcgagatggtttctctttggccaacttccttcttttcattttccatggtaccaagtccataggaagaaactagagcagttatatcagaatataattctggacactgtgtttgcctaattaggtagctcttttcccagaagtcagcctcatcaacagatgtcgttctattagaatagaagaacatctgcatagaggaaaataagatcagcaaagtctagagagtctatataaataaaacattattaaaacagaaacaccaccaactatactctgtctgcacaaatgatgaaatgaatctatacattgtacagataaaatacaaggcagaaagcattcaactaaataaaggacaataacaatctatcaaaagagaaagagtactcctttatatacttaatttttgtttgtgctacattacaattctcataagaatcggagagagaatactaccttcaaatgcccaaaacaaaacgaaattgtttacattttaagacaaaaagaaaaggtttaatacaattacctcttcatgaggatcatcaagtgttccttcaaaaagccatgaatcaagaccttcaatatagggcaacaaacttccaataaacatgtaaagtagcatctgatatccttcctcctgaaattattaaaaattataaactttgattgcacaatgaagagaacacaaccaaaagcaaaataccttgccatgaaactcgtcacaacctcaccaccttgagcaagacacacttcatctagtttcttgtaaagataatcaaggatatgaactgctatgtcagctgatggaacagaagaatttgagtcgaaaaatagttgaggaacagcactttgcactatttgcaataggtactcagcacctgaacaaaggctaatataaataaacagtaatcagcaatctacataacaaaaacaaatcaagagagcagttgcatcatccacttaatgaaccattgatggaaccgaaacaaattttagcaaactgaaggcaacatatgtcagacatgactgtcaaataagagttcttaaagctacatcaacaatcattaaatacaaacctggataaagaatttgtcaatcctaacaaggtaggagtaaatccagttccagcattgctcattttcgtttgttcctttagagcaatatcccgtaatctctgatgcaagaaagtaagttaaagaaagaaaaaaaaattagaatgaacatagttttattcgatgattagctttcagatacatacacgaagccaagcagaagcagcgcatgcaaatgctctcaaagtaggaggagaagatcctgtccgtttctcaactttggcaaccacaattcccaccagttgcaagcaagttccggcatacataagttgattgataacggctttaagacttgtctgagaaagatgagcaacatatatcccacttttggcacgaaaacagttgtcatcattgtcccaataaaataaggaactagaaaacccttgtaacatttcaagtaaagctcgcacctttcaaagtaattaacaaatgaactagataagaaaaaccataacacacaatcataaatcaactagaaaagaatgagacattaccaagtcaaattcatttgtcctcaaggaggaaattggtgaagcgaagtgtgtgccttcagagaaaacaccatacattctattgataaagctttgagaaacttcaattttccccgcatctgatgacaaaacaaacaacaacagcattcaaaaattcaaactgtactgcacaaagctcaattgctgtaacacattataaataataatccataaattttactacacgaagctacggtacccagaaaaggaacaagactagaaaacaataccgtaacaaagaggttttcccatggagatgatagcgaaagcttcaaacaacagcaacccccaatacaataattaatactagaattggaatttaaaagctgaaatgaaagtgaggaatacggaattagagaatgtaggttaaggtttcagatcctatctgcctactgtgaagccagaataattcagtgtcattttagccctaggcctcacagaacagaccaccggagaaaaataaagtttactttctcttcccgccggcgttgaataatgatgatttcaagtgtttgcctactctaatagtaaagacccaatcgtcaaatattatttccacaaataactttctaaaaaaatattacaatatacaatataattatttaatactttcactaaaaaaaatatctttcagttattaaaaaatttaatgcataaaaaataaagttcaaacaatattatgttgtacttgcgtatcttttattttacacgcatgtataatagacaatttgaattttgcttttgtattgtaaattattctaaatttattaaaattttacataatatcttaaataactacaatacacaccattatatatataaaaaaaaaattataactatttaaatattaaaattataaaataagtgcatttatgtactttttaagagtgcattgtagaatcactcacggttattttactaatttaatacttgtatatgatttcttcgaaaaatttcttaactcatactataaaatttatcaaactaacaacgtcaaaatgtaaatttgtaagatacgcttattgaatttacactataggactataatagttgcaattgtataaatttatgtttacaaaacgactataataatcattttattatcgcacaacataattttttgtcgtgtaaaaatctcaccaaagagtaatagaactttgttcaccgaactatgacatgtacagaaatttttcccctaactttttataattttgtaaaaaattctccttgaactttgaaaataattacaaattacccctttggttgcattttatacgattcaagaatctttttatgttttgtagtgagttgcaactaattccaaaaacatctactttgttgttgttgcccaattaatgagccttcatgtagtggaatttccactcatggcaactccatgtcaactcaaacacgaccttcaacatgttcatttggtatcatgtgtgagtctaactgcaacaattagtcaagctacatgtggtggtgggtgttggtgtaggagaggagctttgtttgctcgtcacccttcgttagatcttcaaccaagatcaatcattgccctcgcaaggcatgaggtttccttgccatagggaaaagtaaggtcttgcatgtctcatgaggctgagacatgattcttgtcacaatatctatttatttagcgataaaatagattttgtcatcattctaatacaaatctcaaaatatttgtacgttttagcacgataaaataaaaaagaaaagaaaataacaataaaatgaaacattggattttacgtaattcaatgaatactatttgatccacgagtcacttttattgataaaatcaaggacaacacctattaacctatttccccattcttcatcttctattaatgtaccttttggtaaacatcctaaattagtgttccaatacaacttggtacgtactctccaataatagcataaagaaactcaagtaaagattgcatgtgtaacttagacaatcacggagaccacgtgccagttatatagggattttatacttcttcctcctttaattaggtcatcgttgtacctcgaggattctcatcccactaaggaatatgacaccgtcattagcctcccaaaaggccaaacataatccctctcatgagaattaaccttaatctaagcaaaaaaggatgctaataaagacatccctacccttacacaacacacaaagtaaactcaagtaaatttcatttaaataaatcacttaaaaattccaacataaaagtactctaatacataagaatcataaaaaaaccaatctttattgagttcaatcgcatatattgtcgaaatatgcatggatatactatgatcgatgcatgaagataagcttaaataaatgagagagagatctcattcacaaacaaatgaggtagatacatagctccgatgatgattttgatcatttacaaatacaataacatttctaaaaatgaacaaactacactcgacttcactatatatataattaatcaatggaacatacagtttgaatttcaaaccaaattaaaacaaataataaatttagaagaaaagaaaaatcaactgacaaaaacacactcttcttcttctccgttgaagtttgaaaaataaataatttccaaaaacaagttctaaataaatgaatgttaagaagttgtatggaaataattcatgttccaaaacaacagggtgtattttcatcaattaataatttgatctttttcttccaaaaattagatgttccattaaaaaaaaaaaaaaaaacccttttatgttacatacagttaatcatatatttcttgcaagaaatatatttgtaaataaaccaaaaaaaaaaaaaaagtaaaaatatttcttgaaataatatcaaaacgttagtgtccttggagaagagatattggtactaaagggcagagttgtgcgtggagagaaggacaagaaatctattttatgcttgctacgcccatcatcactttcaccattaagcattctattattatcctacaacattgcatataaaccacattaattaatatatgatatcaaattatactaattttttttttattttattttaattttctacttaccacaagattcattgctgcagagaagtggttggaaacatcctgattagtattatttttttgcgattttcgcacagcgacaaagggatgctcaagcagcgcagcagccgagagacgctcggctgggttcctcctaaagcaaatgttgaggaaatcttttccctcagatgataatgtgtctggtattggtggtgttttgttcaacaccttgaacatagcttgaggctgccaattattatatatataaggttgtgaagagaaaattaaagcttagaatagtactaacatttcatgttatgtattaataattgttactcaccccagtgaactcactccatgggggtttgccattcatcatctcaatgatggtacaccctaagctccatatatcaatagcgtatgcaacatcagggttgctgttattctgcatcacagcttttatcacctgcaattttcatatttatagtatatagtcattacattacattacatacatgtaaccaatgtaactaatatacgtaataattacattaattattagtatatggtacctcaggagccatccaatatggactgcctttcattgaaagttcatatgatagtcctgtaagctaaagcagaaaaaaaaaaccaaattactcattttgatctccacacacatatcatatatgtatgtatgaatcttttattaatttaaaagtgatgacctacatgttttgccattccaaaatcagcaagcttaacaaccccaaaagaattaacaagtaagtttgcacctttgatatccctatgcaagagagatctttgttagaattatacacatagagcctaattcataatatatatatcattcttactcacctatggattgtctgtttaccatgcaaataagctaatccagagagaatatggcgtgtgaaattacgaaccacagactctgtaacagctctacaatgttcacggacatatttattgatggaaccaggatgaacgtactctaaatatatgtagaagtgatcttcgatctacaaattacaatatataacaacataacttaataattaacttattgttactacaagcaaattaactacattgattattattatcattctattgacttactttttcacaaccatagtaccgcacaatgttagggtgatcaagttcacggagaactttaatttcctacaacaaattataaccaatatataataagaaccaaacatgtttttatatatatatatatatatataattctaaaatgtgaaagatacctgttccagttgttttacacattcagcagacttaggatcatctggaataagatccacttccttcattgcacataaggccccagtgtttctacattaagaaaattgactaaatatttttacattaagaagattgaaaaatcaaaggtaaaggatagtgacattagtattattatgattattattattattattattaccggttcatagccatatacacgcttccgaatgtgccacgtccgattagtttacctttttgccattgacctttaatcgatgatgatgatgatgatacgtctgtgttacggggtagggtaacaggctgtgatgatagcgtgggcccgggagggagtggtaaaggatgggcataagtctcggtcaagggtcttttactattattattattattattatattgagagggaaacgaatttctctttggactcttaggggtattatggtcatttcgaccattattattattattattagaagaagaagaatggtctacgctatgccggattctaaccggagatagggtgcgagaattaccggttgccaggatgttctgtaactcccgatcatcggcgcgtgatcttcgtggacttgatggagcactctttgatgggacattgactcgcaagttatgatgaggttcggctctgttattgggttcctgtagattattaccataaatattggggaaatgagagaaggaaatgcctccgccgtttgatgatcttttgttggggctaatgtgaacatgacatgatgatgatgaaaaaatggtttctttaacatttgatcttttgggactaagtggacaagtatttggagctgaaatcgcactccccttaatcggaacaacatgatttgaatcagtagagaatctccttggagttttcctgataaaaaatcagagtaacaaaattttagtacaaaattaagtttggattaactgaaaagtgaaaacccataacaccgataaataaaaagctttaaactttgtaagaattaagtgaccttccaaacggtgaagcgaaaccttcagaggaagactcaggtcgccgaaccaatggagaaccagggagtggcaagggttgtgggacgcaggagaaagaccagtgtcgttcagaacgggcacgtggggaaccgattttccggtcatcagagtcaggagaagttggggaagaacgagaagaacggtgaatatttaagtttgtaatacccaactcttgatctgtaacgtaacggagtttcctctgtcgcgtgagacgacgctctcctagatctgaaaaggaaatagtaggagaagtatttacggtagtgtcagtggcatcactactacagttaaagacatagaaagaagaagaattaggagaaggcattattatttgggagtagtagttttggaaggcgagttctggtgaagaagccattatttcctctccagtaaacaccttcgtagtagtattaatgacccaaagccatattattaattagccaagcttgctaagccttggtgtgttttttaggaaactcctctgttctttctttattttcttttcttgtgtgtgtttttgtttgttaataaatatggaatattgagtcagtcaacagtttgacataatgagttgaaattgaaaacttgaaacctcgacctcaaactcaactgctctttctttttttccttatcttaaagggttgaattgggtgagttggtgttgttcaacttgaagaagaagtagtagtaacacataataataataatatacatgttgttgttgctaacattggtttgggagtcagaaacacgacacagaatttcttactattttaataacgtaatattattatatattttttgaagggggaacattagagtgtagaaagtttgtcactagtttgcattttccaatacgtgtctcccggtgactacaaggattattattaatgcttatatagtatctttatactcgtataattattattattattattattgtgtacatggaaaataaaggttgacaaaatctacgattcaccgtgtttctataatgggtaatattgtttttggtgtcaccattgaattgtcaaatcagaaaattagaccacctaccctggcttggctttggcttggcttggcttggcttcatatccaagtcgaagctagctccaccagtcatcatgcccctcatttctcttgttggaaacctttttaaccggtaaatagtaaaagaatatattaaaaacgagttcttacagaaaaaaaataaatatttttatattttaacattactaaatattcaaaaataatatcttaaagttttaaaattataaaaaatattgtgttttagtaaaaaaaaaataattaaaacagctgaaaaataattgattcactttaacaataacatgaaaataattataaaataacaaagaagacagttacaaaacaacagaaaaataacaagacattgacctcattacaaatttacaatatgcaaaataatattaactcgtcagtttgtatttgtattacaaaattctttttttttatttagttttgacaacttggttcatcttcttatattattatataattttttttccatgaaatttattgttaaagcttcatattttcaactcttttttctttctcttcctttttgagttagtaatagttaaattgacaatttatttttagaagttaattaaatagaaagaaaaatattagcggcaaaactacttaaattaattttttttaatacttaaccacataaactaaaattttaatggtaaaacctactaaaacctcatttcattttgctctttacactttcgtcaaagaacctcagttaagtgtcatagtagactgctcacatgtacacaaatatacacgtgtagtaaatttttagtgatgcacgtaatattaattatcaaaatattataaaaataattttaaaattacaaagtcatcttaaaaaattaaataaaattaaaatttaaaataaacaaataaattacttctttttttccttcttcttctttattctatgttcttctccaacaacaccacccaccaatattatcactaccaccacacctctaccaccatcacaccataaccaccactattatcaccttcacaccaaaaataatcacctttagcagatgtagataaatatatatggcaaaaaaacttagattataatttacataaataaagaaaaaatccttagcattttctttaattctcattatcaaattcttgcgaaatcaaatacctcgttttttttaggaaaccaaaacatgagttgaaaattcttcattctcaaagcaaatacataccctagacatacacaaacacaaaaatagagcataaaagaaaacccaagacgcagaaggattcattctcgcgctggtctagtgatgtgatttggtttaaggttgatagcgaacggtggtagagtggatcggctagggcacatggaagattttgaagatagatcctaaagagaagagacactctgagggagaaaaagaaggtagattggatcagatgtgaggctttggggtcgacgacaagacagagggagaagatagagcaaattgaggttgagaaagagggattcgagggtgagaatagggagtcgatcctttgggtcgagggcgagaaaatgagagttgatcttctaggtcgatggcgagaaatagggagttgttgccgcaaaagggaggttgagagagggaaaaggagaatcgaggcccctagttttaggcatggtaataggcgaagtgaagaagaaaggaagaaaaagagaaagaaacaaaaagaaaaaaaataataataattttttttgtaattttttttttataatttttaaattatttgttataatatttaataattaatattatgtagaccactcaaaatttattatgtgtacacgtggacagtccactatggcacttaattgagatttttgtacagaagtgtaaagagaaaaaaggaatgggggctttttgccgtcaaaattttggtttatgtggttaagtgttaaaaaaataaaattcaagtagttttaccgccaatatccctaatagaaataataaatcttatgatttcaaaatagggtatgttatccgtgtttctagatggatgacacgtgcaattttaagatagttttaggtcaactgttctaggcccaatcgcaggcccaaccaagataatggactagatctattagcgaagtcaagccttccagatgttgggcagatggctcgtctagacaagatacacctctggcacaacgtatcttcagatggcatcgaatagatctttcagatgagtgatttaatgggcatttgaatatccaactctgtctcatagcaatttattatcaaatcccacaacatcatggctttatttctaagatcatgtccaggattcgtatctttcgaataaggaaataaagtaattatcaatcaagcatttacgtgtctttattatccacaaaaatatgacatgatttgacaactatcaacgtgatatgacatccacgtcagaagaagatcaatgcctcatgggccaggctttaccaaatgaacctaaagtcaatgtattatctgtgtttatcagtgggcaatgcgtacatattagaaccctagcactataaataaaagaaaactcactgatgcaaatggttagaatctcattcctttagtgctcaggcaaatcctagggttcaaacacttggcaaaatacttgtgtaaatcaataaggttttccagtcttatcataataatattgcctcatggactagagatcgttaatccttgaaccacgtaaaaaatctggtcttattctttgtctataatatatttctttaagcttcattatattttatcgatttcaaaaaatctcggtaaatattttggtactttcaatgagagttgaagaaagaagtgataccaacaaagttgtgtactgcaaccatggtagccacctgaatcactgtcgacaaatctggtattcgtgatggggatactcccatggacgatgtgaatcctactactcaggagaaagtaagagtcgatagagacatgtcataaccaatcagtcgtcctgccaagaagactcaacatattgaaaaatatgttgatgagaatctcatcattgaagatgacctagaagatccagaagataatcctaaagatgatggaaaagacaaagaagatgagtattactataaaccagatcctgaagtcattggaatggctaaagaacttactaaaaccaaaaaaagttggcggatcagaaggaattctctcatgatcaaatgcgagaaactctagtaagactggaggtcaaaattgaatcaggagaagtgggtcacaatgacaatatccctgatgaccctgctcctcaggaaaacaatgttacgaaggaaacaaatccaaaagaccctagaacttctgatctcgcacgagacaaaggaaaaggtgtgttgtaaagtccttttttggcaagttagttgaccaaatattttttcttttatggtaagattgttttgcatacatacccgatttcttatcttgtattttcagtttttagttgctcttttccttgttaggaaagttgcacttttcagctaaactttcctttgtttggaaacttcttgtaagagaagtaattctcttatggaaagatatttttttaaggaaactttgattattgtcttttccttattgatttcgattgtatcttgatacaatcagaatatctaatct

SEQ ID NO: 110674 - DNA, 7325 bp, Cannabis sativa
  modified_base (7219)..(7219): a, c, t, g, unknown or other
atcagatgatgatttttcaaatccaattactaattggattggatcggatgagaaaaaaaaggttggattggatcggatgcccaccccagtattatctaaaaaaaatgacacttgtcattagaatatatataaggagagtgcaaaaaagagtgtaaaatagagtgtgattagtactcctttactagaggataaaaggtatatatcgtctagacccaaaaatgatccatgtgtcactcagagaagcgccatgtcaccctatgtgtatttaggataagagtgtcattctctattttaggaggtattttgtaattaaattataactttatttaattatttttatagtccttgtaatacttgtattttgttggttattatttccgggcactactttttccaacaatctacaagcctcacttgtgcgctagagccctaaaacacaactcttttcttatgaagaaaagtctattaaacaataagaaagctccaattatatcatgcaactcttggccgaacaaaggtccccaaggatccagctacttcaatacatagtcttaaaaaatactttgtttaatagtttatttcaacagaacaaacaatattatatgttagtagaaccatcaacctactgtcgaagtaaacgagaaagactaaatcaatcagccggcaactctttctttgtttttttttttttgggcttatttctgcaattcctttaatttcacatattctaatattacaaacaatcacgcaaaatctaccttgatagtctcgtcgatcccattggcatttttcactggcactgctttgatcaagagaaaaaacagagacaatttttaaattttaatttttcccgtcaaagaatggaaagaatcttcatctgggcactcctcatttggatcactctcaccattccaaggtcaaattcagtagaagatgaagtgaagaaagctatgatcgagttcatggacaacctttcaccacaaaatgatgtagtactaagacttggcaactggggatggaactcgacttcggacccttgcaaagacaagtggttcggtgttgaatgcaacgatggattaaccacagtgaggaaaattgttcttgaaaagcttagctttaatggaaccttcgatgcttcttcattgtgcttagtgacctccattactgtccttagtcttcagaccaacaacctcaccggacacctcccacttgagattggagactgtaaagcactcactcatttatacttagccggaaaccaattctccggtgaccttcccgactcacttgcccagcttagtaacctgaaaaggctgcatatttcagataacaagttccacggcaacctccctaatatttcacgaatctcgggcttagtatcttttgtagctgaaaacaacgagcttagtgggagaatcccagatttcgatttcaccaattttgataaattcaatgcttcaaataacaacttctccggccaaatcccagatgtgaaaggaaaattcgaagccgagagttttctgggaaatccttatttgtgcggaattccattaccaaatctctgcccaccaccattaaaaacagagaaacccaaaaaaatctcagcaaaaaagattctcatatattcgggttatgtgatcatgggctcattcattttagtattagccattttcatattcctcaagagaaaaaaaacccgacaggaaaacactgaatctcgtagcgccatgccgagtagtaccattgcttccggcgaaaccagaaaagagcgttcggagtattcattaacgtcgctggagagcgggaggattccgacgctggtagttcttggaagtcctgggaagaagacggcgacacttgggttgtcgtttgaagggctgcttaaggctccggcagagcttttggggagaggaaagcatgggagcttgtacaaagtgagagtggaaaatggggttttgttggcggtgaagaggatcaaggattgggatatttctttggaggagtttgatcggagaatgaggaggttggaccaggtgaagcaccggaatgtgttgccgccggttgcgttttatggctccgaacaagagaagctcttggtttatgactttcagcctaatggcagtcttttccaacgtctacatggtaaccgctttatttaatatctttatttatttatttttttttgacaataagcctgaacattcattaatcaaattacatgagttatacctctcgtcattacaaaattcccaatatgggcaacaaatttataatacctactaacattagaaaagatacagcaaataaaagaaggatatggcttgatacaaaatgagacatagttctcaagaacccaaaaagataacttcccacactgattacttgtctcgagtcactctatttaatgacatacttataccctaaatctaatgacatacttatttgttatctttagccatatttttttcttaataaaaaactcaaatcgttatacatttatactaatatcagttggagagataatatcagttgggtgttttttttctcttccatacgtgaattgattcaaggagtgtactacagaattttcacaaattatatatataaaaacaaaaattaattataagcgatatgtgcaaattactagaaataattattaattactaacctatatttatccattattaattgtttgttttgtctttttttttttaatcaaattcaattgttatattaaatgagatgagatattagatcagttgcattattttaagcgttataaatatttattattaatattatgaacatttttagaattgttataatttatgcatttgaacatttgctttgggatgtaaaaacaggaggagcatgtttattacaaaatcaatttatcttgatggtgaaattaacaaagcttaatataataagcctctcaagttcaatatatatatataaatattatattaatgcatgcatggttaattacacgtacaggatcatcagaaagtaatgggcaagtatttgactggggaagtagactaagtgttgcagctattatttccgaggcattatccttcatgcatgatgagcttaatcaagatggagttggccatggcaacttaaagtccatgaacattcttttcaaccaagctatggagccttgcatcagtgaatatggtctcatggtcgttgaaaatgaaaatcaacaccattcaataatggaagcaacttattataatgatgaagaatcaacttcttctcaaaccacttttaaggttgatatctatggttttggtgtgattcttctagagcttttaacagggaggttggttcagaaaaatggatttgatttgcctaattgggttcaatcagtggttaaagaggaatggactgttgaagtgtttgacaaggcattgatctcaggaggtgctaatgaagagagaatggttaatttgttgcttgttgctttgaagtgcataaatccctctccaaatcaaaggcctactatgactcaagtttctatgatgataaattgtattagagatgaggaagagagatctttatcatttgcattgtgatgtacgcatatctaaactaacaaattctttctcacacacacatatatatatatatatatatatgagttcattattggttgtaaggaattaaaatgcaaacatgaagcatacataaatgattatgaaaaatgcagaatagttaaattataaaaatcaaatgtatatataaatgtatatgcaatgaaagcataaaaatatttccaggcattaattcgtagagtttagatctacaagcttagatctatgaagaggaacaaagaatagcgttctaacatgtattcagagttctaagctctctctaactcttttaaatacaattatattgtaacacaaagtgttgacatctcacttttagccaacgacgataagtaaatataagtgattagaaataattattaataataattaagtaataaaaacacgaatttgttatagaggttcgaccctgtaatagtggtaataatctaccctccttttacatgtattaacttatgagagaaaaatcaggaagttcttgatcttcctcgaaagcttttacagagattttagcagcgtaagtgctctattgagtgaataaaattcgactccctgagtagtaaaatgatttaactatttatagagaataattacataaatttattttccgaaatcaaataagaaataaaaaggaaaattaattactttctataatacaacaattgcttgtaaaaatctcataaaaaatggagctttaattgataaataaaaagaaagtacttttgaggcttccactgccacatttaccttgggcaacatatgtggaatggccctaaaaacgattttggttgaagggtatcgcttaccctccacggtacctttgttatattctctaaataagtaacatttgatggatagtttagttctagacgatatattgacgagctttgccttcgtctaagtctaaagaatgatcaacgtgtcacccaaataaacaccatgtcacctagtgcagatttcaagatatcatttgccccctaagtccgcgtgggaactatttattggtacgtggacttgctcggcccatgtgctaggtaaatagggtggcacgtgctcggtatgcgaaatgggtgaacaaaaaaatctcttcaaatcttcgagctatcttttcgtatcctggtgcattaaaggtcttttacctcgagaatcacacccttgggatgtgtgctggcggttgtattgctcgaaggtactgacgatactcttttaggggaaacctcaaattttagaatatagaattacaaaaataccctttcaaaacctaaataaggaattttagaattcacttatacttttttaggcatttcgaaacatggaaatatcaaaacaaaactttttttttttttttgtttcaagttttcaaactttctctgaagctctaagggaccacaagggtacttccaaattttaatttgtaattctgaacaaatttcctttaagcgatcttcaacagtgagtaagtttctaaactttatgcaatcctttgaattttttgcacttatactttacaacttcttttatggatatttatgggttccgaataaggttgttcttgatttttaagaattaaaatttatattttgatgttgattatatgtacttggactataatcatttgattctcgcaaattcccatattttttctctgaaaaatctcgaaatacattcggcgcggtttttctaatgaattctgggtttgtactattcttgaaaaactttgaatgaggatcctcttcattaggacaatctccttcttttgattttcaattgcgtctagtcggagtgttgaagctatttcttgcttcaaatttcacaccacagctcggttcttacccccttttccttttttgttgataaacccgggtgatttttggggtggtaagtaatgagtagatgaggacttgttataattactacacgaggaccatcctaggctccgtgcaagttcgtcttcatcaagtgaaagttcatcatccagctttgacgagtgggaagtgataagtgatgagtcagaatctccacaacccatcccacaacaccattattacctcgaccaaattagtgatgacaactacggatgattcattgggaattgaattggggactaaggcgatatttacccacttctttgatatacaaggtcttagcgggggtttcgcacactttaccagttggtgagccaaaccttcaaagagacctttcgtgctggtggaaattgcagtcaatgttgcataatttccttcaccagaatgtccgcccaaggctaaaaaggtggcgcaaactaagcaaacttacaggaagtttcatccgaagattctcatttagctcggctaatgactttggctcgtgctacagacgagggttctgaagtggtgcctattggtgacaccaaggtgtagagggttaaggatcagggtgaaacccgtccagcccaagttgaggtactaatggaggaagaagttgatgctacccgtaaacccttcagtagatttggcaaatacaatgagttcgggctgcctattaccgcacggggacaactttaaatagaaaacatccattacgttatagaggaatacaagaaagcccacccatcctataattaagaaaggcctaaggacatgtgggtctctccccgtctaccttaaccataataaggttgacaaacttagatacaaatgggcttattgaaagtatcgtagcctttcttccatttgatggccagctagccaatgaccctggggatgacctatatgcgtggtctgacccacatgctctgcaaggagctcttcttcctcttcatccatattttcaaagattggaaaaatattataaaaattgcccagcacaattttcaccgaaggggatcaaatacttggttgtattgtataaactttccacacaacaaaaatgggagatacccttaccccacaatataaattggttctttgatctgaaatccaaccttgggcaaggttgtttgggctatttttaattttcacaaatggaatgctcttggatgttcggtatgatggagtatgatgtctctaagataagtgggtacattcaagattactacatcgtgcaaaggatgaaggccaactacctttcttttcaatgggaaaagacttacgatcagtcattgttcatactagggttgaggacaagggctcaagctatcttaaagatgtcgagcaagactcaaaatatttctttattaacctgaagaaaattttcttcaatacggcttgtacccgtcttgggacattggagaggataagccaaaagacacaacacatgttcccgtgcaaccaactttaaagccaaagaagaagaaaagggcgaatagggagaaaactctagttaagcttctcattgttataagggatgtctgtgagaatgttacccgtccaaatgtgcaagtggttgagagaaagagcaagggtgtcatagaagatgttgttgaaattttatgccctaaataaaatccatttcaatgtaatcttatttactatcaatagaagaatagaagtcatttaagtttacatgtagttttcatgattatagttttaatagacagtttctattaaatccagaacatatanttattcacaattacagtgatgtaatcacactggaaaataattgtaattatatgcttcaaagtctttagtcccatgatttatgagtgtactggatttacactaacgt

SEQ ID NO: 110675 - DNA, 7317 bp, Cannabis sativa
  modified_base (40)..(46): a, c, t, g, unknown or other
  modified_base (6864)..(6867): a, c, t, g, unknown or other
aacaaaaaatcgtacagaaacccctactgcaactagcgcnnnnnnnactttaaaaactcaaaccgtaaatttgataaaaacgttaagaaaaaacagtatatggggtaattcctcttatttttaacccgcccaatataaagattgggtgggttatattttcgtcgaatttttcagtttatattttttgtctaattaccttagtttagtttaggcaggttgttcaggttgaacgatttacaaaagtttatgtacgtacaactcaataatttcatgtcatgctcgaactttatttgggctaatctattttgctaaactgagcctattttcttataggttcgaattcgtagtctacttttctatattttcttttacaattaattaatcaattactaaactatatatgtttttttataattttaattattttatttaattttttcacaatactctacacacaatcatataaatataattattagaatttaataatttagtaatgaatgttcaaattttagctggcaacttaaaactaaattaatatatagttctagttttatattttttttttatagtttaataaatataaaatagaatatttgtagtaaataagtactcaaagttttgagtttgtaaccacatggtatcagtaccaaattttagtaaaattgtaatttttgtcaagtttgtcatgatagacttcttaaataggatacatgtaagacttaaattttaaattattggatctggacgagaaaagtcacttccacaattacaaatttaagacactattaatggagtctatattaacaaaactagacaaattatttcttaattctaccttcctgattaaataatttctagaatacttgctctgcagttgcaacattagttgattttgacatgaagttgtgatttttatttgcttttttcgttctctttattttgttcaaaatttcttttcttttgaatattgtcgctggctgatttctcattttctttttcaaagttctgtgatactgctacaggttgtattcgatcaattgcctgttgaggatctgatccactcgtttgcctaggctcataatgaatttgagttctattcattttagtttgaatatcaaccatatcaaccatgaatttttacatagtgcgatgagtattctcttgatgctgcctatttttgtcttgatcatgttgacgtttttcttcaacaacacattgttcctactgaaatctttcttcagcaagacgttgcatctcttcgttgtgtttgtctcttgtagtcattctctgattcacttctctcatctttaatgccaatctagtagttggatctgtaattggattcgatgtatcttcttcactcagagttgttgctttctctgataccttctttgatcctatcttacttcgtctccttagctttagcttttcgttcaagaggttcttacagacgacgccatattgatgctgaaagttagctcaacaacaaattctaattaagagtttgaattctttacactaggtttgatctagtcgaattacatactcaatcagtttacataattttcctctcaattcactcagttgtctgctcaatgaattcaagtacggatttgaaggtgtattctgacagtatttcaactactctagtgtgatcaagaattcgtcgtcccctcttttgaatgattgggtcttttatttataggtggggaggaatgcttgattccttcttctttcctgttctaattttcccacatgtgctaattctcatctactgctcatcgcaccttctcctcctttctaagctctgctctgcatttcttcttatgtagagctctgctctgctgtcttcgagtttcctactctatttttttagtgaaacgatgcttttttttaaagacctgcaatattataggataagatctttcctcttattctattttttgaaattacttatttacccttaagattatttttatctcttataattgcccctcggttctatggtatcaaagctcttaacattttagtttgagctttgatgccatggaactggttactagaaatattttcattgcatcgcttacttccagatcctccaaggccaggaccaattctacttctgaaaagaagtctcctattgcggaaccaaatttcatgactgaacacaaatccatttttaaggatatccgcgccaaatatcccgttccagatggggttacttttcgtatgttaacaaaagaagagttggataagaattttaaggaacttgtactggctgaaggtaaaactctggtcagtaggaaacaaatggaacttttaaggtttcctatccttcctctgttggttaacatcctttctcttgctggggtttccttgttacaacttcttccctatatttttcagacaatttgagtctattttctgtgtgtgctctcaaacgtactttgttccttaccgtggagtttttttattacttcagcaaagcgtcttgccctaattgctttctagcttgatacgttcttgcaaaaagttccaattaatttcttcaaggtcttccttcttcaaacaagagttgggattcttttttattttttttatgattggtggtaaatggtttccaaaatttattaatcccaaggtttttcttgtcgccaatcgtattgttgaatccatctcttgactctcaggatattctcttacagttcataggactccactgcacaaattggagatcatccataatgaaaaagattacacataatctattggtgacatccaaactgaagaggtcttcaaatatctgccttctgtctgctcgtcttctgctgctgacccttttgctttgaaaattaaaggtcaagtattaaggattagccttgatgttatgatcagtgattataaagaatacttgaagaatttacaagccaaaaatgacccattgctacttaaggaaattcctcatgctcaaatggttgctctgagagcccatgttgatgctcacgaccaaaaaatgactaagaagcgaaattgtgtgatcttcaaatctgctaatgaaattcataggaagggtactttcattttgggagatttgtaagtgtttattgacggtgtagccccaatttcatataattcaaacccttctccttttgaagtcaacgtgcatacgagctttgcctcttctcccactaatgtttgctcttcttcctcttcaacacctcaagcttcaatgtctgctcctattcacattcttctcgaggccaaaggctctaggaacaagaaaaggagaattgttgagcaaggccaagcttcccaagagaacaaaggtactaaaaagtgctttcgtcctcaaacatgtttgactcagaggcatgaaaacttttcagctgttgaggttgtagctcagagctttactgcccctcgttctactttctacttttttggtttaatcacccccttgtctgagtttgctcttcccttccctcaccaggttacttccgaccaaattgtgtccaaccctacgcctatccagtcttttccaactgaatttgtatccattcattgtgaaagccaaattagtgtggttgattatgtaatcaaaactacagcaatcgttactggtgctaaagctttgcaaaatcatcttcaaggtggagtaatggattcttctaattttcttcattcgatattggatgacggttccaccaccaattgttcgataaaattaatacgcaagtatacgcaatcgaatcaagtaatatagtcaaaactacaacaatcattattggtgctaaagctttgcaaaatcatatttaagggggagtaatggattcttctagttttcttccttcgatattggatgacagttccactgccaattgttcggtataactgatacgcaagtatacacaatcgaagcaaataatataatgataaataaagtatcttttccatgaggattgattgtcaattaccaatcatataattctttagttctattttattcatgtaaattgttggatagaaagcaaatgaagcaagacaatgatttattttttttttaagaaataacaataatagagacaaggattattatgatcctcaactatcatttattttacattctgatgtaattactcaatttttcttcttcatattcaattgacaattgagttaagaagttaataatctggttaagacttacaaactcaatgtatatgaaaacttcatatattcctatggtaagtttaatcacaaagataacattaagtatagaaactaataaaatcatacaaaaacaacctaagtactttaatcctaaattaatttgcatccataacaatcagagcatatttaaatctcaccttccagaattttgattcgaattgataaataacaattataaatggccagtaaataattgcataattaaaatagattgtatagaattgaattaagagaagaaaaataaattgaacaactacgttaatacataaaataaatttaagtgcttcacataaaatccttaaaagaaaattagctcataagagtcattctaaaacaacaaagattcaattaaaaacataaaagataaagatagatgagaaagaacactttttggagtcctctaatggtgacttatgctccttgcactccttctacactcaaaattttctaaaattttgaatgatattagattagctctcaacccctttaaatacacaattaggaaggtttcccaaaatcctccaatgcccaaaattggtcttcaagctcaaaagataaaggaaacctagctccaactcattttatagacaaaatttggaaaatttcctattttttttttcacaagagttgcgaccttctcgttttctgatttcctattacgatgatcgatagtattttggccataactctctcaatatagctcgaaattagacgattcaagatgttttggaaagctgaaagagagatatagaactttcattcaaaaagtttttcctagaatggatcatagtccaaaattgacttgaagcttcaaactttattttcagtcaaaaatggagcgtgttcaacatccataattaccacttatgattatgagatatggacatggacgttaagactaattttctaaatggcaatcttgatgaaaccatatatatgaaacaaacaaaagggtatgtgctaccagtagaagatcgaaaggtatgcaagttgcttaattccatttatggattgaagcaagcctctagatcttggaatatcacctttaataagactattaaagagtatggcttcgagcaaaacaaagacgaagcatgtgtatacaaatatattagaggtaatatagtagtattcttagttttttatgttgataacattctatttattggaaacaatgtagaaaggttatcagacgtaaataattagttagccaaaaaaattctaaataggatttaggagaaacaagttatgttctcgaggttataatctatagagatagaaagcgtataactttagcactttcttaagcaacttatattgataaggtgctcgaaagattctcaatggagaattccaagaaaggacagttaccatccagacatggaattactctatgtaaggatcaatgtccaaagactcctcaagaggtggacgacatgagaaagtacccttatacatcagcagttgggagcttgatatatgcaatgttatgtacaaggcctgacatatgctatgttgtaggaattgttagtcattaccaatcaaatctaggtttgcatcactagatagttatgaagcacattctcaagtattttcagagaatgagagatctcatgcttgtgtattctagtggagagttaaatcctactggatatactgattttaattttcaatcagacaaagatagtcgaaagttgacatctagatcagtattcattcttggtgatggagctgtagtctagagaagcattaagcaagccaatattataaattcaaccatggaagctgaatatatagcagcttgcgaagcagctaagaaagcagtttgattgaaaaaattctacactgatctagaagtagttccagaggtagaataaccactggtgctccactacgacaacagtggaacggtggataactccaaggaaccaagaagccataagagaggcaagcacattgagagaaagtaccgtctactaagaaatatagtagagagaggtgatgtgactgtcttaaagatcgtgttggaatataacctcgcagatccattcacaaagacactactagtaaaatcttttattggtcatataactaatatgggactaagggagatgcccaattttcttttagggctagtggaagattgttagagtttatgccctgaaaagcctgtaaagacatttctgattattagtaagagttgaacattttgatatatacatgaatattaaattattaatatctaatattgaatgatttatatataaatatcagaatattccttattcatatatgaggctgtgacttgtaactgtacggaattaagatcacttagctatgaataaaacagtcatcaccaacatctcaaagtttaaaaatctttaatcaatagttgctagtacagttcactgatgtctgttcttcggtgcacgtaatcttgattcagattactgatgtagcatgacatctaagtggaagtgatgtatatagtagatattatatatgacaatgactgatatgaataaagttgtctttatcaaacataccatttacaataaaaacataattcatatcataaagatgattaatagtagatcgacctaaatctcaagtaatcatgaactcttgttcatnnnnttagtttctttgattcactcattaaagtttcttagagaagatgattcttacattttctgttttgggaatataataatgtggatggctagaatcatgatctacaattatggaatcttgactttccttatagatcgaatgttggttccctttacatgttaattctagaactaaaaatttgcgcgcaaattcaaatgggatctgaattatacttccactagtgaaaatgatactaaaggataaagaagtcattagaagggtaaaattgtaatttgaccacaactaattacgaatcgaaacaaggagggctaatcattgtaattgaatataccaacggacactgcaacaaatcacagtaaatataatggaataattacataaggcatcattttctgtaaaatatttacatttttacgttcaaagaatgtttttttacatttttacgattttcca

SEQ ID NO: 110676 - DNA, 6807 bp, Cannabis sativa
aaaaaaaagaaagaaaaaaattattttttatttatatatatttttttaattttaaattaattttattttaatgtttcatttttttaaataattttttacgtggaccaataaaatggtgccacgtgtatattgtgttcacgtggacaagccaacatggcacttaacaattaaatttggacggaaagagtaaattgctaacagttttctagttttgggagtttacccgcagaaatttgagttttgtgagtttaatgaaactaaagcgaaagtattaaagattttgccgccatttacccttgaatatattgtaacttgtactctcttttttttttttttttgagataacttgtactctctttgtatcttcttgtggttgcaatatatttttcttaaagaaaaaaaagtgtatctttcatcaattctcattttcctccggagaaaaaaaaaaaagaaaaaacaaagagcaattctctttttggttgtcgtaatcggtggtactcaacttggggaattgagagagacctaggtaaacgacaaagtttgctcacagttgcacagtgaatgcacgcgcttctcaggagggtgtgggtttactttcctcacatattttttcattttttatttgagagacagagaggtgtttttttttttttttttttttaagaagagagagaggtgtaactgttgaagtgttggaaagtggtaaacaaaccagtggcagcaaaagctacaggaaaagaagaaaactaagaaaagagaaagaaaaaagaaaataatgtgaaatcaagaaaggatggttttatatttgagcaagcaagcattgtaaactgttgtcttgttgtgctgtgggagagagtttctctaataagcaagcaataccatattggtcgattcctcgttgccaatcaacaacacaagaaacttttaacattccctttttcgattgttgtacaaatcttattttcatttgtcacacacacaagaacatatatatatgtataaatctattatgtatcactatcacctccgatatatgtacacttgggcataattgacaaatcccatcaacgaactcaacttcgagtacgattttaatggcttaagcttcacaaactcaacttctcttttcttatcttagagctacctttttctgggttcccattctcaacaatctatactttgattacagtccatgcgataaagatcagctcttcgatttctaaaggagaagacttattgtgttggattgatttataagttaaaaatttcttggcttgatgtggctggcgaagttactatccatagtgttatatggcctagcttctggtttttaagctcgtccgcttcccccaaaaccaacaaaggttctcagccaacgagagagtgataaagggtaatttttctttttaccgtcaatctcttcttttggtgttaagattaagatatgttcatcgtactaactgtactttatgcaacagaatgaacacttgaagtactatatcaaacaaaagtaaaagagtttttcttttgatcaaaagtcaatgaagtttatgatgtagtttcttaactgtatgtagttaaaaaaattcaaactttttttctttttgatgagagttaatggcgtttgggatgtattttcgcaactgatttttacccctctcttttggatgagaatataatggcgtttccagagtcttttcacaactgggttcgttataaaatggaaattcaagatggtttatttttccaagagaaatggccttaatgataatgtattaattccccattttttctaaccgacttttgtatatttctgtgaaaatttgaagttggggggatcgatgatggctgtgacttcatcctgcaaagatgggaccaaaatcgccatggacaatggcaagtacgtgaggtatacgccggaacaggtggaagccctcgagaggctctaccatgattgcccgaagcccagttccatgcgccgccagcagctcataagagagtgtcccatcctctccaatatcgagcctaagcagatcaaggtctggttccagaaccgaaggtacgtacgtaataatagtaattaatatgctattgtttttctcttcttcttccgataaagttggtatctatatatattttttttttgtttgaagagtatatttttcaattcggatgtgtagatgtagagagaaacagcggaaagaagcgtcaagattgcaggctgtgaataggaaactcacagcgatgaataagcttttaatggaggagaacgataggttgcagaagcaagtctctcaactggtttacgagaacagttactttcgtcaacaaacccaaaatgtactccacataactgataatattagcataataaacccttcagttattagttcaatatttaccaaccgggatctttttcctttcatagttatttaaatttgttgattaattaagggtttatcaataattgtattatcactttcaggcgacccttgctacgacggatacgagttgtgaatcggtggtgacgagtggtcaacaccatttgactcctcagcatcccccaagggatgccagccctgcagggttagtgaatggagagagagagagagagagagagagccttattgatatgtcattgttcattatcttgttttgttttgtttttgttcttttatttttgtatgtaactcttgtattactatatatcttggctaatgaattattatttgttttttcttgttggtttgtagacttctgtccattgcagatgaaactttagcagagtttctttcaaaggccactggaactgctgtggagtgggtccaaatgcctgggatgaaggttactgctctttttctcacacgattcaacgtcttcaacaccattgattattcttcgtaattttccagaaaaatgtttttgagcactagtgacaagccttattttttctttctctttctcacctttctcgacatactttcgtttcttgcttaaaatattgggttggggcctgggggaaccggaaacgtacgaacgaagaacattttgctttcttttccttagttatgtcactatctaattcaagagttctctttttctttttttgacatgcttcgttgattcctcatttaattaaaagaatagaattggagttattctctttataaatgcttggtgaccgaaaattttcttgtgtatgtgttttgcagcctggtccggattccattggaatcgttgctatttctcacggttgctctggtgtggcagcacgtgcatgcggtctcgtgggtttagaacctactagagtaagtctagtcacatctcttggcagaaataggtgttcaaaacaattcttaaaatataattttagagaaaaagagttaaatccaatgcaactttatgaaatttagaacaattgtagatatatttatatatatgtatatatatgctcaaaaaacctacaagagtaagtcctagtcacatctcttggaagaaataagtgtacaaaacaatttttaaaatatgtttttagaaaaatagagttaaatccaatacaactttatgaaatttagagcaatagtagacatatatatatatatatatatattagaaaaaagtctattatcatcaaatttcaaaacaatattttccttccctttcttttttcttttgcatgccttagttagtagctagatcgatttggtgaaatactaatgactgagaggtttcttacaggttgctgaaatcctcaaagatcggccttcatggtttcgtgattgccgtgctgtggatgttattaatgtgttgtctactggaaatggtgggactattgaactgctttatatgcaggtagaacaactatatttctttagccttatttctgcgtacccaacacccaacaccacatgaggtgacacattatgaatttatgactagcagtttttagtattacttgttaaattaaaatgtagaatctgatattgaattacaacaataataaaagtacaataatctgatattgaattacttgtcatgtctcatatagtattatgggggacacttgtgctatttagctatactctattattatttagagttacttgattgatgttgcagttgcttactaatgttttggcctttgacatatatattatatagctctatgcaccaactactttggctccagctcgtgatttctggttgctgcgctacacatcagttttggaagatggtagtctcgtggtatgtataataataattagccagtcttcactttcccatttgttctttctcattttttgtatttattttggcattattaattgtaaagacatatatttgattatactattaggtgtgtgaaagatcacttaacaacactcagaatgggccgagcatgccagtggtacagaattttgttagagcagagatgctaccaagtggatatctgatacgaccttgtgaaggtggtgggtccatcattcatgtggttgaccatatggatttggaggtacaaaactgctttactattcttttgtacgtatgtatgatgaaacaatctcagccactctcttggtgtattgacaagtttctttgtttctattagccatggagtgtgcctgaagtactacgcccactctatgagtcatcaacattgcttgcgcagaacacaacaatggctgtgagtatttccttattatttattttaaacatgtcacgttagtaagtcccaagtgagcaatgctaataataaactgacttacattttctgaatcaggcattacgccatttgaggcagatttctcaagaagtttctcagccaaatgcaacaggctgggggagaagacctgcagcccttcgtgcacttagtcagaaactgtgcaagtatgttatgctttttatttttaataatcttcacattttttcttcgttctattagttgaatttattgtggttatcttataaaatcttacatgtataatgtaggggtttcaatgaagcagtgaatggatttacggatgaagggtggtctatgctagaaagtgatggcattgatgatgttacccttcttgtaaattcgtctcctagcaagattatgggtgcaaatatttcttatgccaatggattcccatctgcaagcaactcagtattatgcgccaaagcatccatgttgttgcaggttagagattttgatagttttgtaagaattgttaatggcactgcagatcatagaataaaccatcaactatttaatatgatacaatattacaacaatgcttcttgaatttttactagttttctaaattttattttgtgcttatgtgttgttctctatgtagaatgttcctccagctgtacttttgagatttctgagagagcaccgatcagagtgggcagacagcagtattgatgcttactcagctgctgctattaaagctggtccatgtagcttaccaggaactcgagctggaagtttcgggggtcaagttattcttcctctggctcacacaattgagcatgaagaggtgagaaaatttgtcattattttgaaaaaaaaaatgaatgccgttatgtattggtgaatattagttataatttttcagttttggatttgctggcactaagttgggttgttttcaacagttcatggaggtgattaagctcgaaaatatgggtcattatcgggatgatatgattatgcctgttgacatctttctattgcaagtaagtttatttcttctaggtagtatattatttgtttatttttcatctcttgattaatacaagaagcagtatagtcttgcacattagtctaatgttgcggtcaacattgtgttatcaatcaaagcaatgttgttgtggttgtggtcttaagaaggttctttttcccttctccgcagctttgtagtggagtggatgagaacgctgttggtaactgtgctgaactcgtctttgctcccattgatgcctccttctctgatgatgcacctatcctaccttctggattccgcatcatttctctagattctgggacggtaagctttcagtttgagcacgtgttagctagtgtggtgtgatatctgtctctgtgtttgaaaacaaaattgctgactgtaagctcaaattacattcaggattcccctagtcctaaccgaacacttgatcttgcgtctgctctagaagttgggccagctgcgaacagagcttctggtgataatgctggtaattctggcagtagaaagtctgtgatgacaatagcattccagtttgcatttgaaatgcaccttcaagaaagcgtagcagctatggctaggcagtatgttcggagtattatagcatcagttcagagagtggcactggctctctcgccttctggtttgagcactcatactggtcttcgtccgccacctggaactcctgaagcactgacactgtctacttggatttctcagagctacaggtctgtaacttattgtgtttatacatgactgacaactcatgagagagcttcaatcttcttgtcattgattttaagctttctgataagcctccagtcaagttagtatacgctaggaggccacgatacacttaaagatagggctttaattttttattccagctgtaattgttttgttattttatctagctggctattttatcttagaggattgtgttttattaattctttttagatcctagctggcaattaaattattctatttaatacatataaatagggggttgattcattgtgtaaaggaggtgggaaatagaagagaatagactctaggagagagcagccct

SEQ ID NO: 110677 - DNA, 10506 bp, Cannabis sativa
tatacatttttttaccgattttaaaaaataccacattttttctaacataaaggcccaaaaattttttttctccctatggtccactttgtttcagggccgaccctaatagtagtgtaaatcttttaaatcgtaccgcactatactatatttttgcaatgtagtttttaccgttttaagttctcgcgttgttgttacagtttagaaaattacaaaaaatgcatatgcagcttgattcgaaaaaatggttacaaaccgaaccacccataccgtaaacactcctaccgatggagatgctctcagtacagtggtggctgcaattatgacacgtgtcattcatgtattgggtttgagtgttgaagttggagtataaaagcaaatcaattgattattcttaatttttctctttggtgattttgttgtgattatgatactgatttcgcggttacacagtctgagatgggtgacggtggtttcgttgatcggcaactctctcctcattcttctcgccgcttctctcttcctcatcgctttcccttcatgccatcgccgcctccttattcccttccttctcctctctctcttctctcttctcagaatcctcaccactttctgcatcgctctcgctcaaaaagccaccgccatgaccatcgtcgaatctcccgccctagatgccactcctgtcgtcgacaccgttgttcgccacgaaagaagggtactgaaattctttcatgagaaatgtgattgcttttttgtgatttaagtttggtttgatttgatgaaaaatgttacttgaaattggcaattttaacaatgatgaaataaggaaaaattaacattgtgaaaaaatgttgctttcatgagtttttcataatcaaactgcattgtaattctcttactgtctcattgatcagatgaggtataaaagatggctttggtggacaaggtttggaatgtttgttactatgctgcaatttattggtgcaacttaccttgtgttcacaattgctacctatgtttctcatgaaaacgattcaagtgattgcattttaggtaaggtaagcttcctctgtcgatttattttagtcagttgtatgttttcttcctctatgcatgatttttagtttttatatgttggtgaaacatacaaagttttgtttttagtaaacaaaaatctttatgtgcatatattttatgtgttcatctaatatgtcatttatttctttaattttatctaaacctctgccatggtttctctttttcttgattgtattcatgatcattaacttaagagataatatagtttattacttagaaggaagtcaaactactttgaaccatctttcaagtgggctaaatcatatcaatactttactattatattttttgaagttgatttgtttttctgtcacatctgttaaattggaaattgtatttgtttatgggtttatgtttttaatatctaataatttacgttttgttgtgctggtttttatatttgatgattgttcggttattgttaagttaaaatggagctttgttgctaagatgatcagattgtgcaacatttatgattttaatgatatagaaggctaaatgttatttcatgcactttgttccatacatgagttcttcttatttaagttttaagctattgaattaatcgtgcaagtaatattattgaaaaatgaaaataaaaaaaaaaaattaatcagtaatattattgaaaaatgaaaattaaaaaaaaaattaatgactcttctttggaatttaacattttggcaacaacagccttagatagattttaaattctaaaaaaagtactaaacctctcactttctcaatgtgggatttattatgcccacaatttgtggtttcaactcaacattatgtaaaatttactatggaaaggtttctaacttaaaagagtgttaaagaccaaaaggaccttatcatcttggaaactgattgcttgggtgtagttcaagcactaaggagtaacttgaatatgattttactgtttgatcatgttatcacagattgtaaatctttactttctgaattgtgaatgcttctgttttgtttgttaaacgatcaacgaatacggttgcttaaaagtttgctagagctttaatatttagtttggagtctgttccaactaatcatagagctttaatatttagtttggagtctctttctcgcgtgtgcggagggttgtaaggattctgtgtgtctgatcatagaactcgcaatgagattttgtatgctcaaggaatattagaatatagaactttttacctttcctattttttaagcatacgaataataataatggtattttgctgttgacaatgtaacgcagggttagtaccgggcagttgccaatggaagcagcatttacttattttctttatgttcttggcatgcgctattacaatactacattgttttacggggtctgaagttctaaagtggagatcatactatggaaccaaagatgatgcatggaaatcccattacagggaggtctttgatcatggtattcgtgaagttttgtgctgccttggacgtgccaaatacttgtaggttcctctgcttagtggctgcatcagcatgtgtgcatgtgctaacacccgcgtgccttctgattttgacatatgattttatttatctaggagtgccttggaggaagatgaagttttctcagtagctcgattacttggggatcttgttgcttatcgtgcatcaggcactggacatttggaattgttggcaggtatttctgggtcttgacactgtagaaaattcacagtaggttacactcttttgatactgcatcaccatattaaaaatacatatgtttcaagtaaatgatggaaaatgcattgatcttattaaataggaaattctctattagaggaaagttacagcctaaacataagataatgaggatctaaatctctctaaacaagacttgtatatacttctagttatacacctagaacttgtgtcatttgggaaccaaacattgttaaaattgcccaaagacttgaactgctggaaatgaacattcctatcaagagataatgtcacttcattattaaataagtttgggtcaaatttataaagacacaactactatttccatcctatagctctactggcataatgtttctatgccaaggtataataacactgttattatgcatcaaaattcatctccctatttttgctttcctttcttgttgcatgaaatgagatttgagagccagttaatatacaggtctagccttaatgcagaagcaaagcgagtcatcgaattcctatgatgagtgcatgaaagcacctgcagaacagattcaggaagctgcaactcttcataaatttgctgaagcagcttatacggtatgagtagtacaagctcttcttattctgtttttttttgctatttcacttttaacataaactaaccacatgtgcagggtcctttacttgattttggaagaaaccctttcttatttccttgtgtgtggctctacagacaagggattttgactccctggatgcgtaacaggtcatcatttcaatgagtatatgctgacacacatatttgagaaatctaatattattctacacagttgacaagtcagggcattcataatgattgctttgcagctaatttgttattgtcaagtgtttggaatttaaattttggtatttattaattttgcttctgtgttcttaggcgacccaaacttgatggtgataactggtggagggggaatgcagcagcctttctaaaacatactaatttacccccagaagtacttcgaaaagggcgtgtaaaccaggtgagagatatgttgtgagttgtgccacacctttcctgtcaattcaatttgtcctggttattgatatttctgctaaaatacaatggaatttcacttttcttgggcagaaaggttttcgggttgaatactaatgacgagctaatcattgaattaagtcgctgagctactttagttgaatggcctattataggataatgctgcttattttaagttagagaactttgtctctttacagttttttgttctttctttgatgtagaatgagaaacgatgatggtattatgttaaagtaagggatagtacaaccaaaggagaagaccagttgagccatagaaccaactgctaaactcactaaacccaggaaacagacataacagaaaagtttatattaagcaatcttagtctctttaacaagtcataaaaggaaaccaaccaaaaaactttgactgtctttagctatatagcaacccacaacttgatttatgatttttcaaaagcgaaactccttgaacattgattaataaaaatatgttttatgtaattttaactaaatgggtgtatgagaggataatgctttaaggatctccattaataaaattcatgttttcttcttttgtttacgtactttctgtcttaggcaaagtgcgaggcagcctactttgtaattgttctgcataatctaagatcggtattgattgctgtgcgtggaactgagacccctgaagatctgataattgatggtttatgtagagaatgcattctttctgcaaaagacttggacgggatgataaagtattgctcttctcttttcctatttttttatctgcgcattacatgcatgtctgcctgttatagtttcaggatgtagagagtctttatagaacttattctttcatatgataaaaatagttttgcaattataaactgatttgaataatttgtgtactatacaatcaaacgatcttgtacacataatcatgctaagtgaaaaataaagccaaataacagtctcctataatcaaaggctacataaatacaaaatcagattttagaaaccaaatcttacagctaaataacaatgaaaatctaatttatattctccgttggccatatcaaatcctatgctcatttaaaatggcatctgccaacattctccccaagcttgttcatgaggatatgaaacatgtggtatgtctttccctttgtgtatatcaagctagctatagtggtataatagagattgttgtattgtgctttgcagtagtggtcatgttaaccctgaaattaagcagaaagttgtctcatctttcccacattatggtcattcgggcattgttgaagctgcaaggaatctcttcatacaaatcgaaggaaaagatgaagatgatggtaaatattttatttccttatttagtttaaactataatgggatgcttgcttattactggatctggttccatttccatttacacaatttgggttccatctagatttgattcattcaagtgtgcatgcagcctagtctcatttaagtgctcaatttaatatttaaatttgagtgataatacttaagaagtaaatgaacaaccttcaatataattgttatttaatcacatgtatataatgtttaatacttaaatgaacaaccttgattccatatcttatttatattctcaagacataaaaatattatatattatcctttatgttataactgtccactctgaaaactaagaaagcttgatcccatattttgtggtaaccaactaattaatcctaaagtggtgtattttgtagattcaactaggcactaacagaaaattctgactctttataatgtctatttgaggattgcattctaattgtttttttatgttagtattgttctccacttctatcttggatagtcaaatgtagttggttatggttggtccgggaaattatgaagataatcctgaataatataaataggaatacacaagaagaagtgcatcaagtccatagttgtatgtcccgaattgttccatgtttcaatgataattgagctccggatatttccttttctgaacttgagtttttccttcatgtttggatagttggtaatgctaataaagttgcagaatccagttcagacggccttctttcttctctactgggagctgggtgtgaatgtgagggttacaaggttcgcatagtgggtcattcccttggaggtgccattgctgctgtactaggaatgagagtatggatttccactttaaaataaatgtgtgcctacacttgtatgagatttgtttctttatttttatttttcgcttgaatgctttaaaataaattttctgaacattttcagtttttgtaacattttcttgactaaagctcttcttgccttgtgcatgttggttgtacagcccaatatttttaatttttttcttcagtagaaaaatacctgtaaagccaataaacattaagtggtacatcagttcttacacttttatctcataaactcaaccactggtttggctctttaaatttaataggaaagtttatacaacagaagaaaatttacaactattacttatcagtaaaaaagaattagaagcaacaataatcatatgcttaggagcaaaaatgcaaaagaaattaagaaattaagatcaagattcactacaactaaaacccatctgtacaagaatgtcaaagtagattactttatgcacaagagtaaagtttataatgtagtacataaatcatagcctctttttctgttgccttagttgctccatattctctcttatttgtcccgctctgatttcctttgtagcttcgcttgtcttactgttcagtatatgaatccttgagtatgctagacttaagtgatgtaatgagaattttagccattctagtcaaaaatcaagtttgaacccatttcattctactttctaacaatgtacttatatattgcaatttgggttttttttttttttttttgaatttttggttatagtcaatatttatgcaactgtctaactgtctaatgttgaaatgcaaggaagtaacattgttttcttttaaaattttatgtgtagctataccacagatacccgaatttacatgtttatgcatatggaccccttccttgtgtggattcaattgtagcagatgcttgctcaccatttgttacaaggtaaatgtaaattgattgttgaataaattttagtagattatgccatactgctatactaaataaatagttctccagcgtttgtatcttctcctccccttttgaatgttgagtgtgatttttgccttttcacagcattgttttgaacaatgaattctcttcacgcctttcagttgggtctgtccttcgacttcgagcagctgctttaactgcactttcacaagattccacaactgatacagccatgatttttaggctagcacgccgcttcctctatgtgagtaactacgaaagaaatagttctgaagtagtggaaccagcttcaaatggatattctgggacaaaacgatccgaaaatcaaaatgaacacacatatggaaatcaggagatatttgattcaagaggtattttcttctcatttatcttttccacacacacatattgatctttttacaaacatatattgtttctttgtaggacgcgagaaacgtgatcacaacttttccctcttcaatgagaccgataacaaggattttgtggttgaaagtgaacaaaatgaattcagcaacccttttgtcagggaaatcaatagaattaatgatcctgtatctgagttcatggaatccgtacgatcatctgaaagtgcatcggctgggaatccacccgagatgtatttgccaggacgtctaattcacgtggtgccacaaactagtagtttccatatgtctctgtggaaaggccagggaatccaagagagagaaaaaagttacaaagcttatgttgccaacagagagagcttcaaagatattgttgtatcaccatcaatgtttcttgatcatcttccttggaggtatatcttttaatcaatactactaattatacattaagtagagtgaaactttttcctaatgaaaatatttttgtagatgtgattatgctctgcgaaaggtattagaaactcagtgcactgcgaatcacaacgagtctcatcatcaaattgttgatgtgtattaaggtgagttcagaactccttaattagaatctaaaatatagaaccttgtgtatgatatgcaatgcattttgtgtcattaggtgcttttgaggattgtaagtatatccaatcttctgaactgtagtcgtttcaagcttgaaacttcagcaagcattgaatgcgactacgaactttcggtgaaagatgctctattgacatcttcgccgtgagttgtttgatataccatatcatacaaataccatattaatagaaatatcagatactcaaaattattataaacaactctgttggtagcaataaaaatgtgcataatgagaatgtgcagactatcaacaagtacccactagactacactgcctaggattactgatttgttccttaatattgtcttatgatattgtatataccataatatatttttataatcctatttcctgatttattcctcaatgcaatctggtattgtttttcctctgttgagaatcattttgttaacaaacatattgatgagatttaattgtgaaatgcttagtacttttgtgatgtgtaatatcgttattagtggaattcaatattagatcccgcatattttacttttataaaaattataaaattactaactaattataggacgtcacctcatagtggtactagacagtaaacactttggtatcctgtaataatgctctgtttaatttgtgtgcaaaaatagtatagtttacagaaacgctattctttagaataattgttgatttattttattttttctaattttaaaagaaggttgttgattaatgaacacatttcttttcaccaaaaatacataaactattttttcataagaaataaataaacataataatcccattctcaatcttcatattttttccccaaataattctaactttataatataattgatactagtcgattcccaaatgatctgaaagaaaatttcaataggtaatctttatgtcaccaccccttgttgttgctttatgaaattaataagtgagacatgtaaaacaccacaaatttatagtttaagaacacatatccatactagttatgtattataataaatttaattttatttataaattattatatcatattatattttattttataaatgtactagtgaacaaatagaataaacagatttttttcctcaattattatcttctcaaacttttttattgcaaaaataccctttgaattatacaaatcatatgaggtatgatggcactagaagggtctacttagcaattttaaattacatcaaatttaatttattgatattaaacatacaaaaattagttctaagaatgggcatgtatattctcataattcattatcagactgttgttttatgtatttattttttgtttgaacttttgaattaagccagattaatatcttattagatttagtgctacatcaacaaattatttaaataaatgagcaaaatgtaactggaatgagatatttgcaggaatttttataattcagaggggaaatatttgcaacgaaataaaattcaaggcaaaactctacaaatgtcatagtttcggaaggaggagggagaatcatatttatttattcatacatatatatttatatggaacacttcttaatacatatatattaggagagcaaattttatttattcatatatatatttatatggaatacttggatgaataactataaatatcaatttaaaaatattaaatcattaaatttgatttaataagtaattataaagaagaatttgaatttttatgtttaaataactacttaatgaaaaaatttctcatttttcatactatatcaaaaattatttatatcactagcaaaatagtaagtttgtcccacataagctacaattataatttcttttggtctaaaggctatataaaaataaatataggagatagtaagattaggaaaacgcatccacacccaaagtctaactgaattaatcgataaaaagttttaattaagtaacctcgaacaaccaatgcaaaattgattttaggttattaagaatttgatccaacggcaaatcattccagtctgtcagtaattcaacggaaaaataatagtttatttatttaattaagtgatgtaattaagaaaaaatctataataataataataaccctagataatttgactatttaagaatattatcttgattatttatttatttattttgccgaactatcaattaataatgatcctcttttatatatacaatatgtttaattggtcatggtcctggtctgtttaatttcaagttgtatgcatgcatgcatggttgatattgatccatatatatatactagatgagagttacgtggcgacccacgtaaatattagttttatataaattttagtagtttttgtttaagaattcagtaactaagtaacggcaataacaatggtagatagatcta

SEQ ID NO: 110678 - DNA, 3443 bp, Cannabis sativa
aaaaaaaaaagcctcatttcaaaattcgccctaggcctctcaacaccttgagacggccctgatagtgatacaatgatgataaaagtttatgagaatacttcaaaattaatcctataagaaatatagagtgtattattctagattgtctcaatttggtgtaagtaagtgtatgaggtagtttagttaattagttggttgactttttggttttgcttaaacctgaattaattgacttaatatcccaatgtgaaaatataagtcattgaatgtggacagagatacagaatttgagggaaacaaacaatttcaccatcaaatctcatactgtccaaacaaacaaaagttatagaaattgacatcttcatatttccttacataaattttgggaagcttgtagagtaaaatttatggacccaatattccttctattaaatttgaacttcatttcttgattgatggtgatatttactaataagacatggctagcttttaaaaatggccaatgaataattggctctatattattttaatttttttaaaaaagaaatgagattatcattcaaagtcatgtgccaaaatatgtgtacaagatttataataaaggaagatctcgccaccaaatcatagcgtgatttgaaaataaaactagctctgtcgcatttacaattaccactaaattatccaatgtttatttttttcattgtaaataaatgtttctttagtttaaattaatttgtagtcatagattgattagatcctttaataattgatagttggcttttaaaaatgaattattgattgattagattgattaattaaaaaattacatactagtgcatacctatacctcttcaacttcaaccttatcttatgcttataattagttggtatgctgctgtcattccacaactagttccattagtaatttagtacttagaattgttatgttttcaaaggagaattaataatctcttcttttcttttcccatttttttcccttgtcctataaattagcctactttttattgattctactagttctagtaggtatttaattagctttttcaattaataagtcatagtcattcatttaatatttattaatgtgtatacaaatgatatatatatatatatattatatttaactaagaataaataaaaaaattatctttgattattgtataatcttgctattttattttctttttaatattattagaaaattattgtacttcaataaaaaatttaaaattaaaaacaattccatgacaaaaaaatacaacatgaaattaaataatgttacaactctataacatagatatacttgaaatagataattgtggagatgaagagtgttggaatgatttttgcaccccatttcccgaaagcacgtaacgatcttcatctatcttatttttcatgttaggtggcatttcgccactcactgggagacatgtcgcttgttgtttttcaaaaaatttcaaaatttaagtttcttcgggtggtacctgactttttttttttcttttttaataataggaggaagaattcgaatttagaatttacttttttaaaagaaaagtgtagaactactagactatacctataatcacgaatcatggctgactttgaccgccaaaatataaaaaaagatagtcttttttcagtctttaataaattgaaacatggaaccttttggtttgttagtctattacttagccggccttaaacaaaagccgtggctcgtttgctaaattttgagtcgatcaatataatataagtaggcactttcttttgaagttgaaaaaaatcaaaacactaaacaaatcatccccaaagtcatttctttcaattttatttgctaatttgatttacatatacattgttatatcaactactaaagtaaatatttttaatcaactactcccatataaataatataaaagttaaaataagactttgaaacaattaaaaaattacaaaaattaaacaattcattttgtttagttcactatcacatgcaacttgatcgagtaataacaaaactttaacacaaaatttcatacaattaatgtgtacaccaaaataaaaaaataaaaaagaagtaatagtaaatttggtaatatcatatcaatatgatatgcatgtaagtatgcaagacaatgatatttattagttggggtgtcaattatggtaagtaaagttaattttaccaaatcaatgaccacaaaggactgagacaactcacttaattgaacaataataacaataacattattgtacgtatttgccaagtgtcaactacatgctatcacattcacatattgacatgacaagtggagtcagcccttttctacacgttctaactatgccaaaaatggtcaattgtattggcctagtcatggtcaatcattaattaaaagaaaaaaaccatcaactaattaaacatatttggaaaattaatagatgttttcccacaaacaaaaattcgaaaatgaaccctttacgttggttggttttaattataccaatatatgtttattggtttcactttataaatttatgataacagctgtggttccaaattccattcaaagcaaacgaaatggtatataatcttttacttctgattttatataaaattgaattattgagaaatttacatacattattattttttgataaattatttttctatatatttatgtttaattttttaatatatttttacggtactcataaaaataataaaaaaaaaccacgtaaaaataataaaaaataacaaaataacaatattataatataaaaaaacattaaaaacgtattttatgtaaataaaatcttaaaaattgtaaaaaatatttaaaatttcgtacaactatatttttataatgtttttgtatttttttttaaatactcccttatttatattggtagaaaaaattcactggtatggaccctagatgagagattgaaaattagtctttttttgtaatagaatcatatttcattagttgtttattttataatatttttagaacttgtaattttaagacttataatgtgattaacaattggtttggtcgattgcctatctcgtccatttctaaaaatatattttgcagtgactgcgaagtttatttttattattttttttatctatatcaagtattttatatgaccattaggcaaaaaaataaaataaaattatatgacattatgtcaaagcctattagattactttaagggcccgtttggtacaacttttgaaaaagataaaagttacttttcaaaaaagccgttacaaaaaagtgtttggtaagcagttaaaaaataacttatcaaagaatttatggaaaagctacaactaaaagctaaaactggtacaacccaacttttaaaaaaagctgttttgattaaaagactttataataaattatttt

SEQ ID NO: 110679 - DNA, 4723 bp, Cannabis sativa
ttaaaattatgatattaaaaaaaactaaaataaaattaacatacgtgacttggcacataacatctatctagtataaatatatattataagcctgtgacgacatatgtatatacataaattaatctaaaataaataatattaatatttttatagtataactctattaacaccgtcaaatttaacagaatatttttatattctattaaaatattttgttaagctaacaaaaatctaacccgttagataagcacattttatatataaagatatatatatatatatacacttacatacttcattgatttgctataaatttagattattagaaatatgaaagtgtatagttaaagaagtaggaataggtaagtgtatagtaaggtgcatggggctccatttctatggatttctctaacattccctctcaagatggtagcattttttttttgtgctcatcatatattacatgactcgatcacaagtgttagaaatataaaagtgtatggggttgaggaagtaagaactaagaataagtgagtgtatggtaaggtgcgtgtctcaaaagtcaaaatcgattgacaataagagaagtagcccatacatcttattatgaatgtaacactctaacatttacttgaaattattttttccttcagctattttattatagctatttattattatatatattttaaactatatttatctttatttttgactaaggtctttgtcaatctaaagatgttctccctacctacacaaatagaaaaagcaagcttacaaatgcaacttcgtggaaatttaatagttaaaagccatatatatatatatttatatatacacacatttttaataggtattacctataaataagtaattttgtaaaattttagatttttatgcttaatttttgtatttaattaaaaaaatatcttattttatattatatggaccgaggtttttcctaaaaaataaataataaaataaattctttgacaaaaaaaatataaaaaaaaatgagtttgacttaaatattcttttatataaataaatttttatatagtgtcaaaaagatactttttgatttttttttttaattaagtagttaaatttaatataaaatttttctcttttattagttatcggatcaaaatttaatatggtttaatatttttaaaataaatatttataattaaatttatttagtacccaataattaatacctattgagaagtgttctgtaagacatttcttagtgcattttgtgaatatgaaaatggttgtgtttctattacggtgcaatatattgtaacatagggttgcacttatgtgtcaaaaaataataatattttatataaatataagacatacattacatcaagagtctgcatataaaaatgaaaaagtacaatcaaacaaaataataaaactatcttcttcttgaagcttcttacaggctttgctctggttcaacctcaggtaggttagctgagtttctattctctctgatctattctcaaccaggtttgagctttacttcgtaattttactatcagcattaattaccttcttcctttctccctggctaaaaatcctttcttcgaagagattgcagtccacattaattacctcttccctgactcttgcatttaattttcttatacgtcaacctaatcattatgcatctccccctaatttctcgagctcaattgctttttaacaccatttctctctcacatcttcatttaattctggcggctccatcctttcagcatttaatgtttctgcataaattatacttattcctctcctgagatcgattttatacagataaaccaaccgtcacttggtttctcttcttctcacacccaaaaatcatcattgcgcatctttctccgaatccagacagtctcaccaggcattgaagagatggctcacacaccgtttccttcttcgaggcggcccttcttctccaggtactctcttctgtggtctatttctttaattgtctatttatatgttttgttgtaccacttttccacaacatcatcacctccttcttctaccaccactgtcttctctttttctctgccaacaatggcgtcctcttccgaaaaccctaatcctattactgctctcgatgatgaagacagtctcgtccatgagtttgatcacatttccatccaatctcctaacgatgccaactctttctgtctgttcttcaaactgctgtctcccaaatctgccaaaccctcttggattgagaaagctatgtccgaagcctggacccttagatttcctgtccaaatctatgaatatcactctggatttttcttggcctcttttcaatgtgacggagaccgtcgtcgtgttcttgaggagcatccatggcattttgacaagtttttaatggtatttacccatcctgacgtgtcccctactcctactcctgaatctgttaggtatgttcctttctggctccaggcccataggatcccgttcggtcggagaagccctcaattggcgcaattcattgctgatgagatcggtgatctcattgaaatattcactctctctttaatggaaaactttggtccttaccttcgtcttcgagtccttcttgacataaccaagccattgcgccgtggtatgactattcgtttccgtgatattcctgacccaaaatggatcagctttaagtatgaaaatctccccaatttctattatttttgtggttttgttgaccacacctataacaagtgtcccaagtatctgcttcgctgtgataatttccctgttcctcctatcctggagtataaggatactcttcgtgcgtccccatcttctcctcataaaaagaacccgtttgaaatttctaactctatcccttttgaggaattttttcctcgcatctgcacccgcaatgacgaccaagatttgcaacaagctgttgaccgatttctccatgtggaatctcctaattcaagtcttgtttcccatcctgctcaggtttcagccacctttactcaacctgccctatccaccccttcactggctatgcaaaattccagtcctctgcctgctatgaaaacaatgcaaacctctattcctccacccattatgattgattcagtcaccacccatgctgcaaaaggaaaagctattgctatgtctcctaccagccatccctcccaattcagaggaagtaagggggtggttattaatgaaccatgccccacaatttccactgccatttcccttgctaccagaaggaccttcacgcgtcaaaatgcccaagctggagactctgtgcgcagtatgcttaagcgagccagggctgttgtttctgatgatgctgtggtcccctctatgtccgatgatgagccaacggcgggtgctgctatgcggccccgccgagaaaaatgagtctttgcagttggaatgctcgaggtttagggagccctcgagcattccgtaatctctccctgcttctcaagcagcatcagccattgttgttgtttgtcatggagactaagttttcaactggacgtggaatgcacctcaaacacaagcttcgttttgatagtgttttagaagtgcctaggcagggtcttgggggagggcttttactttattgaaaagattctcttgatgttaatgttatttcttactcccttaaccacatagatagtattataaataattttaatggtaaagactggcacttttctggttattatagctctccttatgttgatcaaaaataagttacttggactttacttaataggttatttgacactgctcctcttttaccctggttagtaattggtgatttcaacgattatttgtctgttagtgataggaactcgcataactcccctccttcccacgccatgcattcttttcactcttttttgagtaaattcaatcatattcctcttcatcatgttgggcctaaatttacttggagacatggtacgactctagagcgtctggactggtgcacttcaaaccaactctggaccaacctatatcctcaggctactcttttccatttgggattctatggctctgatcatcgtgctcttaagatctcacttcaggaccctagcctacacaatcgtaattcaactcggttccacttggaaaatcattggcttatggatccttcttttgtctccattgttcagtcatcctggaccaattcgagtaccctccctatatcccccctacaattatttctggacagacaatcctcctgcctctcggatattaaggcttggagtaaaactcaacaccctctccaacttcaaatatctcatactcaagctgaactccatcgtctgttaaatgataatcagccaactcctcaatcttcatctcaagttgcctatatccaatctcaattggatggcccgcttcataaggaggagatttactggaagcaacgatctagagttgactggctgcgtgctgatgataaaaacacaaaatttttgcatcgtcgtgcttccactcgtaaaaagaccaatttcattcgccagatcactctccctgatgggtctacttctcatgatactcctactataatctcccgatttctcaatttctacatgttgtcgagtgaatttcgcaacaccaaattatatgatattattagtgacaagaagcaatttacgtgaaatgacaagtgcgagtattcaacctataatggcgagtactc

SEQ ID NO: 110680 - DNA, 12629 bp, Cannabis sativa
aaattactaattagccttttaaaattatgatattaaaaaactaaaaactaaaataaaattaacatacatgacttgacacgtaacatctatccagttattaataaatgtgtatatatgtgcaacttatcatattaactaaattaatatatttttaaatatttctctcacaaaaacaaagatcaatttatgactaatgattttcacatagaaaaatggaaaaagaaaacaatactaaatttgatactatagttagtattttttttctattgtttttaacaatataccaacgctagtatttttttttattaagtgttgtacaacttatcatattaactaaattaatatattttcaaatattccacctcaccaagcattttctaaaattttaccattggagatgctctaagagtcacctagatttgtgtgcatggttgatgattcactttattttttacaaaaaaaaattatttaataaaataaatattgacttctctatataagtcatatcaaaacaacggaataatacatattttcaaacacaacagaaaaaatttctcttcttccttacgatctttctcagagcatttgttggagtataatatagcgatatcattcagagcaaaatgattcgtacagagactgttttatcctaaaaacgtcgtggttgctagactactgtgcacactttaagcagagccacaaaacgtcttaaaaagagcgacatagtccgcgactcaaccagaatctttattcggtaattcgttccaattttacttttttaattcagaataacaattcttgcaagtgatttaacaaatgcagaaacccaatgagctaacaagggcacaacactaacaagggcacaacactagtgttatgctcatctgtttgagatttgtaatataattctatagagtattgccaagagtaaaaaaggggagcaactttacatataattctgtagattgttgccaaaatatgttttgctctgttaatagtcaaatttgcagaagttgcaagattaaataatgaatgattattttgtctctatacaacaatatgacagtaaaggaatgtatcgtaaaatttaaacactggcttgggggctagcagttgcagacgacgacccaacattttcattagccctaccattggtcaccactttgcctgacttcttgttctttggtctttgatcatcatctttgtcaccttcattcttttttaccatcattggttgaaactgccacattaaaacatatcaacatcagaaaacactaccctaaacctatgatacatataaatcatagaattatcatacaaacctgataaatggagtagataacatttcttctcaattgacccatcatttctaagaagaggttgtagccttcaagcttgtattcaataagtggatccctctgtgcatatccgcgcaaacttacagcttgttgtacaaacttaagcgcttgtaggtgttctttccacaagcgatcaatattgcttaagaccaagaatctttcagcttccttcatcaaacccggtgcttgattgtccactatttcctgatacatcatcaggagatatacattagacacatgaaacaacagggatgctatgattgaggttcgagtttgtagctatgtctctctctctctcacctttttcctcaaatatgcttcacgaccgcgaagacgaaggtaatcctgcaactcctcatagcttgaaccattactcttgagcaaatctggtgtcaaatcatccaaaagatagcaatacctgagaagaggataaagtaaaattagaggcaattctgttcagaaactaaaactttgcagccacatcttggactagagatggatggtatgttttcatttatcaagcagaacattgcattactctaaactaagcatagacaacagaaatgcagcttactgctgaagtttggcaatgagcttctcaagatcccagctttcctttggagtatccggaccaatatttgcctattcattaacatgaccaggtttagagaaatctagtttttatttattataaaaaagttttgaagaatgtaaaatgtataaacatcatagcactgccactgcttttccaagcatttacctctatgatgtcatccattgtcaattcagcatattccatgataagagattggagatcatcagattcaagggctctccttctttcagtatataagcggtctctttggctattcaatacttcatcaaattcaaataattgctttcgaatatcaaaaaagtaattttctacttttcgctgagcttcatcgagtgatttggttagcattttggactcaattggcagatcttcaactctgaaggctctcattaaaccctgcgagtaacagtacaatagataagttctaactatcccttagcacttttaaatttcaaaatttgtacctgaattcgatctccaccaaacacacgaaagaggttgtcttcaagactcaagaagaagcgagaacttcctggatctccttgccggccacttcgaccccgcaactggataatacaagttaagagtcaaaactatagcattcattacaaaatattcctcatatttaaacacatgttaagagtgatagagcaaatgttttcaaacacattcaagcagtacctgattgtcaatacggcgagattcatggcgttctgtgcctactacatgaagtccaccagctgaaacaacctgcagtaaaaagaaaactatgaaagaactgcccaaactgtgggaacttcgacttgggggaaataaacttaccttgttcctttcttcctcggtgtatatcttatattctttaacaatttccttaaatgcatccctcagcttggctatgacttcatcctgagcaggaccctacaattgcaaataaagatggcttaaaaccgatatggtacaagtgtattctatgcagtttgatttcggtctgacacaataaagtgcaaaaggaaaactagtattttctgtaaaattattttattaatttgaccttttcgcaagaataagatagacgctcctctgcttcaagttcagtcaacaatcttttgccccatgtttgggcagctaattttacagcttcctcggccaacttcaaattctccttggatagattgcatggaaatagcttttcgtcaacctgaaagataaatcattctaagttatagacacaccaaaagtgttgcacagtataatttcgtgatatgagaagagaaagtaaaaaacttaatcaagagaaacaaaaaacataccttccatgtcttcttaggaggaagtttctttattgatacaacaccctcaattggtttaacaatactgaaatataaatgtaaacaagttaatgcccgaaaactctgtagttactggtatatgatttccattgcgccatgtgcaaagaatagcttatgaaaagcagagctgctccttcactttgctattgattatgcatattcacctaaacaagttgaatagtctatcatgcatgcaaagagtttggttgtttctagtgacagtcagttattctattatacaagcgattcatcaatttcaacaagattatcatacaatagaaaatgcttgccatgaaagcaagatttgtggtggatcatgccaatggagtaatagttcagtttgaagattgaaccaatttgcatcagtactaataggatatgatagccattctccaatatgtatgttgaaaaagaaatcaattataataaaactttgttggaccttggcattagcatctcccgtagcttcaaccttgccataaattctgcattaccacctaggattatgtccgttccacgacctgccatattggtagcaattgtcactgctcctagtcgaccactctgtgcaacaatctctgcttctctttccacattttctggttttgcatttagaacctatatacaataacaatctatcaaaaataagagtatactacaaccacaattgtctcaagagtataacatgtaacctacaataccccgtggatattgcttttatcaaattacttattttttttcccgtataaaataggtaacaagatttgtgccataaagaccaaaagatcacacctcgtgcggaattccagattctttcaactgctcagacaatgagtcactctgctcaacacttgtcgtgccaacaagcacagggcgacctgtcttgtacattctagaaatctctaccacaaccgctctccattttcctgatgttgctctgaaaactacatcagattcatcctgtggtggcgaaaaagaaaaagagagtggaaagatagttagaatggtcaaaaggcattgaatgttcagtaccatgaactcaaaagcaaacatatgtgccattgtttcatcagttttcttaacttataataaaacgtaactttatatccacatttttggcattaattctccattacaagatgaaaggagtaaattagaacaaacctttctcatcataggtttatttgtaggaactactgtaacttttagcttgtatatgctttcgaattctgtgctttcagttgctgcagtgccagtcattccacaaagttttgggaactggagtggcaatacataattatgtgagagttaatttccacaaatgcaccatttgatacgtctagaaaaagaatgccccaacctggagaaagaagttctggtaactaattgaagccagcgtaatggtttcattctggatgggcaaaccttcttttgcttcgactgcctggtgaagcccatcactccaccgccttccctaaaagaaaaggacaagtgactagccagtgtgattatgttcctccatgaactaagaactatatattagcattagctattacatgaaaattaaacaaacccttagcagtattaactgacagtataatcgattatagaagttccatcgtcttcaaaataaaaataaataagaaaaacaattaaagtaaagaggaagaaaatttgtcaataggctccatgacaaagaaactcacttgcataactcggccagtaaattcatctacaataagaacttctttcccacggatgatatagtttatgtctctaagaaatatttccttggctttaattgcattcagaacatatgatgcccattgttctcggggatcatataaatctttgacatccagaatctcttcagcatcttcataaccctgctctgtaagtagaactgttttttgcttttcgtcgacctacagcaagaagggccagtcatttagtaacacagattgttttcctttagctcacaactacacactaattttctgtctcctgataaaagtctggaccttgtttctttcatacttttacggttgaaaaattgttcaatatcatgtttacttaattgctacgatgtttgtcttatattcttacagtgtaatgtacatctcgctcaaaggctgtagctatctttgcagctttataataacgatcactaggtttttccgctggtccagatatgatgagaggtgttcttgcctcatcaataaggatagaatcaacctcatcaattatacagtaattaaaatccctcaacacaagctcatcgacactctgcatatgcaagaaaatacagtcagaatgcatacaagaagtaaagcaattcttgatcataaaagctaaccacagcagaatgaaaaagacagcagataaagcaagaattactttccgtggcaagattgtccctcaagtaatcaaaacccagctcactattggtgacataggtgatgtcacacaagtaattttcttttctttgctcactggtcatgttctctgccaacaatggagtgaaaatatcaagtgaatcaattttgagcagcaaagtttcatcattagaagataaatttgaagctttgactatgttataaagaaaatatataccaaagaaagttcatagaagtaacggaagtagattgatacaggaatcgaatctacctctgttaggaaaaaaaataaactaaaacagaagagacaaacaagatattcaaaactgtatggggctgggaaggaagcactagagtaacattagagtttgaagtgtcactttacaagtataggagagaatgtgtgtgactcaaacgagagatagcaaaaaactatttatactagtcatttctagtaaggtagagagatgacatctccaaatggctaggatcctttcataacctatccaattacaacttacaagtaatagtaacaagaacaaaggtacaaaaagcggagtataagatgtgcattagaatgagacatacgttgaattaggccaaccttcaatccaagaaagcgaggaacctgaccaacccactcgcaatctcttcgagccagataatcattgacagtgacaacatgaacaccttttccagttaatgcattcaaataagctggtaaaatagctaccagggtctttccttcaccagttttcatttcagctatttctcccttgtgaagaaccataccacctaacgaataaaaaaaaaaaacaaagaaaaataggactgtaataagcccatcgaatatagacatgcagatctttgatataagcaaaaatactgtgattaaagatagagatgtagaactccaacaaagacaggataaaggtcattgctagatatgaagtgtgtatttttaagaatatccacagtgaaactaatgtgaaatttaatactgaagacttattgggtgatctgatttatagcaagatgactctgtgacaaagtactaataatactttcttgataaagccagtgtgtttctttccccacaaatttaacatatatgactcattaagtggtctgaaattcagcaagatgactccacaaccacaagttgaattgaacacagtggattttccttagtgataacacattatgagttgtaaagaaagattgatttgacccttcagagatgacccaaaacagatgacataaaacacctatttcagcttactcatgagggaaactggaagcgaactaggaatatgggggccagtttcaggggtgctcaacgtagtaatgatcagttaataaccaagttacttaaatggaatatgatcaatcaacaatcaaacgaaaacatattcttataaatatactatcgcatgggtattacttattagtacctattagttggacatcaaagggacgaaggcctaaaactcgtttggaagcctctcttacaacagcaaatgcttcctgcaattcaactcaaattataaaataaaagcatattaccatgagatttgtagtcatatcactattgaaaaaggctacgcttacaggcaaaagagaatccaaagattcgccccgctgagctcgctctttgaacgccgaagtcttctccctcagctccgaatcagacagagcagacacctcagtttcgaacctgttagttgcagtgacaatagaagcgtactgctgcctggtggattccccagtgtcagtccctttgaaaatcccacctaagagtcctcccaacgaagcaaaagctcgcatttgatgatgccttttaccactcccgagtttcgacgttttgggaggaaagaggaaaacttgactaaatttcggagcgaaaatggactgacccatttgaggtttacgacagaagtcgttgagaatatgagaacagtcggtgcagagaggtgaaacagacgggtactgattggccagaggcggcttatacaagggtgtcaccattgttgagctaaaaatagaagagaagaagaatgaattgtacagcagaagtttgaatgagaaagaagtaaggggcgaaaggtagcgttgtactatgtgttgtttctgggttttgtgaagaaagcgaagaacagagcagtgtgtgtgggggagataaggtgtgtgcgtgtaagccaatatgtgactgactctgactctttctctagttgaaactttaaagttaaaaactttccaagctggaaaagataaacaaaaacggcttcgaatgtaatccaaacttgagtttctttccgattttcaaggaccttaaatagaaagcacttttaattttataaaagtattattatttggataatttataaatttataaacattaagcctctgatccgacggtcaccattgcatgtttgcaacttttaataattcaatagcagccatttatttacttgttatgctcatgttttaataatatcaaattatcaatagctaactttgaaagagaaaaaatgaaactggagtaagcaaatttcaaatgaatccactctgttcaaaaatgaaatttgtaattatcaataaatattaagattaccattaaccaacactcctcgagtctagaaaaagaaaaagaaaaaaaatgtggtcaagtcactattctcggttccctacttcccaatattgtgtataacttggctactctttcacttaacatgaccaactggggaacagtttcccccttttatatataaagggaaaaaaaataaaaagcattggaaacacaaagaagggtcttaagactccagcagtgattgtaagaagcaactgtggagactccctcctcatcaactatcaagctctgttgtatcaaaaaaagaccatcttttgaggcatcttgctagctagctaggctctggcggcactaccttcaggctgcgcaaccactcgcacaagctgggatcatcaaaatgaataaagctgcttttcagctttgtccgctgctctattgttaaggagcgtaactgcgggaatcttgcctcctgcaatgtataacaacactcatttcagttgaatgtgttaaagggaaaaccgtgcactttatttaggggatcaaggcataagaattaacactatttcctttctctcactcttctcacctgttcatatggaggatccctgtgtgccggtatgagacgagaaacaaagtatctggcctgagagcttccctcctgtacaacgtccataaagaagagcttgtcttaatttccatacactagtctaaaccaataactaacaaacacttttaaggtttagaagaaaaaccttgaatgcaaggatgcgaggggcaggaaaccgctgttcagttagttcttcggctaatgtcctgcaagctgccaaagcagctgcacttttcccttcatcagctgcaagttcagcaccctgaatttcacaaaaaaatgtggaaaaggagttataaggggccaaatgcaatggaaaaattagtaaataacagtactctctccaattggttataataaaaacaattaacaaataagtgatatggcatatgccatctagtagtctctcttgtttttccttatccctagatttcttatcacactttaaacaagggaaatgggggcagtcaaacctaaacaataaatacttaagactgcaaataaattttgttcaatcactacttaatttattatattttttttttctttccataactcagatcttgtaagtcctaacaaacataagaagaaaaaagagacaggcaagataaatagatccatcacagacaagaaaaaacatgagccaaggtacataccaaccaaataaagacatctgtaccatggtcaagaactactgctgcatcagactgcatagcaaggtcataagctggtagttcctcaaaagttcctccttctcggtgcactagacatcgaggtgcaatcatacgaagtgaaagatcaaaggatgcattcaaaaataagttgcgtaatacagacctctcatcttcgtgcccaacaatgcttcctaaaaggggtcctcgtctaagatgaaataggagctctggtaataaagagatctccttggagaaacgatagagttttgattttggtacttgagacccaaatttcagggcaatgtctttaattctttcatctattgtttttcgcatgtcaattgcatcagaatagttttttgctctgagaagggtcctcttggcaataaggactgccgctacttcatcttgaacactctggagatatgcggaaacacttgtaacaactggcaatctaacagtaattactcttgatatgtcagcttgatacacatttgaatactgaattgcaaactgaaaaaacacataatcactcttaatatctcctttggtttccatagagagtgaaaagctctgtgtttcttcaacactaagcatttgtatacaaagagaagtatcattcttgaaagtttcatgagtgtcaacatgtgcctcttcaccaggacccacaacctgagttataagaatatcatcagaacagcgaatttccagcaaaccatgagaacctgcagccctggtagccgctctttgcaaattaacaccaaaggcctctccaaagtcatcatgaagaaccaaaacacctccagacgcttttgctagcggctgtaaaacaggaatcctaacaggacacgtaccagcacatagaatgtccacaactgtattgtgcctatgagcctcttgacctaaattttccatccatttcaaagccaacttctccatatgaggataatttgggtgactgaaggaatgaggaacagatccagggccatatgtattaggtccaccagcacagacaataatcctactattacctccagacctttttattaccccccgagatatttctgcagacggtccctgaattatagcaagagcaacctccacagctgttcccagacaacggtctctagaggcctcagcaacgttcagtttataaggcctaagtgatgagaatatagcatgtgcaacaggcagcgaagcatgcattggtgataaataaattcctgtgccataaatcaatcccttcaatgattcctggcttggtgatttttcaccaggaagcacatcagcagatgcaactaattcttctgaaaagtcataaactgatactgttcgaccatacaacactatccctattcttgttgttgggggaagtgaatcaacaaacgcatgcaaagaactctgtagatgttgtaggtgtggttcatctaagcattcatctatgacaagaacaataggtgctgaggttcttgaatcagaaaccggaacaaaaccaggtcttttgttcccagtttgaacataatcaaccatagtagaagccaattcaggaaaattaagtagatcttctttgctaggagctatgtattcaccctcacttccattcagtttcctgcatattatacactgccactggcctgaaccaagtagtacactgcaatagatatttgcataagctccacaactctggcagcgatgtggatcacgttgtattatttgaggaccaggtgaaatctcctttccaggagatatcaatgccccaaaacccaaacttggaacatttgcttgtttcttttgtttcaatacctaaataacagatcagcgggaaaggaatttaactaattataattaataaagggaaagaaacatgtataatttcacatatagatcatagtcttggttttgcatcaaagaaagaagtaagtaccttatgtgctgagaataagacaaatggggcttccccaacatgagctgagtcttctggaacaccttggtgcgggaaatcaaccaatccatttgagaactggggaggagaggatgttgggatagatgatccggaagagaaagcaagcggctgaggagttaccggcgatgcccgaaaaggcacagcagcagggcgtacaggtgaagtaaaaacaggaggtccaggaggagtgctcaggtgagaaattgggctgccggatttcaccccattggaagaggatagtacatttggtggtgatctaattgaaggtgaaatagcagtttgatcttgttggaatgtaggcggaggaaacttgggagaaattaaaggaggaggaatgggggttttctcagacagagacgtcgatgactcggaggagtaagaggggttgttagagtatccaacattaggctgtggtggattagccatgggaattcgaatattcgctattggaacaaagaattcttcaagaacccagaaccaaaagtatcaaactttacagaaaacaaaagcaaatctatatcagatgagtttgaattggcaggcaaaatcattgaattgttgcacagaacacatagaaaagtaaattaacaaaatgaaagagagaaaaaataaaaaacaatgaaaacccagttcaagataggcagaaagattgtaccttggaactaaaattcgaatgatggaggaaacccaatgagttgtgtggccgccataagtgaatcagattgaagaaatctacaattaattagcaaaggttaggatgacatgaaattgagtttaaatggatcagatcgtgtaagaagaaaattgagaaacctgatagaaggatatgatgattcagaagatggaatcaaaatgaagaattgactcatttcgttctcatttctttctcttcaattcaacaccgtttcttctccttcttcttctcttggtaacttacccaatattcttgtattatattctgcggccccaaaaaccaaaaaatgaatgagatttttacacctcatgtcaaaattgacaccttttttacatttttatccatacacggttttttaaacttttttaacttttacattttt

SEQ ID NO: 110681 - DNA, 5958 bp, Cannabis sativa
cagccacgcaaagctgctcgtgatttttccatagcggtgcgcggcactacgaggtagtatcgcggcgcttgaagcctgatttttggtagagaagaattaagggttccacgaccttgttacacatatttttcattttaatgccctgacactgaagtccaatgttgaggcactactttacactttccaattctttaacattagaagctacaatcgcacttgatcttttggatttcttacttggattatttttttggtgcgctagcaacaaaacttcatttaattattccttctttaaccttttttttttctcgaattaactctattcttctccattattaaacatgaatatataaacaaccaaaagcgtaaaattacacaaaatacaaataaaaactaattaaaaatatcttacttaaaaatagtactaataaagtcttaacaaattctcccaaacttgacctttactccccttcgagtaaaaatcaccactaaactaactaaacaactaaacacgacataacataactaaatcaagccaatcaaacaaagaactgaatcacgatgttttaaataagccaagtaacatggcttttagaaaattctaataatatgctctaatttagaatttcaactcaattatatccttaacttatctcaattctttctttcaactcaaaaaataaaaccataatcagtacttaactaacattcgaaacaatttatacatgtcaaatacaaccatcaaattattacccgaatttattccataagcttgcattgcttactattctccactaatatagataaatgcataatcaagaatcaaaatatctttttagacttgtaatgaaaggcttaggtacgggtggataaaatagttatttgagctcacatataccataagtatgtaacttcacaaccaatcttgatattcacatcccaatttaacacacttcaagctctcttttatttaaagattgaaaaaaattgacactagagagtttttttttttcaagaacaaccattcccctaaacttatacgtttaacactaagagaattgttgggtttttttttttttttcaattttttttttcatattttacttttatacttttcctcaacataacttgaatttttctattgtcaagaccactccacaaaggataatacccaatgcaattcaattctctttttttacatctttatatgctcatgatataaatttagaactgaaaaataataaagtgttaaatcaagcctaaaacagatgtttaacaacaaaaaatataactttaggctcaaaaaaggtaactaaggagaaatttaatcaaggtcgacttgaaagactcaatcgatccaaaaatttcctaaattacttttctaatcatgcatcatctatcatttttcctcaaatagtaagcaagcaagttttaaatttttttcttaatcaactttccacaatccacatttagcatgcataaccacttcaattgatagaggtttaccaattatgattatatattttttaaagcacaaattgaagttaattaagaatacaatctcaccaagcatgcgaattttgaaaaaaatgatcaaaatttttctcaaaccatgctacatactcaattccatattggctcatattccatattcaacaacttgactcaaaataacataatataaacaaacaaacacactaaaaaaaatttaaaaattttgttcaccccccaaaacttaaatgtcacgttgtccccaaagtgacactaaggactaggatagagaacttaccttagcaccatatcagaatggcagtgtaggaggtggtggttggtgcggacgccactatggtggggcccatagtttggcaaaacatactcttttattagatgatgagctatcctggtttgaggagattcttgcgcaatttgcaaatatctgtatcgaaaattcatgaatgattctaatcattacgtcaaaaaaaaaaaaaaatcaactaaaaaataacttgacaactacgctactttaatatgcaaataaacaaaatatcaaaatactaagtccacaacttaaaaataatacaaaaaaatcttaataaaacaaagaaatatcttgtataagtatagattaattttttatggtttcattaataattacataaaattttaacaaacttttaataataatgagaaaacagaagaaaaacatataaaaaaaaaatttaacaaacgtatgctaataattgcatataattttatgctctaatgataaactaatcaagaaagaaaatatgatatttttgacaaatttatactactaataatcacataaaattttatgttctattgataaactaaagggataataatagtaaaattttaaataacagttgtactttctagttgagaatatagtgattgaagaagcaactccaacaattggtaatgatgatgttgaaaacatcaagatttgtcatttgagatttggacatgttagtaaaagatcgctttaagagatggacaaattcagcactggtgtgcatactattaaggagaggttggcctatatactactaaggatctatggtgtccttctatagttaaagcctttcatgagtattataattattcaaggaaagtttggatgtttctgttgaaaagcaaagatgaggcttttaatacctttgtcacatggaagaagctgattgaaaatcaaaccagatgcaagattaagaagttgagaactgacaatggttgggaattttgctcaaactagttttatatagcatggaatagctaggcatgtaactgttcgagacacacctcaacaaaatggacttgctatgaggatgaataaaactctcatagagagagtgaggtgcatgctcaaatgagcaggtcttgaaagcccattttggggaaaagttttcaaaataacttgttatttggtgattagatatccttctgtcccattgaattttaggactccacaagttgtggacatgtaagtacctaagttggaacacaagagtgtttgaatgcaccgcctatgctcatattacgcaggacaagctttaacatagagcactcaagttcttgtttctaggctatcctaatggtgtgaaggggtgtaaattatggtgtttagaacctggctacaagaagtgcataatcaacagagatgccgtcatcaatgaagatgaaatgaccatggtaaagaagacagatattacttcaactcaagaagcaaggagtagtagacctcaaattgaggtggactcagtgtctaaatttgtaattgatgaatcacaagatgatctagatgaatctaccaccacaaaagatgctcaaacagccctgagaggttatcaattgactagggacagtgaaagaaggatcaccaaagcaccgaaaaattatggatatactgagttcacatcatttgcactatcagtagctaaagatcttgagagtttagaacctaagagctacctaaaagccataacagaaaaagatggtgtaaaatggctgcaatccattaaagaggaaaatgtgtcatttgagaagaacaaaacctggattatagtcaagagacttataagatgtaaatggatttttaagtgaaaagaaagaattccaggagtggaaagaacaagttacaaggcaaggttagttgccaaaggatttactcgaaaggagggcattgactacaatgatattttttcccatgtggtcaagcaaacatcaataagagtaattatttccttagctacagaatttgatcttcaggtgaatcaaatggatgtaagaactgcattcttacatgggaatgtagaagaaaatatatgcatagaaattccagaaggctatgagaatgatgatctagataatgtttgccttttaaacatgtctctatgtgggttgaagtaggctccaagataatagaacttgaggtttgatgaattcatgatgaaagttgactataccagaagcaattatgtcctttgttgtatttcaacaatctgatttacctcttattgtatgtagatgacatactaattattgttaaagataggaccaacattgataaacttaagtctcaactcaagagtgagtttgagatgaggaatatgtgaggccaagaagattttagggattgacataaagagcgacagaccctatacaatcatgttaagccaaggcagctacctcaagaaggtagtagagaaatttgggatgactgatgctaaaccagttgcaactcctctagctcaagactttaaattgtctcaagagaaatctcccaaaattgagacaaagagaagaaaaatagacgatgtgccttatgctagtggagttggtaccttcatgtatgccatggtctgcaccaaaccttccctgtcacattgcatgagtttagtgaactaattcattgtagatcctggagaagaacatttggataacatttaaatggatgttgaggtacatcaaagggactcttaacactggtctagtattggaaaacccagtaatttcaaagaaaatgtgacttgttatgttgactcaaattatgctgctaacctagacactagaagatccttaaccagatatgtgtttactgtgtttggaggttatgtgagttggaaatctaaccttcaaaaggttgttgctctatcatccactgaggctgcatatatggcagcaacaaaggcaataaagaagatagatgagttgattgttgattatgacaatcaaagcgctattcaccttatgaagaattatatgtttcatgaacggtcaaagcacgtagatatcaagttgtattttataagagatatcattgttagcaaagaaatttaagtcaagaagtgttaatgcaaattttcgttaaccaaattaaagcctatttaatgattaattggcataaaaataatagtaataaaagaaataaaaagaacacaaagctttttttacgtggttttgtagttaaaattgtccagagtctatcttattagatttttgatacaaaactagggccttttctctaaaagattttttgcccctttttcagtatatcctactcctatttatagttacataggaggacagttaattacaaatcagactgatatcctacaacaataatcccctgaaattgtgggatttgatttcatcccacataaaataaatgcagttattatttgaaaattacacaactgtgatttatctgcttttactgggtcaatgcgtacgtggattaagtacgttgtaatgtgtatcgtgttgggacttctccctgggaacatagcgataaaaaccctggcagtaagctagagcttttcccatgtattttcgaggttgataatgtaaatctcgttgtttctgcgattgaagacattacgctccatctgataattgcagttctttgtaacaagatgaacttcagcagtcaacatcatttgaatgtcagcttctatctgagagagttgactcgacggaacagtgaatcttattgaaagatgtttgaaactgattagttaaggtactatgagttttccttcctatagcgagatggatgcttcgctattcgttgttcaagttcattcaactgttatgcttagtttgtataatgtatattatacgctaagtgttctatcagtcaacatgtctaatttatatttcttcatacgtagcgaggttggtgcctcactttttattactgatgtagtccttatgatcatgtcttcatatatgaaatggttttcttgtcaatacgtgaaataatagtttgtacatctgtgtctcgctcaagactttatagtcaacgagttatagatatactctaccagttcagcatttaatgcgttatttcattttaatatcttctaatatgattatcattatatttgttgatttgtattctcccagtttgacacgtgtctgttatagtgagatttctct

SEQ ID NO: 110682 - DNA, 2927 bp, Cannabis sativa
atctttgctactctttcatttcctttcttctctctctctctctctctctgttttaccttctctgttacaggtttatgttcatcaatggctaaccatttcaacatattacaacctctaataatgatcttattagaacaaaaatttctcgtgacaaaagcaatcatagttgataaaaaaattaatgtaaccaagtgacaagttcaaatctaatgacatcatcaatgtcacacattcaacttgaaaaaacttagttgtttaactttataacttagaaattattttcactttttagaaataaaaaatgtcttttacaacctaatatgaggtgtttgtcaaacaaaattaaaaacagttattgtgttgaaaaaaaaaatagaaaatatcataatgttattttttttttatttcaaaaactttttttttctaatatatatatatatatatatttacatttttcctcacattcccgagtttgaggacagaaatggatctgagtttgcatttgggatcgagtttagattagggccggggatggggacatgtctaaggccgaggctggcgttaaggttcgaagtccgagttcgaggtcggggtgcgggtctgggtttggggtttaaaggccaagtctggggtttaggtacaggtcggatccagacagggccagtcctgggcataggcaggctatgcccgcgcctagggcccactcattttaggggctcaaatcaaaaaattaccttttaaaaaatgtacatatttttttaaaaatactattaggtctcgcgctggtatctagggtctgggtctggagtttgggttcgggacgacgtctagggtttgggttccaagtatgtgcgcaggccaggcttcggggtggcaattcatattcatgggtcgtgttcgtgtcgtgtcaaaacttagatattttaagcaaatgtcaaacccaaacccgactcatttattaattgtggcaaaaacttaaactaaaaccaagtatgtttataaacgagttgacctaacccgactcatttcggtatttgataattattaaattaaaattggtatttaaataattagatgtgataagtgttaaaattgaaaaagacacattgtttcactaagttaaaataaagtgacaaatatctaactctatggctcatagggaattcgaccatggattggtttttaggcccaattatcttttgattttatgcctatctcatctaacttaaacttagtgtgaaggccataaatagaaagagagttttttcaaataggattctaagtgattcaaccctagatctcacaagcccacacaaatcaagaagacactcagacatttgtagaagattgtgaagaacgattgcttatcagagttaaggaaacctatccaggttcagtacttggtgatactttgctacagaaaggattcgagtgttagattattgaacggaatgagtcattatacttcgctgtcattaatgtaagtaatcctacttttaggtgtttatttatagttttatgcatttcatattttacgatgttagatttattatttattatcaaacatacatgttagttaattgagatcttgataaaataagttctaataataacatatttaaccgtgtgttaaacgtgttatttttggatttgtgtcatgacacgtttattaaacgcgttattgtgccgtgtcgtgtgacttgctaagtaatcgtgtcatgtttatatttggggtcttgacacaattaataatcatgtcatgttcgtactcactataatgttatgtcataaatgtgttaatacaaacacgacagaatgacaccaattgctatctctcctaccaacaaagttagacaattacaagggtaatttttcttactggcattcatatgatatgtttatacaagagtataattttgttacggttactctattaaatgtttgacttattgacaaatgtcaacttcttattgatccaaatttattgagtggactaatgaagagcgaccactaaatcaacatttaacaagattattaaagcaacagtgtacataatcaatttttgactaatatttatgtaacacggtagattgaaatttccttgagaatctttggctctttgtttctcttctcgattcattgaaggatcatcacttatgtaagaggtacgttttattctcccacaatgaatgatagaatgcaaggtgaatttttaagaaaaaaaggtttccacaaagggattccgtttctcatcttttgtttgttttggttatagattaccttactcgagttttacataaggctgcccatagtccttaatttgcaaatgatctaattatcttttgcaaatgcactttaaatgtggcaattttgtgaataaagctttttatgaattctgcactaagttgggccttaatgccaatatgaacaaatcaaacatttactttgatagtgttacagttgctgacaaagctgatttgcttaaggagattaattgtgaagagagtaaattccctctaaagtatctaggtattcctatgagacctgcaaagtggaaatctgaagagtgtggcgtaattatctcaaagatcaaagcttgacttcatacttgagctaataaatattaatcttttgatggtcggtctcaacttattcattcagttcttcttaggttaaggagctattggatgtgtatctttattttgcctcatagtgttagggaaagaagttgacaagctttgtagatagtttttatgggatcacaatgagacttccaagaagatgcatcttgtttcttgggagaaagtttgccttctaaatgtgtgtggtggaattggggttcaaagataactctaaggaggcgtttagttgggaggaatgaaaatataagaataagaattggaatgggaatagaaataggaatggaa

SEQ ID NO: 110683 - DNA, 2480 bp, Cannabis sativa
gtaaaataatttccaacaccttacacgttgaaaaccatgtcatatgcaattttgcagagctgatagctaaatcaagaaatactgaggccactatttttcgtttgaccaagccgtccaactaaaatgaccaaacacatcgaccatggaaagagaccatggaaagattcaaaacgtggaaaacgtggtgttgacatagcactagctcaagacagacaaaattttgaagcccgtaggaaagagaagagggcttgccttaggtttggtaccaaataaatctagccaaactccttaattttggtctgaaatgtgatgaaaaccttgggttcttccttggtgttcttggtgacgacccaaagagagagaaaggaaatgggttttgtttctttgatttttagataagttccaataatattcagcttatctaataacaataatattcagattatctaataataattaatcttaatataaacactaaaatctaatatctcataaaagacaaattatggaaaaattactaaattgcccatttttcttcaccatgaagtaaacttgaaacttaggggtattatggtctaaatttataatctcgaatactcacgatattccaaaagtctaacaataccattcatctaaatctaacttactatactatatgtatgtgactttataggccaaatgtcgcattccactattaccgggaataaaaatatgaaaaatataacattttacataaaccataattaatatacctagaattcaaataaatctccataattatgaaaataataattaaaagtctaattctaaaattaaactctaattgtctactaattgtcaaaataaaatctactggtcattacagacattcttagaaaatgtgccaaaatgctcgaggttggcatatatcaaccttggtgcttaaaatgacgcttagtgccaccttgggtgcccatgcccaaaggtaggtgcctaaaaaacatctcattgatgttaattcttctttacggtgaaaactacacccatagccagtttcctctaatttgcacatgcattacttggtgaacttgagttgatacctaggtaccaatgtcaatctgggtgcccagcatgaggaagtgaaccctcgagatgatgttggcaaaaactcaagtcatggcattgttccttattggattttaggaatcagtgtctaaagaagttcctgaaaacctaaaccttagtcgctgtgtcgcccagggtgactcaatgtcaacctaggtacctatgtctacttggtgcctccaggtagggctttctccaagattggttatggaatctaaaacttggttgtggcatgtgtctcatatatttgagtacaatggctgagctaattgcccacaaatactgacaaaaaaccagaactgatgtaaatcagggcctcagatgtcaatagggcccccgtactaacttaggcacaggttgactccaaagatgtcatggtgacatcctaagtttttcgttctagtttcttgggtcatttttaactaatcacttagacttttgaaggatgaaacttggaaacaattctgcattatctgagcctcaatatggttgcccccagtgtgcaggtgacactttcctattgtgggatgtagggtccaggttttttcttcttgtgctacgtgtcaaaaatagtgtatgcatcatcaacctattttttgctataataattaaattatttaaataggggtcctaaaatttaattttatcttaggtcttacattccttaggacaaactctaataatatattattaaaatatttatttttgcataatttaaatcgatagatcccttattttcaatttaaataaaagaggagtgacatcatcaaccccatattacaatcttttagtcagcctctgtgcccaaaaacacagacaatttttttttcatatttggtttttattacggtgttcgttatagttacaacatcatcccagtaaaattttttaaaaaatttaacattttacagtatcgaaaatatgcttaaagttttttgagtatgtgttgtaaactggaatatgatgaggaactctatttttcggtattgtaacttattcgaatattttcaaaatttataaaaataatattgtaactatagaatataccactataaataaaaattgaaaaaaaaaatattttagtatgttatttgggcatgaaagttgacaatgagattttgataaatgaaaccttatatgtatcatggtgtcatggacagtggtagacccaagatttgaaatgagggggatttaattttttttggcaagacaaggaggcaaaaataaatttaaaaagaaaaaaaatgctcttagtgagatttcaacccttaaccactatcttatatgctaaactaatatatgtgtataaatgttatcgtttaaaataaatatatgttgtaactaattaaaatacatatacatttttttctcgattt

SEQ ID NO: 110684 - DNA, 4306 bp, Cannabis sativa
caagccacaacctcatatatgaattaagaattttcaaatatttaattcaataataaatattaataatttaacattcatacatatattaaatgttcaactctttgtttaataatcaaaaaatatctttacaagtttttcagagcataaaccctatcaaaaaataacttccaactcattattcctatcataaacaagtacacaaatcaatacaaataatatgtataatgtgaatattaagcagaataatttcaataaaaaattgttcaaacaaaaatcttttctatgacccacttcaatggagacgaaaatgctgcaaagaataaacataaaacccaccatcgaacattcaacgtacttttgcagagaagacctattccaagttgaacaagcattatttgtaaagctccagtagttgtcaaagtaataaggaaccaatagttattactaatgacaacttttaagacttccatcttttctatgttcatgatgttgaataggttgaagatctgacagaaaacaaaagtgttaaagattattgtttgcaggacatctttatccatcatcataagcaagcccacccattgaaagatcaacaaaagtgaaatttggtagccgacctgaattactatgtttttccacatcaattttgttattagtgactgatttcgatgaaatggcttgcaattagcaacaattaagtactcttgttggtctttgaactccatcatcatcattaaaccgcccaaaagagacataattaagttcacccaaatcatatcaagggatgtcaatggagaatctcctaaaactattgttgaaatcaaggttattgttaacccagataccccggtagtgagctgaagttggaagaacttttgaatgttatggtaaatgcatttactattctttcgtatctcatgtgttgcagatagtttctcaaatgagatgtcataaaaaggccttgacatctctgtgcatctattttctaagatgatcccaacatctgcctttttcatagccggaatatcctttgctgtcaaacccccacaaaatgcaactacatgaccattcttttgtgacttctcaactatataaagcttttcctttgaatgaaaatctcccattacaatggcctctatggtatgtttttccttatctggctcatccatttcttgaaaactttcgccttcaacttcaatgtaatcatttcgtccaccgaaaatatctaggttacaagcaatggctctcactttagatagctcatcttctgacactagtttcacaattaacccattatctgttctaagagtttccactagtaacttgatatcttccttgcaagagtatttcaaacccaacattgccaataaggttaagtcttcttttttaagattttcatcttcagtctctccaaaagcaaatgcaataggtctaagtccattctcctccatatttttcactacttccccaaaattatctttgtgagattcctccattgaacacactttcccatcactatcataaaactgtgtacacatgcccaagatcgttgaagcaggcccgttccaatgaagctgcataatctgatcttcttgattgcttgttctactcctcattagaatcccacaacttttcttgctagagatcgatcttctatacttcacaacttcaaattccttaccaaaaaattcctcatttcctccccatcttgacttcaccccagaaatgagcaagttatcatcgaaactaagtgaaatcttgggcaagttaaccaaaacatttatcccctggtataacttgccatgattagctgcgatttggcttgtttcaaaagctggttctttgctaatatccttgccaccaacccaacattccttaacatccatatttgcttacacatcaagtcacctgttgcatcaatgtataagactgtgacgagtccaatggttccacaaacggagagattctgaggattcaccttatttgaatgaaacttctgctttctccattggtgtaaacaaatgccaattactaaaggcattccatgttgaatccctataacaaacaccacaagagtattcactaagatggacagccttccttgtggttttgaaacaagcctctccaataatttaaacatataagctatgctgagatgccctttcaactccggcaattcattgtaattactgtcatgtttcttcaagagcagtcgaattaacgccacaaacgcaatcaatacagacatgaaaagaccaaacttttctatgtaaccgtagggtacactcaacaaatcttcaaaaagtgtcgtttgtccatgaccaatataattattatcacaactcaacaaggttggtatgatctcaccataaatagttttatcaccaatggacgtaacaatcatggtgccattgccttccacaactcttgaaccagctaatagaaaaggatttttgtccatatcaacatcaaacttcttgaacacatgaaccaacttcaacttttcaccagatatgaacacaccatctccaggaacttgatcaccttcagtcaagtagactttgtctcgaaccttgacatcagaaacgaccatccttgatttcattccattaggcctctcaactgtcaccataagcatgctcttatctttgatcatcttttttgtcaattctctttggccaatgaagttcctaactgaagaggaagcaataataacaaaaatggcaacaaggacggccgtaccatcatgccaaccactttttggtccttgctgcatgctttcaatggcgaatagaaatccagctgaaagaaccaaaaggaaaattgtacaatcattgcatgattgcaataagtaatacaaaaatcccttttctttactactaataattggcgccttccatttttcctcatcggtacttttttcctgttcataaacacagattattataatgatataagtggacatattaacttttccttataccaagtaaaagtctagctagctatctacctcgtgagtgtcttgagatgtggccactagtgacaaaacccaatctaggccacctcttctttttaaaccaactaagttctgctccttcactatctgaacaagactctcccagtcccagtaccaatcaggcttcatgatcatgtcaatcacatgatggtcgtctctttgaatatcagaacagatctggatctgatcatcatcatcatcaggtaattgctccgaggctaccaccgccgcatcaccatgagaaatgaaaacgctgatacttagaaccacataacgaaaccacacgctatttttctcgccaaacatggcggtagtagtagtagtagctgcagcacaatcgaccactaagccggcggcggtgagagtatcagtgccatcggcctcattgtcgccactagtttgtgggaacatcttgaccacaaaagaaaaacaaacaaaaacagtaacttgttgacttgacttaaacaatactaacaggtaaggaaaaaaaaatcaaaacagtaactagaaacttaattttggtaagtaataagtagaagaagaagaagaaaaaaaaatgggcactctactctttaataagttcaacttgtttggtgctagagatggagaaaaataggagtttatataagttctattacgcgtttttgtggaaataataatgaaatgtaaaagaaggaggagttgaatcgtagaatacgaaatgtgtaataagaacccaaaaagtagttgagtccttaattaattatattctgatatcaaactttatctattgaaagataaagcacaaaataataatcatccatcagtaagaagacaaagtacactagctacctagctagcatgtaaagtggactccgtattttttttttgttctttttttgatgatataaatgaaaaggcttggaaagtaacctcattatctggtgggtgtatctccgttttgctcctttgtttttttgagtaattattaggtttttttatttttttgaattaatttttaagaagttaaattcaattaatatatttttgtaaaaaatacaattatataggtcaactggtcaatgcaaaacgcggtaatgtatagttcaataatattgtgaaaagagcataccaaatcttgacaaactttgcaccacaaactttatcgatctatttcattttattagatttcacttctatttattatatacaaaaattaatcccaattgtattagttaattatggtagtgtttgttaacaaaataggataaaaatttattatgtaactatttttgttttttatttttaaaa

SEQ ID NO: 110685 - DNA, 3302 bp, Cannabis sativa
tgtcctttgtattatttgtcattgagttgtaatcatgttggtttgatatttctattggagcacaacaattttccaacagaaagattggcatccatagctgtggagacagcctttgaaccaaaaaaaactgtttcattaaggagttgtaaggtgaaaggtctctcagaaataaagattcctactttggatctagaaatttcgagaccaagaaagaatctcaagttgccaaggtctttttgctaaaatttcaagttaagaaagactttaaaaattgttgcctaagaatcacttgaaattttgagttgagaaaggctctgataccatattagtgaaacaaaattattgaactttattaatgaatacaatgtatatatatacatgtggaaagagatacttcagcaaacaactaataacaaaattagttatgaaactaactaattataactaacagagctaataactaataaccaaccaacaataactatatctaagacacaggtataaaaaatttggcacacgtgaaattttaacattatatttgatacactaaattatacttaagaatttctttcaaataattatttggatgtctcatagaataatacattatcaaatttattctaacaactggattcctctagtatcgttttctgttttgtcagctcttgtttgaattaatggatcaaacaaggtttctgtgttacgagatgcttcgggcaagggatgggatcatgtattaattcagtgtattttttaggtaaataaaacaggagctatgatgtgtcggataagattatttggaactttgagaattcgtattgataatctgtcaaaagtggttatttgcttgctcttcataattaggtcgtgcttcgtgattctctatttggtggtttgttggatggtggaaaaagatggtctcttaatcttctaccaaaggttagactttttgctttgcagtgacaactatttacttctcggttggaaattataattttgctttgtataatgttaaaatatatatacaatcaactatctcaaattctatttttattatcttaaaatatatatatacgggtagatacttgtcataactagaccacaatataataaaaaaacattataatttttttaaatactaaaaatataaataccttagtaagtactaggacaaaaatgacacattagttgctccctaattatgaatgaaaatatattatattatagtgtgtggtgtttttctagaatcaattactaatacatcatttgatattacactaaaataatattttattcacaacatataaataataatttataattagtcacaacttatttacttttaattataaattttattgtgacttaaaataaatttttttgtattgttgcaataactatactatgtaattaacaacaaatgcacattataaaatatttatgtataacgttttaagtaaatttttgtaaccgttttggaaaattgtaacaggaacaaaaatagtatttcgatttgcaagaaatggagaagagggacacaagaatctatacataatagaaaatgcagaatgtggtgaatttggaggaggaacaacaagaagactaacaagagggaattggactgacacacattgcagttggtcaccaaatgatgattggatagtgttctcttcatctagacacaaatcacctgatgcaccaaaaactgacaatggtcttgacccaggattttttaatgtgtatctagtaagtgcaaataattcttggatattggcaagagtatttggaagtgggtataatcttcaaggccatgtaaatcatccatttttcagtcctgatggtacgagcattgttgtaacttctgatcttgctggtgtgtctgttgatccagtctctatgcctattcttccccactctgttagaccttatggagacatattcaccgtagatattgttaacctaaatgacattaccaaaaatacaaatgtgaagaacttgaaacgtattacacatagtaggtatgagaatactagtgctagttggacaaagttctcaactaaagacccacatcagcttggaatagttaattagaatctaacaaagatcatcactatttgctcaaatgtccttatgcttatcctaaaacaggttgatagtgctttagtacttaaatattgatcatatttatagtacttactttcatctgtatttaacttattattttagtggcgaaagtacaaaaattattacaatatgataaaatttaagtaccaaaattatttttgattttgcaacaaaaatacaaaattattatgtttgtaaaacttaagtatcaaaattatttttttagtgcttaagtttgtcaatgtaataatttaaatatttttgttgccaataaaatagtttagatatttaaatattacaaacataatattttaaatactttgaaaactataaatataataatttgaatactcttattgcaaatatccctatttttattacaagcctttcttaatttagtctttttattatcttaactagggaactaagccgcgcgaaccgcggtgttggcaaattttataacttttttaattgatttacatttttgtactaattaaaaaatcatataaataaatataaacttaaaatattgaaaaatgatataaatattagattaatgtaaattatgaattataataatattattaaaatattaaattgaatcaactaataaaatgaataaaatgctttgtgggtgaaagaagtattcggacaacaattctttattatgttcatttttctttaaaatttcatagaacatcctaaaaaaaacttttgtaaattatttttagcaatttaattttcttatccctatttatgagaatcattataacgaaaaaaaaaatgaaatgtaaaaaatttcgattatttttattaattaaattaattaatagaaataaatagtaattattttctacatatattagaattagctttaactaagttagttatctttgattaagttagttgaggtactcgtcagcttgttagaactttagttagttttatctaactaaccgtggtcttcatttgctgcctatattaaagcaatactgtaccaaagcatctttagttaagcatattaaaataatttttatttttatttcttgcttatttctttcgcgctctctgtttctcataatatacaaagatactccactaagttaagatgtgttgagagaagcttcaaattgatgctaaaagaccaaaaatatgtctcaaactcatttttaaccctg

SEQ ID NO: 110686 - DNA, 3747 bp, Cannabis sativa
taggcaatattgacactcgaactttttattatcctctgcctgctggtgatcatttgtattcgtgcttttcaattctttcgatgaaatcttgctgaatcttgctgttgttgttgttgttgttgttatctgttccatatgaggctgagtttgaggaatttacactttcatctacttctgctgctgatgagccttttataattacactgtctccatcattcttgtacggattcagctcaaacccaaacaatttgagtttcttctcaattgaagatccagctgagtagccatgatgatcatgttctgatattccatcacatgatgaaggatgaatgtgagttgagggaccctttgccatgtctggaactgtagtagtggctagctatctagctatttaggaaggggagttatattaatagagaggaagatatatgtaaatgtacctatgagttatttgcttctcttgcttttatactagactacatatttggtttacaaccatgcattgcatctaacaagaatagtttttataatataaaaaacggcataagcgtactcaatggtcaattagaaaaaaaaaaaaaagaaaaaagaaaagtcagatcagagaagccgtctcgtgaaattaatattgctttatataaaaaagaagaaattaaaaataaacatacactttatttttcaatgttgcagtagatacacttcaaacttttccaatcaaagaggattcagtgtgttataataaacggggaattttaaggtctataagcactttaaaacatataaaaatacaagtatgacaccgctttggcataatatttcatgtgtatatatattattatatattaaagagggataatatgaaagttatataatagtaactatataataacaaaagtcaaagaaagatatggggatgtaatcacctggaaggaaggggttttttttaactttgaaacaaatctctactgtacttaaatgcttatctaatattattttacaagaaaaccaataagttagtggattcatgtattgtcctctaccaaagcctatcatgtaatatatacttaaatatatataattactataaatataattagttattcacagctgttttggtgcctagtcccatccactacagtagagcacaccaataatgtttataaaattctaagttctctgtagagaagtgattattcagcacttaatgaagcttctttgtaattatctctcaacccacaaaacaaataaatatatatttaatttttaattaaatatatatatttatatgtttgaccatgtttttgtgaatgcactttagaatagtaaggagaggagagtagttgttgataaacaaaggaatataggaaataggtagtgggtagtgatgtaagcatatatactaagaagggtcttcaatgagatcttgggcatatctttttagagcaggaatagcttataaattatatcacccaaaagcatatgttttcaggtgcatcaagtcataatctaatgtttattatagtaataaactaaaaagcattttggtttggacagttgttatatgattggaccccactttttgttgctttggggacattttagaaacttattagattgtgtttttattccttcgtctctacctagatctcccatgggtggacttcttctaccaatggatctctcatgctaatcaattcccacttctttttcagttttattcaaattgctttcttgcttttgggagaagaattccaagtatgcatgctgtcatcaagcatttcaatatcataacatgtggaagaaaatgaggccataagcagagaagcattattggattatgtataaactatgatatgatgtggtggctcagtggtgggttggttttggattgattgatttcgtgagttaatctttttatttttttcctttttcattttatccattggtttttgataaagaggatcaaactatagagtactagtggtccctcccatctggccatctcctctcccataataaaatttttaaaaaccatgttcccgtccactatctttgatctcatctttcttctcccatctccagtaatctcttgagagaatttcaattactttattacaccaaaaaagaattgccaaacttgactcttaaagaaagaagcaaaatcagaggagatattttacttgtgaaaaagccactcctacagtgttagtttgatgaaagaaaggaaagaagtaggtatgggaatttttcccatgatatataccaacatttatgccgcatctgctgctaacagaacaaaatagtccacatgccacttacatgcatgcatatttgttcctggactgttactgtactgtatcacagcatagttttcaatgaaacaggcaaaacaaaaaaatcatgcaaaccttgcaatgtatcaaagtctaacttttaacttgttatccatcttcgaaaggtataatatttaaataattttttttattttacaaatcacaccataatatttattcaattctattaagtttggtgtagatgttaggaaatgtagttagtattttatgggactcacggacatattgatagttaaactcaacaccttttttaactaaagtttcatttgcctctctatcctcaccccttacactactttccaagccaaccccaaataatataaacaatataaattacccacacataaataatgggagacacacgacatattcaaatgcttgatactatgaacaagacaattttattggggaaaatcccatgattctttggagatttaaatctagcaattgaaattcgacagggtgacatgaagtaaatatcgtgtgcttataattcatgattatttactttttcttttcaacaattgagtgttgttgtgaagttgtcatattagtgatgagatgctaattcaatttaattaaaattattttcttcatattttaaatccaattcaatctgtataataacttaaattcaatccaattcaattcacaaaagtgcgtattgaatcaattattttgaattaattactttttaatattaaattatttaatatttattaaagaattttttttcacataacaatcaataaaataaaataaattattatttttttatgtctctaataataaattaaaataaatataacataaataacaaatttaagaagaaaaaaaatgtgtaaaaaattgtttaatttttttaaaattacatttttcttataataatattagaataaacatttaataattattaaattttaaaatatatttatatcgtgtatattaaatatttaaaacagtattttttttacatcaattgtatatataatttttttaaaaatatacataaatatttgtaaattgaactaaagtggctatttttaaatgtcaatcaatacaaataggaattttaaattttttaattaaattgaatccgcacaagtgtaaaaattcacacttcacatattaaattaaattattatattaaattatttataacttaatattgaatgacacagcatcctaagccccttttactatttctctaaataatattggatcacatcagaatgattaaaaagaaaactggaaagcacgtcgaacctcattttggcaggtacaatagaataccacatccctttcaatcatgtttttctttcctagcattataaagtggatataatagggtgttcactaagtatccgatccaatctaatccgcacgatccaat

SEQ ID NO: 110687 - DNA, 5798 bp, Cannabis sativa
tgccctctctaatggtttttcatattggtaggtatgtacttaatatatgggatgttgggggccaaaagacgataagatcatactggagaaactattttgagcaaactgatggcttggtatgggtagttgacagttcagatcttcgaagactagatgactgcaaaatggaactggataatcttttgaaggaagaggtaaaaatacagcttttccatttttcatgaattgtggatgttgatgatgcttcttattgctgtcaattgcctagtatgagatttatttatttattccaccatcctcatatactgttgaacaacaagtcttttttgtgtattatgattttgatggattttggttgaggcatcatttgtattacttctggtgtatactttgagatgatctccaacttgatgaactgaaagaagctgattacttctggtgtaattaagttttgtgaattttctttcacaactgaattcactcttcttgtttgataatggtgaaacgattatgcgattcttacttgcttgttcatttggcagaggctatcaggatcatccttactggtactagcaaacaagcaggacattaaaggggctcttacaccagatgaaattgccaaagtaagttagccttttatgatataacttaggtctttgttcacttgttttcatccactcgttgatccgtacataaatgctgtttgtttgtgcttatgaaatagtcttttattatcgttatacttgctcttgtgtaggttctaaatttggacgccatggacagtacaagacactggagaatcgtcggatgcagtgcttacacaggacaagggcttcttgagggctttgattggttggtgcaggacattgcgtctagaatttacgtactcgattgattgatgccaccattactctgccctttgagttgtgtctgtctgtaacttttcaagcacaagtagattttttcccattacatgattccattattatcaaagatcaaggcagctatggcagtttgtataaaatggtccaaatgtgggacaaggccaaatgatgctttttcttttcttttcttttcttttgtagaggttccattgcataattccattatttatcaaatgacaaaatacaatgaaactgatctggaatgaaagcaaagctgaaaaggtaaaggcaatattaattataactgttgttgatgcattgcatagaatgctgtccatggcatcattgttacttttggcctaaaaagtttcattccccatgatctattttggggcttggattcaaatttccttcttttgtataaccattattaatttaatgtcctcaccattgcttcctcgatgagaattgcgaattgctaaaagacactattttttttggcataatactgctattggtgtaatcaaatattagatgtcatataatttttaacgtacacgattgatgctcaatagcaatgttctttcttgagcatgcaatagagggcctaaccattattaaaatcttgactcttatttagtacttatacaacttttttcccagaggggtacaacttcaaacaacctgaacagtaaagagtttaagaaatctacaatatcttatgattgtaaaccttggtggggggtggtgactgcaggctccattagtagtgcaatgcaatcaatcatggcttttccttccctcaatcccatgggttgtggctttaaatctgggcctgctttcagtgggttggcttagctgaagcccaacaatcatttggtacttattcaactttacagcttatgtttgggcccggaagttggattggatcgaagcccatcaagcattattgatctaattatttatagggataatttcatagacaaaaataacattttttttttttttatagaaatacagtcgtacgaaattttaaatattgttataatttttttaaattttattaatagaaaatacaatttttgatacaattttatgttatactattattattgttcattttttttgttatttgtgtattatttttttttgttgtttttatttatttattttttttggttagttttgtgtattattttcttgtaattaaagtgtaaaaaaaaatcaacctaaaagtgtaaattttttactgaaaataacaattatgtaatttttccttatttatatctaaacaacaaatatgtgctggcacagtgtgttatactttgtgaatgtgtggagatttcaataatcttatttaaatactaaagggcaatgttgtttctttttctatatcataaaaaatgatgccaatcaatcaaaaaggctatctttcatcattgtttttatttaaaattgtaataagtaaaagcattccaattccaatttccatatgtgttgttgtgtgcaattgcatttggtgtgaaagtgaaagtaatgagtgttttgtttttatattatgacaagtgtcattgcatgcattacaagataacggtcaattataagaatgaaatagaaaagagggtaagttttgagtcaatcatggaagcaaagcaatatgatctgatctcattagattattatgtatgtgtaatgtaagcaaatgagatggcaatatgaattggaatggattggtcaatggtgatgaagtggagaacagccttatttggctggactaattaagctaaaggttgttgtgttgtgttttgctgtgtatgaaatgaatgaaattaattagaatgaaagataccaaaactaaaactaaaacggtcatttgtttgtttggggtcatcatcactttttgtgttgtgtgttgtgttttggggccagccagttgtcatttcatgtctttgtgtattatattttgattctatattgccgccaaacacggctatgattactcttaccacttcttcttcttcttcttcttcttctcttcttattacaactctacaacacaaaacagccgttacctcgtttcttttgtcattcaatcataccaacctcgttgtttatgctatgtataagaaagaagtgggtcccattcatggttggtattccaatccatgctgttgttttttttacagtctgttttctcatttcaaagctcattactttaccccactttccccaatatcctaaccccactccccactctcttcggaatcagaccccatttcccaacctcactcttctcttctttaaaatctcctaacccttctcaccattccccaaactccttcttcttctgctattacatctctttttctctcataaaaatacaatctttattattatagccatggctgatgaacaagttcagaaagctgtccctgaagaagaagtagtagttgttaatgttactactaatagtaatgatggtgatgagaaagtagtgaatgagaaaatggcttctcctcctactactcctaccagtactactctccaaactgagatgtccaaatccattgaagacaatgaaaaagccaacattaacaacaatgactcggcttctttcaaggaagagaccactaaagtggctgatcttcctgaccctcaaaggaaagcccttgaagaatttaagcaattactcaaagaagctcttcaaagccatcaattttcaactgcttcttcaccaccttcaccaaaacaagaggctattattaagcctgttccaccacaagagcctgagaaaactgagcctgaaacaactgaggaggtggagaaagaagcagcaacaacaacaacaaccacacaagagtcttctgaaccagttctaactgaggctgtagaagagaaggttgctactactgtggctgctgtggctgctgatgatgatggtgctaagacagtggaagccattcaagaaaccattgtagcagttgcttcttctgaacacaaagagccagaagagtcatccaaggctgagccagaggaatccaaagatgtgaaggaagagtctttagcagcaacacagcctcctcctgctactacaccagctctggctcctgaagaagtgtccatctggggtgtacccttgttaatggatgagaggagtgatgtcattcttctaaagtttcttagagcaagagactttaaggtgaaggatgcttttttgatgctgaagaacactgttgagtggaggaaacagtttgggattgaggagttggtggatgaagatttgggcagtgatttagataaggttgtgttcatgcatggtgttgataaggaaggtcaccctgtgtgctacaatgtctatggggagttccaaagcaaggagctttaccagaacacattctctgatgaagaaaaaagacagatgtttttaaggaagagaattcagttccttgaaaggagtattagaaaatttgacttcactccaggaggtgtttctacttttgttcagattaatgatttgaagaactcacctggaccaggaaagtgggaactaagacaagctaccaaacaagccctccaattgcttcaagacaactaccctgaatttgtagccaaacaggtaccttagctttcctttttgagcttttatacataaagatgcaatctttcttttacccaattccccatttgttcttattctgcatttggttttgtttaggtgttcatcaatgtgccatggtggtacttagcagtgaatagaatgataagcccatttttgactcaaagaactaaaagcaagtttgtgtttgctggtccttccaaatccgctgataccctcttgaggtatatagctccagaacaaatcccaatcaagtatggtggactaagcaaagatggtgaatttggtactaatgatgctgtaactgaggttattgtaaaacctgcagccaaacacactgtggaattcccagtcactgaggtgagttcctatctattaccatgttagcattctctaatttgtttttgattgaattatgaacaataacaaatatatatatatattgaattatgaaaatggcagtcatgtgttctgagttgggaagttagagtggctggatgggatgtgaaatatggagctgagtttgttccaagtgcagaagaaagctacacagtgataattcagaagagcagaaaggttggaggaaatgaagaaccagtgttatgcaatagcttcaaagttggtgaagctggtaaagttgttctcaccattgacaattcaacttccaagaagaagaaactcctctaccgtttaaagaccaagtcttgttctgattgaattccataaccactactctcactgtcactgtcactatcactgtcatcatcttcatatatatatatatttatatatttattataatgttctatatcaactattattttattttactttccaagtatttatttttttggtcttcccatgttaaaattggtgatttgatgatgttttattctctttgatcttgtatttaaagtatatttttttctttctttctttcttcaattacacttttattggttattggtatgtacataaatgatgagagaaagtttgtgttttatttcatttctttgtttgagattttgtatttgtaccacatttctcattataactaagtatttcattaatttgactttatggtacttagattgaatcctcatactaaatataaatgatgataataaaatgtaaaaagaatcaaagtctagttccttaataaatagggttatttgcaacaaaccccttttattatttgggaaatttgattttctatgcttagaaaatcaaaaaatttgatttttaaaccaaaaatttaaaacctaaaaaaactattccttttttttcaaaaccccaaa

SEQ ID NO: 110688 - DNA, 2182 bp, Cannabis sativa
  modified_base (2135)..(2135): a, c, t, g, unknown or other
cactaatctagccaataaagctcaatgccaattgtgttttcaaattggtcgcacttcacaaggctacttctatcactttgaaaagagttctacaggacctcactaattataactaattctaatagtcatgtgtaggctaatttactattatagtagttgaaagtgataccaattggtatctatattttggagcaaccaatcactgtaccctagatgcatctaattaatctctctcatggtttttagtatgatggccccataaagatgttcgttgataatggcacaggtttgtcaattaagcatggtctataattgtcatctttcaaatcaatcttactcaatagtgtattacatgcccttgctattactaaaaatctcttgaattttccaaaattttccaaacataataatgttttctttgaatttcatgttgatttatgtttcgataaggatagtgagaccctttgtactctgttgttgggaacacatcaaaatggcctattttattttgatgcatctcaactccagttcctatcatcaaagtccaacactccttcttatccttcatctgtctcttcatctcaaaactctgatcagtacacaatttgttactaaagttgaagcaaacacttcctcaaattgtagtgttaaagatttttatgatattttcattttgcacaattatttagggcattcttctctgcggataattcaattggttctcgatagttataatgtagatattaataataaaagcatccttaattgagtatattgaaccatttcagcttcttcatgtgtctgacttgtggggtccctcgcatactattttatctaatggctataattattgcatacactttgtagattttttttcaaggtttacttggatctatatatatgctaaagaacaaatctaattcactaaaattatttaccgagattttcaaaaaataattacaataagagttgggaaattaaataagcaataaaaattagagatggatatttttatgtggttcaggtgttagtgaactctagtccacgagttaaacgtattgggctaaataaccttaatatattacaatggggtttttacaagattatgaaccctagcttcttgctatagtgtttgcacaattgatttctaacccttggcttaagggtaaaatgatgtatttataggctaggatttgggttcgggtatatctctgacccactagggtttgcatgtacccttggcccccttaatagggtgaatacacgaaatacattgactgggggcccatagaccagggtcagcctatagggggaggcaatccgtaggcttaggggactacgtaatcttcaactgatgtcatgtatgcatcgattttaattattgtggtctcagaatcgagtcatttgacaaaatagaggttttcttttggtggtgtgcgcactcttaaggtctgacaaatgggacgatcctctaattctatgggatttagtgtgagagggttgctcgtcatcctatatcaggtctccaaggcacctctttgaatgtcccttccggatgtatcccaaatgcctatccagagggtttcagttacttcttctcatgagggtgggaggcccttccagatctggataagtctggtcacggaggtgtgcctcctaggcctcggatgggcttgaactcgtccttccacacaggctgggcttgtcctctttttagagcttttagccaggccctaattgataaattttaatttaggaatgccacgtgtcccccttgcagaaaaaaatataacatttactcttaagcttctgtgacttgagagttgcggaggcttgtagtcttctctcttgatggctagggaaaagtggagaattcaaaaggagagcacccttttcaacttgtgcattccttgattgaagacgattagggagtttcgattatagctagcaaagcactcgtggcatcaacttcttggtcggtgaactttttatgtgttgggaaggtgtgtgaggcttagggtagcatgttgacgattaaattatgccagcacttgtaccaaggcaaattttatgatttgaaaactcttcaattccaatgttttgcattaaatgctaatgtaacaccctaactaacntaggcgtattacgtgatttttacacatgctgtgcagctcgttgctaa

SEQ ID NO: 110689 - DNA, 4934 bp, Cannabis sativa
gggtttgtatttcctttctcatttgcattctctttgtttcatcgttgaatgtgatttcagctgaggagactgaatcgaaagaatccgaaaaggagtttgttctcactttggatcagtctaacttttccgacactatcagtaagagcaaattcatcgtcgtcgagttctacgctccatggtatggatttttattaatttttttgttttgatcggtaattttgtggatctgattcctcattactatattgtatcctagatttacgattttcttgggaatttaatgtttatatttgaattatcgagcttatttgagtttttattgttgtgcatgcaatggtttaatgatccttcatgtttgccttggctgattcaatttgcgtgattttcttataaatatatacatatataaatgaaatgtttactgtttgggcactagagtagtgtgtttcctttattcaaatccatcgatttatttataatttatgtttaattttcattccccttttcttattttttttaggtgtggacactgtaagaagcttgctccagaggtaagaagcatttatataaatttatctacaaactcatactttttgtattatcaaattatctaaacgtcaatatctattacattgcagtatgagaaagctgcttctattttgagcagccatgatccatcagttgttttggctaaaattgattgtactgaggaagcgaacaaagaagtcgcttctgaacatgacatcaagggtttccccacacttaagatttttaggaatggtggtaagaatgttcaggaatacaagggaccacgtgaagctgatggtattgttgaatatttgaagaaacaaagtggccctgcttctgctgaaattaagactgtagaagatgccagtggtatcattgacgacaagaagatagtcattgtaagtgctcgctgcttatgttatacccttatatttttgcctcatcatccttacatggcatggaattaactgtctttgcatttgcaggttggagtgttccccaaattttccggtgaggagtttgagaatttcatggctgtagccgacaaattgcgtgcagactatgagtttgctcatactacagacgccaagctcgtcccacgtggtgaatcatcagtcactgggcctttggttagacttttgaagccatttgacgaactttttgttgattctaaggtaccctgtactacaaattttgaaaaagttcaatcattttttgtttccataaacaagattgtttcaagaaacattgtcaagtaaggtatctaatttagcaatcgtggatacaggaattcaatgttgatgctttggagaaatttattgaagagtctagtgtgccagttgtgaccgagttcaacaaagaccctaacaatcacccttttgttatcaaattctttaacagccccaacgcaaaggtattatatgatggaatacttaatttttttttctttaaatttgtatgtggatgaattattgcatgatcacagtagtatactttgatggttttgaaaatatatatactgtgtttttgttatgcttaaacaagcaccacaatgaattgggcagtacataatgtatatttgtaccgtataacttgtgatttggaagttccttgacattgttagtttcttggttgttcatccttggatgctcatttttcccccccgcatcctctttttctctctctcctaatagcaatcaattatgtttacttttatactgagttttggtttttggtaggcaatgttgtttttgaacttcaccagcgaggtggctgatgctttcagagcaaagtatcgcgatgttgctgagaaatacaaaacagatggtttaagttttctattgggagatgttgaggccagccaaggtgccttccaggttggtgtcttttcatttgccagtttccatttgtatctattttcaagattgtttaacagacataatttattgctgtatgcttgtaatgtcatggtttaagtttggaagctttactgattctgcttacttgctttacagtattttggacttagggaggatcaagtgcccctaattgttgtccagaccaatgacggccaaaagtttttgaaggcaaatttggagcctgagcatatcgcaacatgggtgaaggattacaaggtatgttttctcatcaacatacctaaatctgaaaggctaaacacaattttgttatacttataaaaaataataattctaacctttgtgtgggtgaatgatatgactgcaggaaggcaatgtttcaccatacaagaagtctgaaccaatccctgagcaaaacgacgaacctgttaaagtggtcgttgctgacacccttcaggactttgttttcaaatctgacaaaaacagtgcgtactacaagctctctctgttttgatttatgatcttgaattcttataacttcaattgttatgttaatcttggttctgttatttatgggaatattggaataacgagaaattactctttgctgcagtcctcctagagttttatgctccatggtgcggacactgcaaacaacttgctcctatcttggacgaaatcgctacctcatacgaaagtgactctgaaattgttatcgcaaagcttgtaagttctatcaccctgcctgtttatgtcgtcgagtcaagtcagttttcgttatcattaggaatcatttttggtttctggtttaaacttgtttctttcaaattttcaggatgctacagcaaatgatctcccaagtgatactttcgatatcaagggataccccactctatatttcaagtcagcaagcgggaaaatctctcaatacgaggaggacaggactaaggaagccatcattgctttcatcgagaagaatcgggacaaggctgagaagcaagctgaaaagcaagaagaagcagcaggatcaaaagatgagctctaaatatggtatgtctcttttcttaacagctttttgtatcatagctcaccaattttagtttcattgctagttttcgaaatgctgagtacctattttttcttgggtttgaacagcaatggcggccgtgtactatacaacaatgtgaaaagcctagcgactatttaaggtacttggcggctaacagcggtagcaacaaagaaaatgcctttacttcctctctttttcaattttcatactttcggttagttctgtttttcggtttcctttaataaattatggagaggagggttctggcatttgtagagagcttaaaagaatttcaagaatagcttatagctttaattatcttgtacaagttttgttatttgtagaaacctttttaatttagaaacgattttaagttatgttttcagtgccagaatctctcttcaatctatttatctatatatcatattgctataatagatcccatcttaaaagaagctattctaatttgtgttcatatcaatcgatttgttaattattatccgttattctatggtcgaaaattatcattctcactttagctcaaaaaaaaaaaaaaaaaaaccctttattcttgagttagttatttcagttatgagatctcctagtaacaccaaagcaaaactgtccttaaattgtattaatgaagacattttacattgggctaaatatgtgattgaattatacgaacccaattcaataaatatccaataagttgaaaaatacttcttttattatatacattaattaaaaatattttcatattattttttattaaaatatgtctacttttttttagtggattgcctcatatacttttattttctatttaagtttagtatataatttacataagttaaagagtttaacggggatattattcataaaagtaggtatatctaaaaaaatataaaaataaaagtaaaaattacaaaatataaaaataaaagtaaaaattaaaacaagtaaagtaaaatgggtatgtacttcttttcaaaattcaattgtaattttaacgtggctttaaagtttggttattcatagagaaaagattagactaggaaacatcatagatctataattctttctcatattcaatagcatgaaattaggtatgagtttacgattaatatatggagggtcaaatattttaatttttgtgaaaaaacgctaattagttgcacaatgccatagtagtgactgtgacacgtttaaaaggttaacaaatttaggatatttgcggagctacttagtctcatccttgtaaaaaatgtgatgaataagtagtaatctcaccaaaccaaacgaatcttagttaggtgggtttttatttggaggtacgtgccacttaagaatattggcccacattagttatgtttttcttttttttttttttttttgttgataagtccacgttagttatgtattatctctctttttttccttttttatgcaactgcagcaaactaaaaaaaagtaacaaaaacaagaaggaatcatcattattttgctcctttactacattcattatggacccatctataactattacactttctgttcttccatgtgttctttttgcctttctttctttgaccaaattggatctatttattatataattcctcaaatggcacactcaccaaccaatggtattataagcaaaccacatgacaggataagttgatttcctttagaaaaaaaataccaaataaaggtataacaagagcatgtctaatagacattttaaggtgtttaatacttctaccacaaaagacttaaattataagcatcatcaaatgtggcatttattattaaattatactactaataatgatatgatatataaaacttatagttattgtctatgggaaatttgaaattatatgcatattagggattaaaattggtatcctaatctaaaactatacataatttgtaaaatgggataacttttacttaaa

SEQ ID NO: 110690 - DNA, 2701 bp, Cannabis sativa
ctaaatgtacaagtggatgaggaagaatggaaagaagggtaactctagttcatacatcccatgcatttaggagaaacaaaaaacagaacagaactgaattagtcatgtttgtttattttataacgttaatatttggacacaaatgtataataatattaatatattagaaaaaagagtaaaagaatatgttgttttgtagtggcatgggagcaaatttaatgttttggtgtcagagaattgttgagttgttgtagccttgaaattgatgaaagctgagagagaaaattatacaaatagttacagcaatgagtaacatagccatagcttttactttttaatatatatgtctttggtcttttgctttaatatatttgataagagtttttgttgaaggtgttttgggttttttggagggagttttgtttgtatttttttaaactctttattttgagtttgttgagttctttcttttgaattctttacagtatttctatataatctataatgggatgttgagattaagtgaatttcaaattcacgtgtaaagagtttgagattatcctaaaattatacttaaaagtattcccttaattataagtttggtttacatttccattcctacactttcaatcacatttttgtaatttaagtatcttattaagcgagtcgagtcttaggcacagacatgatcaagtttacacatgacatataagtgcatattttatcagaaaaaatatcgaattttatcacgataaaagaaaactataactattatgaatatgagtataactctagtgagaattgttatgagtgtagctattagaaatgtgggttcatgtaatcttaaattgttgaatttttaataaataatatgagtgttagtgttcagcaagagcactgacactcacattttcttattttttattttttgattggttatttttttttagcataggtacataaatatgtacattttatgttaggttgggattgaactcatgcccttcaattacaagacttaaagagccaatggttatgagttatgatgaaagaaaagaagagtatatgtttaagagtttgaaatcatccaatggttaactgacacgtgtaatttttaggggttaattttgtaatataacttgaagaatgaaggaaggaatttgttttcttggggtgtggtgtaaagtactttacagtgaggaggaataatggaagaaacaaacacatacaatttaaagaagaaaaacaaaacaaaacaaaaagcttatttaatgttgtaaatttgttgccttttccagttggtaaagcagagcagaacagaccagtcaaactctatatgattatgttcttcaacattttgttatttatttatttggggttttcttaaattagttgcaaaataagtttgataatatattgagtaagtaatccttaaatactccgaaagaagagcttattattttaggatgatatatggtcatgatgagaggtgttataaatgtttgaaaatgattgatactaatgaattgtgatgcccatatctattaaccttggtttgattacctttgttgtgacaagtgagaaaaagaagaagaagaagaagtattggttcttctattcaattccaaactaatcttgataaagaagaagtggtccatttttgtgtgtgtgtttttcttttctatggtaagtgtagtatgggcctattttgagattaaaagaggagttaatgttagaaagatacattactctccttgggtttggtgttgttggtgacatatgaagtgattatataaacaaaaataatctgatttaatcgagcctcccgaactacttggcatgattgttgcttgacagatgtgtcatgtagctcgagagactcgaaatgaatagcaatgctcttaaataaatattatgtttggtgattactacgagagcattagtataagacatttttcaggttgtccaacatttttatataatgatatgtgatttgtttaatatatttgatttctttttggagggtttcatatggactctaattacattatatgtctactttattttatttgttttaatttttatctttatttctatattatttaagatataccaatttttatagatgatttatagatgatatttccattataccctttatgttaatgtaaattatgtagtaaagagtgaaagtatattgggcaacccactcataaaaagaggtattttttagtttatgcgacatttttcaaatttcttatttgtatttcaaaattattttcatgtctcaaatattttatagcaatagcaatgagtgtttgttgtaaaattgtttatatacaatactattaaatatatttatatgtatttaaacaatgtggtatctgtaatattttgtttcttttcaattttctacttattgtgtatatttataaactttttaaaatacattgcaaaaataaaaatgtattgctagggtttgtactaccattgacaggttgtgtagtattagtagcaggacaggccttgaaaatatatgggtccaagacgaattaaattttgggaccctaaaaaatatataaaaaaaatatccaaaaaagagtgttatgggatttgaacccatgatcttgaacattatgccatttatgtcaatcaactaaactatgaatatttgttgtttataatacacttaaattttact

SEQ ID NO: 110691 - DNA, 1742 bp, Cannabis sativa
cttaaatagaggttctactgtattggcaaatatcacataacaatgcatgaacagatatattgaagcataatcaacaatgataattttctttgaacataaattgtatctattgcatgcaatgtgcaacacttctatgcatcaaaaattctaaattctcaagaaattgttttcttctgttgttaatttcatttatttttatttaccaagctttttaaatttgtgttatcttagtcattcctttcttatcaatcatttcttgaaataaatctctctttttttgctatatagtatgttacaatcttcacctaacaaatctttcattacaactaaatgaaatataaagatatatctgagatacccaaactataagtatactacagaaaaaaaaaatgcagagctacgcaattaccaggctaaatcaaaagaaaaaccgtataacgacatgaaagaggcagattacaataataacttagtcttactgttgatatcaacatgaagaggcacttacttgcatataaaaagtattaaagtcgttgtaaccatccctgcatcatataacaatatttgtaaaatagcatgatggaaaatatatttattaaattatcactatggcttcaaagtttgagaacaacaagttccacctaatcagttatcccaaggcagccacactcatagtacaaagaacaaaagataattttggcaagtatatgtctacatactttttgtagtgaggagcatccctatctaaccgagcaagggtaccagccaatatagatacctgcaaccagacattagtcagtaagaaccaataatgaaacaaacataaataaataaataagaaagctagaatacagtcccaaaataaaataattgctagacaaattggaaacatggcaaagttccaagggtgacactgacaggactgagacaaagctttctattgaacatgccactaatgaatttccactaatatattcaacctcagatacatgtataatatatgtgtggaccaatggatacatatctattactatcttattttacaaactgaaaggatatatctgttattatcttaaagcagcctattttgtatgcctaagctaccactggcttattgttgacacgttattgccttgttacttagaactgtgtgtgataatgaagcaaagcagcgactaattaacaataagaaacatatggaaacaaaccataaatgcatgtgttatatataccttctcaccactatcattaccaacaaccctaatttccagtccaacacaagcagattcaggcgcaagaggaatctcctcatagacatgaaattgtattgcagctggatcataacgaaagaaaccaaaatcgtggacctaacataagaaacatgaacataaattaggaagcctgacttatttcacaggaaaatgtgtgcatgcaaccttagcctcatcccattgtttaatacaaacagcaatgaggcttggtctaaataaaattttgcataaatgattatccttctttaccttttttaaaaaaaaaatcagttcatgaaccattattgcaatgcaaaaagggatcaagaagacacaaaacaacaaatgtagtgaagaataatattaatacactgtataagatttagagggtagaactatggccttgtattataaggataagacaaagcaaaattcaccatcagcaccggagaacccgctccctctctcattcagccatttcttttttgtctt

SEQ ID NO: 110692 - DNA, 7913 bp, Cannabis sativa
  modified_base (271)..(273): a, c, t, g, unknown or other
  modified_base (7761)..(7764): a, c, t, g, unknown or other
gggtaatacccattaaaagtgcacgcgtatatataatcaaatttctcatatattttcatacaaattttcagaatttttgaggcatttatttaattaaaaatgaaattttaatcaaaaataaaaatcatttttttttaaatcaaatcatttaaatacttaaaaatgatacctttaaaaaaaatacttaaaaatgataaaatttgttattaattaaattaaaaattattacctaaatcagagaaaagataggatgagagagagagagagagannnagagagagagagagagattgagagtaatctgtgattgagaaattgaaacagatctgagattgagagagaagtgttgaagaagatgaagagtaaaaagtaggcgacgagttggaggacttgaagagatcggcggagcaacagagcaccgacgacgacggagagaggtaaatgaaaatatgtcatttttttttttttttgatttctgggaaatgaaagagagatttcaattgtggggtttcagggatattgcaattgagttagtatctcacatttggtgcatgagactattatgtaattggacttagagtacttgatacagtgatatctcattatatacaaatttaattttttgatattaagtaattgagaaccaacatagtacaattgcacagttggttttcttttttgggagtcataggttttattttgagtttgttgtttcataattgcagagaagggtatattgtttttgatcataaaagttgtggaaacaatgatttctagatatctgaacgagttgtaccaaaataatgtgaaatcaagtggagaagatgtgatgagtgcaatgatgcctttgatgaaacttctcactcttactcttatgggacttgttattgcacatcccaaaatacaaatcatccctaaatccacttttaagcttttgagcaaacttgtttttgctcttttcttgccatgcctaatttttactgagcttggtgaatccatgacacttgaaaacttagttcattggtggttcattccagctaatgtgttgatcagtacagttgttggttgtttccttgggtacttggtggtgattatatgtcgcccgcctccgcagttgaataggtttaccattatcatgactgcatttgggaatactggcaatcttcctcttgcaattgttgggtctgtatgtcatacttcagataacccttttggacctcactgtaattcaagaggggttgcctatgtttcttttgctcagtgggtttgtgtaattcttgtttacacccttgtttatcacatgatggagcctccattagagtattatgagatagttgaagaggaaaggatggaaattgaggaagagttgcccgttactaatatcagtaggcctctccttgttgaagctgaatggccaggtattgaggataaggaaacagagcattccaagacacctttcattgctaggattttcaaaagcatctcgaatgtttcacaatccactctacctgatactgaattctatgaacaaagtggtgaaagcagtccaaaatctattaggtgtttggctgaaccaagagttgtgaggagaatgagagttgttgtggaacaaactcctataaagcacatacttcagcccccaacaattgcttctctattggctatcattatcggattgatacctcaattcaaaggttttttctttggatacgatcctccactaggtttcgttacagatagtttagagattttagctgcagcaatggtgccttctgtaatgcttattcttgggggtatgcttgcagaaggtccaagtgaatctacccttggtcttcgaacaactattggtataagtgtagcgagactcctcttgctccctatattcgggattggaatagtggcaatggctgataagctcaattttttggtggttggtgatcgaatgtacagatttgtcctcttgatgcagtatactacaccaagtgccattttactgggagcaattgcgagcctgaggggatacgcggttagggaggcttcggctctcatcttctggcagcatctgtttgcactgttctccctttctctgtatattattatctactttaagctacttacatatatgctgtaaagaacaactgatggaaccttttacattggatgatgttagtgatttgttattgttccaatccaaagagtcaattgtactgattttcacaattgtaaaattaagaaattctgaggtattttgtttggaaaaatgttgtagtagttgtgaatacatctcatttttatgattgacacactttgtatttaatagatttctttcaaccatgaaatatgtagttataacttataagacctcatataaacatattgcccaaacagaagacacatactcaaggcacgtggatcactaaagaatactcctacaccccacgattcaatccaattcgcaaagtgcatatacctacatttgtgcatattcaattgaattggaaattctaaaatctgcattttacgactaaatgttgattgatatgtaaaatttacttatctgatctaatccacacatatatatttatagtatatatacaattaatattttaatgtaaaagataaaaatttaaaaatctaacatgtgttataaatatatattcaaaatttagttaaccaaatttacattacactcaaattataatttaaaacaaaattaaaaactttttttttacatacatttttctttctttctttaaatttattattttatgttttatttatttaatttattattagacacataaaacaataataatttatttattttattattagttatgttaaaaaaaaatatttttcaataaatattaaataattaaatatttaaaaataatcaatccaaaataataaatcaaatccacactaacttttgcagattagaattgaattaaatccaaaatataaaagcggatcaaatacattataaacaaaatagtacgaattgaattggatgaacacccttagtatttatagccattttctaccttagcccattagaaattaccacaaaataataaataatttagaaataaaaaaatgatatgaaaaactcatacaaacttgccaattcacctcttttttccttagcttattataaattatacaatgctcagataacagaatccattccaaaagggaaaaaaaatattgtaactccttccaagtctcataatattacaccatttacaacaacaatgaataggaagagttgccttaccaagcaaattggcactcaccattaagctcttcaccaatataattcctgccattgtattaaacctcccaacccttaatttttttccacctcttgctctgatttcaccatctgcgtgtagcagcttacgattttcttgtccttttcataatattcttgcatattttcaaaaggtttcaaatccagatcaatgaaacatgcctgcaagaattcatgctcaaataagatatcaaattcaagagaagaacaacttcaatccatttgatcttacatttgaattgatcttagtctttgtgttcttagtttttgagttctttcattgttgaatgagaccactaccccaaacagtactatcttactatttttattttattcacattatgcatgactaaaaagctataataaacttagagaatacaataagaacaaaatggataaaaagaaagagattctaccttataatcaaaagtttgagaggttgatttcaggtacacactgtcatatgttgattctgtgtcaccttctttcttcagtttaaaactcatcatcaaactgcagtcctttgctgttgtgcctatcaaaaagttttttactatcttcaagctttcatctaaggaaatcgaatgcaaggtcgtatacttgtctcgaactttctcttcccccaattctctacatactttgcaaggctcagatataatattataatatgcatgaattgccccttctatgtcaagattatcaagcttttgaagttttataagcctctccattactccggatgtataaattgtctcggcaataagttgtataaaactgtctgtacgacgaccttgatcccctacaatgacatctttgagtgcatcttcaaatgcttcttgaatgacagaatttgtactgtcagcaatcccacccaaggtcccgaatattagagaaccgtctaaaaaaacacgaaaattgttctgaggagatgagaagagatctttgatggatttctgtattctgtccattactcccgagaacaaatcaagagggtcatattcactaaatgatgaaatctgcaatgtaagttaaaatatacaaaaaaacttcagcatatatggatgaaaaactcaaaacttgccaatcatgtgagattatgcgagtagagaacaacacatggtgcattggtactcccatattatgtaagtccttgcatcaaacttacaacactgctgaaatctaaacatttaattgagatatgagacttattgtacaaacttcatgcatcaacataatggaataaaacccatattattgtaaatttcataatttgaaaacaagaagctagtagaaaaagtacctcttttccatgcaacttgagggcctgatgcattttataacgagatacactttgtttaatgcggttttcttcacctataaattctgagattgggaggaatccacatttgggctgtattttgaaaaattaacacaagaaaagtcatgtaagtcctataacgatggaagtgactcaaaaccttggtaataacactaaacattacaaaagaggaatcctcaggagatgaaacccatataaataagtacctttatctctacacataagcagggttcaccttcttggatacctaaaaggacagaggaagaaactgtcaacttgttgggtattgtactaagtgtaaatacagttagtttactgaaaagcttatactagttgttatgacagtttatttccttatttcctaaactattttcttatattccagcttgcaggattttacaactgtaaatccttaacattgtaaattgaaaagggaaggagagtttttttttttttttcatttttttgaaatagagagaacccagataaactaagaaaacagaatcttatcttaagtaatccacaaaatgagagcaaataactagcatttggttggaagtaatgaaataaaaaagaaacaatctttatttcatttatttgtttggttgcattttgaagtattggaatgaaaaaacattttatacgttctaaatttgattccattatgaatcgtattttgattttcattcatattcctatattttcattccttccaaccagtagaagcaaaatgatcatatttccttttcagtatttattgtaattaccagttggaaaaatagaatgatcagatagtatcagcacggaatcacaacgtgtatcaactttggaagcatcaactctccaagcaggacgctgagacaatacatttttctcaaccaactcaagaaattcccttgaaaccttaacacgcttctgccagatattcaagttcaatacaaaaattaaaaaaaaatgtcagatctatatccaattgataatttcaaaatagtactcaaagttgctaaaactcttaacactgacaaaactaaattctagcataacccttcttttctctctctatattttttttggtaacaatgaataattttattgaaaagagaaatgataatgtcatacaaacagtattaagaaaccccaccaaaataagaaatctcatcaaaccatattagttctttatccacccgaatagcataccgagctaattcatgggatattctgagaaactgaacatcaaactagctaaatcctctaacaaagaaccaagttcattaagcaaggaatagtgtttagaaaatgcatttacaatcgctaaacaatcagactcaacaaaatataaagtaagagcccaatccaatgcttccacacaacaatgtgtcaatagtttgatcacaattcataaaccatatgcaggaaaagcactaagagagtaatttgtagaaaacataccccaacatctacatattttgaacccagtaaagggcttattacgtgctccaaaaacatgtgaccggcgagttctctagtaggtgaggacacaatatcctctgtctctttccacacaaggcgctcatgcaaacctaaagcagtaaggctcttgtcaggattcgattcgtttcttggaaccttctgtatccgcaaaactttcccaatcttcacagcagtatcaagaaacggtttcaaattcaattacattacactattgaattgaaatggaacaaaaaaaagaggtttgaattgaaattgtggtgaaattgcttacgtacataggcaggagaagatcgggagtaagcaaggactaaattcatggcaccttcgcctctgtaagtccattgagcagcgtgttcttgatccaaaaccacctccattaacgtaagatagatctggagaaatggtgttttgcagataaagttaaagcaaaatctctcttgctttgtactttgttttttagacagtgaaagctacaacaagtctttgaaatgataattcgctgtataaatacttttttttttcttttatattaacaacaaaactaaccgaattttatcatttgttattagaattgtagaagaaataattaatttaggttccatatatacttcttcataattatattattattaataatgttttattttttattaaaaaaaaaatgtgttaaattcgtattaagcacatcctgttgtgtttgactttttttttatttcgtgtcaagacttatgttgaaacgtatttaattttcttgactctaaattgtaaaattggtagtatcgtgtctgttttgctagtagcggatgcttacacaatctattaatatatatatatcaataccaaatataatattgtatttaataatactaatacaaaattaaaataaatataaaattataagttaatattaaaattcttaataaaaaaaagttggtcggatatccgaataagttggatctaatctaattcgatttgagtatctgatctaacgaggcgagcgagacagatccttacatgatctggatcaggtcggatcagattcgacgagacctatttacactcctatttgctacctctaattttcttgatttgctttgcattaatgccacttggcacttgctaatggagttgtagttgtatcttatgcatcttttacttgtacttgttggtctattttcattccctgatcccatgtgctaatgtctagagccataattttcttggtttctttatagttaataatatcttgatatttcgagggaataaagaaaaaaaaaacatcgcgatattttttagaagaacagatatgatttcttcttgccaactatgatatttttatgagtaatttgtgatattgatgtttgagtttaattcccgattataaataaatagttaagtttaattttttgcggtaataatacttaaattataattttagaatttttgtagctacctgactattaagtattaagtaaattgtcacgtgacaatttttaattggtccaagtcattaaatttatattttttaaaaaataaattaatttaaatatactaataagaaaatgagacgtaaataatgacttaatatttagaataatttgcggcataaatacttaannnnaactctcagttgcaaataaatatctaagtttaatttttggcggtaatactacctaggttatatttctggaactctataggtacctaaccgttaataaatgtgtcattttcttattggtatacttgaactaattttttttaaataataaa

SEQ ID NO: 110693 - DNA, 2638 bp, Cannabis sativa
gtaaaataatttccaacattaatggttaacaaaacatatgttctagttcctcctgcacctcgccagaatctaattggaaataaatgggtgtttagagagaagttcaactcatatggttctctccaaagacttaaagcacggttggtggctaaaggctgtcatcaaaggccatgaaatgattttggagagacttacactccagttattaaagcctcaatagtaagaatcattcttgcaatagctgtttctaaaggctgtgacataaggcaattagacataaataatgcctttttaaatgggacacttgaggaggatgtattcatggcacaacctgaagggtttgaggagaaaggaaaagaacattttgtctacaaattaaacaagtctctatacggcctgaaataggctcctagaacttggtttgacaagctgaagtcaacgttattaagctggaatttcaaaaactcaaaagcagacacttcacttttcttcttccaaaatgctaacaccatcatcatggctctaatctatgtggacaacataattgtaactacaaacaatagcaagaaagtaaatggttttattgctaaactcaattaaaagtttacattgaaggatctcagatcgttacactactttttgggaattgaagtatacagagatgaaataagtctctacttaactcagaccaaatacattgaagatctattaaaaagaacaaagttcatcaatctcaaaccatgtcctacaccagctacagcaggaaagctaatgtccttgaatgatggagaaccattgcaaaatgtcacagcttacaggagtgccattggaggtctacagtatctctgccatacttgtccagatatctcttatgctattaacaagctgagccaatttctaaaggctgtaacaatagtacattggagtggtgcaaaccgtgtcttaagatacctcaaaggaagtatgaacaaaggccttcgcattagctgtgactctcaacttgacatcattggtttttttgatgccgactaggcatgtttccctgatgatcgaaaatcagtagcatgatactgtgtttatctcggtaacacttttgtttcttggtcctccaaaaagaaaaatgcagtgtcaagatcaagtgcagagtctgaatatcgtgcattagctcatgtctcagctgagatttcgtggattgatacatagctaaaagaaatcaacttccctcttaaaattgttgtcacctggtgtgataacttgggagcaagtgcacttgcttctaaccctgtttttcacgcaagaacaaaacacattgagattgatatacactttgtttgaggtaaagtgcttagaaaagaattgaaagtaagatacataccatccttagaccaagtggctgactgtttgacaaaaggcttgacaagttctcagtttcatttccttattgaaaacttcaaagtcatgaactcgcccctgcgtttgagaggggatgttaaagaagaaaaatgaaacagtgaaatgcacctatgtttattgtgctctgcattgcagaagagtactcactctccatcaaatcatcaaagaatgattgtataaatcaattctgttatggttgtggtccaatgattggacaagtgtcacctcatcatgaatggctgaaaccaagaaagattataccgttagaattttaatgatgatataatcattgtgtattaaaagattccttttttgcctttattttttgtcagctgtaactgagctgatttgcttacgttttgtaaatggcccttggcccctcttctatataaagaaattgatatcccagcattcattgagctgaggaaaagaaaatcatattctattctatattttcactcttcatacagtattcgtatcaattattatttcttcttttgtttctgttcttacgaaaagtatattgtattgtaagtactaattctacgtgtgcttgtttagtgccaaacaaatatttgtatttatatatggacatgcagggaactatatacacatacggccaccatgcatggtaggtgggtggggagggctcatgaagcctcatgaaacagtttatttgtaaatttacgcagtagttttaatttaattagtaattaaaatttcgaaatttaggatgtaaagtagtcacccctttgaaaaataaatctaattaaaaagttccctccaaaaataaaaagcttatgaccaagatgataactagccattatgtatagagaaatactaaagtgcaccttaaggtgttgggcagtgagcaccaaacattggtagtgttggaagttgttttacgagaatctagatttactaacacacatgtttgattataaatctacaatctaacatcctaaatatgaatttcttaaaacaatgaattaaacacatatagagttatagaaaaccttacattgatggcagcaaaataatatgactccttccattcagatctctaggccttaattcatgtctgtagcagagcattatcaaaatctgaacctggatcttcttcttcttcgatagacacagtctttcacaaaggtttgagtatcacagtgggctaatactcaaaatacctttggaacaaatattttgagagagaatacatgtgatt

SEQ ID NO: 110694 - DNA, 1603 bp, Cannabis sativa
aaatatagtgtaattactaaactgtgtaattactaccctagtaattatcttacctagtaattacacagttactagtgatttagaggtaattttcgttgttgaaatattttcaaacatccaaaaaagtacaaaatgacatgctgataactatagtaaatagttactacttatattttctcaacttttatcgattcattttcaaaacgtttcaaatcactcccattttgactttgaaccatttatacatccaataaatgataaaattaagtcttatatttatagggacacgattttgtcccgtgatgtacttttacgaaatgtaatctgtggtacattagatgagtcttagggtacattagataggtctcagcgtacgttaccattttttaactctaattacccataaatcaaccccagcccttagatcaaataactctcccatctaacgggtgtcgtacatcacagaatacattacgtgaaagtatatcacgggccaaaatcatgtccctatatttataatagttatcatttatttatagcaaaacatttttttagaatattaaaacacaattatatagtaatacattttactaatttaagaatgagaataatggagattcgacttataagttttatgttcatcaatttacaagattggtaattcctttcttgatcatcgtctatacacatttgtaattctatgttatatgatacaatttgacaaaatattatttgtcacatatttatcacagtactatctcatagatgaaaaacctataatcctacccagaatcatgcttttacttcaagaatcactggatttaatcaaagaactctaaagcaatcataggtccgattgaaatgtatcaaagaaaaatttcctagtactatactcaaaagtcaaaagctaaaagtttgaagttggggacctcatcttaagaagggtatttctgacatctcaagaactggtaatgggagtcctaggacctaactgggaaggaacgtatgaaatccagtatatggttcgtgatggaacataccaattgaaaatacttgaggagtcagagattccatgaggttggaatgtggaccacctgcactggtactatcaatagttacaggtggtcggatctcatttcactcgacatattttaattttcttttttattttcaaagaaatgtaagtatcagggcacgaccctggcgaagataatgttatgaaaagaggaatttccaaaaaatatgtttaaagtcttttcgaatttttatgtatgtttctacaagtgataaagaacccaagttcttagctcactttgagggtattacgtacagccatgtacctctaaaaatttacttagtacgatctagggcagaagtacaaacgaaagtcaaaggtttaggcctttggatcagaacctcgaggagtcgggactaagttacttctcatcatgttagatcaataaactactagttggctcaggtcgataattgaaagaattccaggcttaaaaaaatcaagaaatggaaatttttaagaaaataaaacaattgaaatccaagtggtccaggctgctctgtgttggaagttattttaccaggatct

SEQ ID NO: 110695 - DNA, 5807 bp, Cannabis sativa
  modified_base (583)..(587): a, c, t, g, unknown or other
ttttgccaccaaaaataaagataagggggttaagtgtataaaaatcaaaacataagggggtttcgccgcaaattgctcaaaaaaaaataatttagattatttttagaaaaaaaaaatatagtatttttaaaatcaataaaaaaaaatgtatttttaaaatgaaatttttttaggccctagactaagtaagccctaagtataggcctaggccgcctatacttagagttgggcctgagttttaagcatcttaaattatttcaaatttactaaaaatttgtaaaatatctactataaccacaatgtatatcatcttatacaaaattgagataatttctctacatgctaaaaataaaaatgctcttacactccccacatgattgttaattgcaaatcaccaattcggtcgagataagttaaggaatacatcttttttatattcattaataaaaaatactcttatattttatttcattaaaatctaccgatttttatgagtcagttacctaatatatctttaccctccagttaagtgtagcacatgatttacattaatctaaagggtataatagagacatcatctatnnnnntgggtatatcttaaagaatatggaaatgaagataaaaattagaataaataaagtaaagtgggtatacaatacaattttctcaattcgatcgcatacaccaaacacgagaacacaataaacactagagccaaccctgaattttggtgggccttagaaaaaataaagttttttgggcacttattaagaataagtggtatttctaagcgattttttttttcttttagcccctatgctccgtaaatgttagatagcctgccttaactcaagaccgaccctaatcagtgcactcatacaaattaggcactcaatcatatacacacacaatctacaaccataaaaatacagaaatacatgtagtaacaaacataacagtcataattaattaaaagacaagtatacaaagaaaaaagagttaagctatatagtgacataacaacataattagattatgactgtattaatacatattgagagagtaatttatagtaaacatacttatgtttaattttcaattgtaaataaatatctaaatctaatttttgacaaaattaatatctatgttatatttctggaacttccgtaagtacttaatcgctaaatgtcaagtcattatccacatgtcattttttcattggtatatttaaactaatttttttaaaaaaaaataaaaagtaattaatgactaggactttcagaacttgccacgtgacaatatacttagcatttaacaaccaagcacctacgaaatttactaagtataattattgctacttaaatatttatttacaattgagaattaaacttaaatatttataagataaattactcatatatatatatatatatatttatatatatcaatagttaaaactcaacatatatgtagtgatgaaaatataatttattaattaataattactttggttaccttttgcagaaaatcaaaagtgcatgttattgatgcaaaaacaatgtcagccaatccaattgctgtaattgatttgccttgtagagttccatatggattacatgcattgtttattactgaggtatataatgctaattaaattaaatctatcaacttttttattattagacatataattgtgatgatcttgctcattttgaaaacccaaagtggtattttagactttagagtagtattagaaggtttatgaaaagttaattacatatataatctgatatcatgggttaaatagtagtcatatagaagagaaaatatatttgaaggctaattaagaattagcccattaatttttaatatgtattatattatgtgttatgaattttttttttcataccgttaaagatttctttcaaattattgagataattggattcaaagacttctgtttaatttcgtttgattttactaatacggtgattgttcatgtactaaattgtgtcccccccgaactttgatatgtaccaaatcgtatctcccaaacttcattcaggttagactttcattagtaaaattacacaaaaatctttaaatctaacaatctcaataattcagaatttttttttaatagtctgaaaaattcaagtattatgatttagtaaatactaaatatcaaagtcaggtggtaaagtcataattaaaaaaaaactcttaattaattaattaaaaaagattattattaacttatggtgaggtaaaattgttggtattatatacttttttttctttttttttatgaccttttttttttttttttgatctttcatcagaaacaacttcaagaacaagcagagagctaattggaaacagtcctcatatagtgctcttagatttttcttagctataattaattttaaaagatttcaaaatctttgtaatgtcaatatataataacttattgtataagatcataaatagttttcttgtagctttaagttattacaagctctctttaaatattgttgtgctataatagatattgtattgtgttcataatttttggattcgtatcaatttcgtgtcatgccaaaaaatttaaatactaaaatacaaacaatactatatgggatgtttatttttcttattgtatgtttggacggttagagatacacccacttctttgtatttattagcaatttttaaatatttatttttattgggttttgtctgaaaatttttaataaattacaactcggttgagatggaataatccatgatataagtgccaaaatttaatctttgttaactacaattgttattaaaacaaaatcattgtttgaataaatatattcattcttgaaacataatagtgttcctttcaaaaataaaaacatagtagtgttgttttttttttacaaaaattaaccttcattcaaaaaagaaaacttaaactttatggtcattacaaataatatctgttggaatgactgatacgtcaaccataccagttaagttttgagcataaatctacttagccacattatgagttgaaaattataatctcttaaaataaatgaaaaataacaacttaaaaattaattagagagtctattacaatgcagcatatagatccattcagagttttgatgactttttttgaatcgttctcaatcaacacaaattggtgcttccaaacagtcgatgtctcaagcaccaacaggcaagccgcaactttaccaatgaatggtcagagaaagtgaaccttttagtagcaacccacaaaattgtttcctaactaatgccacaacacacatagccccactacccacaacatagtagtgttgttaataacaatgacattaatagttaaatattagtgtaaatgagatatgatcaaggccaaaaaattctaatttaaaattggcacaattttcaaaaccacattctattagttattatatactagttatgtaaatattaaaaaaaaaaatcaagtaccatcaagacaaccaaccattatttagttttaattaaaaaaatatacattctaggacaaaattagctagtgttattttttattataacacactacaacctagaatgaaaatttatatttttgtactttgtcctataatggaaagaatctcttcatctttatcaaaaaaggatctctccaaaaaaatatataaaatttaatataattcaataatataaagacatgttattaattagaatcaataagaagaaaaattaaaaagctaacacaagaaaaaatggccaaactagacatgaaaaagccaagctacgaagaagatgaaggcgttagtcgttatggagttgtatgtgttaatccaaaccctaacaaaggcttctcttcgatgctcctcaactggtttgagaacctcattgttaggtttatgtacaactcttcttcgtctcaccactttctcaccggtaactatgcccccgttcttcgtgaaacccctcccgtcgacgaccttcctctccttggttaccttccggtttgttctatttcttccttcatgactaatctttgcatagtaactcattaattatcttgtttttcatcaaagtaaatttttatgctactacaaaatatacattttattaattaataactttttcacgccagtcataaaatttgactgacgtgataaaaaaatgcatatttttgcatcttttaaattaattagtgtttttgagtttgaaattcatttcatcaagttatacaattttcattattattgacattgctttctttagagttaaagtttacgaaaaagtttcttcaatataacatgttacgaaacacaatgtatttaaataatcaagttcggtatttaaatgtatcacaatcattactcatacatatgtttacgcagaagtgtttaaatggagaatttgttcgagttggtcccaatcctaaatttgttccaattgctggatttcattggtaaatatattttctttttatatttgaattaattttacacttaaattttaaatgaaattaattaattacaaatttttcattaattttgaggttaattatcgtttaatttgttgtatatatgtgcaggtttgatggagatgggtgtgtgtgattctttgctgatcaatataactttaatttataatttcaaaacattatattacttggctaataattttttcaacattattgttaaattaatatttggtaaattttacagtatgattcatggtttgcggattaaagatggaaaagcaacatatgtgtctcgttatgttagaacatcacgtattaaacaagaagaatattttgaacgagctaaatttacgaaggtaattaattaattaccgtatactaatttgttaaaatatgtagaaaaatgggagtaaagaagaaaattatttgtttagttgggtagaaaagagaatggaagaaaatattggagtaagaaaaaaattgttctcctaatatttatttaattatccctccaaaattagattcaaaataatttatttaaattgtaatctttttttaataattttttttttcaaccaaacaccaaaaagaaaattattttattcaaaattaattaataataaatacatatttgtgttaattacatgtattaataaaaggaaaaatgaatatctaatattcataattatgaattataaattttatttatttatttattttgttatgaaaatttcagattggagacctaaaaggaatttttggcttactcatggtgaacatacaaatgttaagagcaaaactcaaagtgttagatctttcatatggaaatggaacaggtatatgtaattaattataaatatttgtgtatatatatcattatatattatatcttcacaactaattaatgttattaatttaatgaattattaccagctaatacagctcttacatatcatcatgggaaacttctagcattgtcagaggtagacaaaccatgtgagcatataaatctttttaattttagtgataattaaattgtatgttgtgatatttttgaatataatattttttaaatatataaaataagagaatatttcacaaatatataaaaatttggttctacagaattttaaatatttttatgatttttataattttatttatagaaaatatatgtatttttatgttttattcttgttaatttattgttaagtttttgttattttgatattgtttagatattattttcatgttatttttatataatttttttgttatttttataaaatacggtaaaaatagatcg

SEQ ID NO: 110696 - DNA, 11175 bp, Cannabis sativa
  modified_base (5626)..(5633): a, c, t, g, unknown or other
ttttatacctacggtttttatcaaaaaaccgcctctaaatgtcaatttcgaataaagcgggtattttcacaccctttagcttctctttttatagataggggtgaaaaaacagcatctaaaggtcaacattgtagtagtgtgttttgaagcaatacaaatacttttctcatttatcaaatatatatatatatataaatatatatatattaaactttgcattcctattggtaaaaatgatgcaaataagcataagttaaatataaattttaaaatataatttacataggtagtttaaaataaaaaagaaaaaaactcttatttatatgtgtttttgcaaaattatgtttttattcaacttttctcaggtatattttaaaaaatacttataaataaatatattattaatatttagtaatatatatttataaaaaatatataaataaaagttaaaaacactagtattatttataagtagagatttaatgttcccaataaagtaaaaatttgagagctaatatgctaaaaattaattttcaggaactagtttgtcaaaaattatatatttaggtatcaatttatcaaaaataatttaacaactaatttgctaaaactattagtacatataaacaataatatgtgtacacataaattacacacaaactgatacaattaaaaataacttatcacgtaaacggaagtatttattaaatttgtgtgttaattaattatgtacatattattatcatttgttatattacttaattattaagttaaacatgtttttcaaaaatgaattattaaattaattaaacatgggatcgatgagatccaatataatattaaatttgaaagatcacactcttttagcaatttcctatcacttgtgcgccatctctatagttattgattataaactaagatttgctatatagaattatgtaagtaaactttttttgtttttttcaaaggttatgtaattaaacttagttaaagtccccggcctttcaaaaaaacaaaaaaaaaataataataataataaaaaaccttagttaaacttagtataccgaaaagagaaagagaaaaaccttattctgaactaattaaggacctacaaactaggcggacggccattgtcacttaatactaataataattaataaattaaagtttaaattccttagtacagcttgaaaaagtatgtaactctactggcaccttttaataaaagtttttctgaaacattaatactaattttggtaggtatatagttctgtcgagctagtgactgtgctttcttttctttttctttttttaatttcctcaacttgacaaattgatggtgcttcaaactgaagtacaaatccaccgaacatggaaacgaattaataaacaaattatggacaaaaataataattaaagttccaatagcacatatatttaacaatggaatagtaatatataatatgtgtcaaattaagagatacccaaaataatttagaaactattatatacattttgagcaatcattttgaaagggacaaacaattcttaagctatagttgctcattatttcacgtgatctgatatgatttactataaaaacattaactaccgatatgtatagttatatatttggtagagttccataataaaaatatatgtaacacgaagtcaaagttgaaatgtaccagaaacgtctcgcaattaggagccattactagtggagtgtaaatgtttcgcactcttgtttgtaaaatgatagttttactttgtgtgtgtacatgtatattaatattaatatacatattaaatttttgggcatttatctaaacatttccaatagcaactaagatggggaaaagagaagttgatcagtattgcatgggacatgcaaaatagagaaacgattctattatcaatacctagagaatatacggaaacagttcaatgcaaagggaatcttgggaaacataatcatataaccgtttaaaatcccattccgcatgtattttaatatatatatatatatatattaattattcaaacagcacattaattatttttttgacttaaaagagaaaaaaattagtcaataaactatggttttcttattcaatattaccccaagtacttctcagttcatagtgatccatacaatcatatagctaggtttcaactttctataaataccttagattgcattcacttaaacgcactccaaattacactactattataatctctctctctctctctctctctctctatttctctgttatttccccattaatagtatatattaactatagttattatacatatatgggtccagtacacaaggtaatgcgtgcttcgtctcttgtagtagtagtattgatgatcattttttgttgtggaatgatcatgtctagccaaggaattaggactacgtttgtgaagaacgaaaacgacgtcgtggaaggtcatcatgagctcatgatcatcaaaggtacctttggggatctcgaccgtcgatcagttttggaagatctagataataataattttaataataataataataataatcagggtgaggctgatgagattaaggtttcaaaagcagtaaagaatactgatgatatcaggcctactgccccaggccacagtcccggggctggtcataatcatggaccctcaaccgttccaaactcaaaataataaggttacatgattcaatatattactaagctggcatggtccatcgagttaattaattataattatggttaatgatctacgtaaagttgtaatagtatacgtattattatatattatttcgtatgataaatattgcaatattaattctctctattttgtagtctttaatatgcctcatgccatgcactacattaatcaataaagtggaattttgttatcagcttctttacaatattgcatagatgttttattgatcgatattgtactatatatatatatatatatatatattctgggtatgattagatgaaacgatttttatttttagttccttttcacacaggcccataacataattgcttgcctgaaacactaaaatttatttctttatataatttattctcgaattataattgttggcatatgattttgttgcatgatgtactttcacggaatgtattttgtggtatattagatgagtctcagagtacattagatgggtctcacggtaagttaccatttttttaactctaattaccctagatcaaccccaaccctcagatcaaataactcttctaacggctgcagtacatcacggaatacattccgtaaaagtatgtcacgaggcaaaattgcgtctcatatatcattattattatttaaagtgtattattgtggaaaatttacaccactgttgtttttcattttatttcatttgtactgttgcacaataattatttcttttcattgtgtttactgtcttttctgaattttaatatgtttatacatatatataaaagggactaatagtatagtaagaattgggtgttatacttatggataggtataataatttctaccgatcaattaaatggttcaaattaaactttggaaacgacaacttaattaatatttttttatttataattaattttaaatcctatttataatgttcgtgtaacaaaaattccaaatctaactctaaatttaatttttattttatttttttatttagttttatgactaaagttttttattttttcatttaattttaaatatataagataataattttttatttaatttcttttcaaaaataataattatattttaaaaactataatatttattaacctataggggaatattacttcatatactattttttttaatttttttgggtttctaaagtagttgcagcgctagttgcaataggagtttctatacaattttttttttttgcaaattaggttacagcgctagttgcaatagaggtttctatgtagaattccgtaaaaaatgtaaaaataaaataataaaaaaaaaactattttgaagtgtaaaaataaaaaataccttattttttttttttttttttgtaaatgagaaaattgtattgctcaaatcaatctttacactctaatagcaccccataatcacgacctacaactatcaacttatgtttatttatataattttataataaccaatacaatcaataaaataattactatgtaattggtaactactcttatcttgatgataaaggtgcatgggttcaattcttggcaataacatgttttctttaaaaaaaattctatatttttaatttaaaattttactttttataattttatattaattaatcttattgttcaagattataatgttcaatatatttaaaatttttaaatataaaataattattacttcaattacactgtctatatcaatcatatataaactagtaaaataatacacattcttaatataattatatattaatctgtccaatcaacaaatatatttttgaatcatcctattaacaaaatttaacaatatatgtgttttgtttttaattcatacatgtatataatattattatatcattatcatgttgtctttgtattattttttatgacgttatatatatagaacacattttattttattttttgtattacaaatatttgaaataaatatatataaaaaataagttgtacatactaattcgaatctctaaacaactagagcaagagtaagaatcaccacgtactactaaaaatatcacttttgcagcacggtttgcgattgtgctggtaaaagtaactgtgctggtaaaaagaccaaaattttactagcacataattgcgatggcaaaacctatttttacgagcgcaatttatatttgtgttggcataacaagcaatttaaacattctccccttgatattttttaccaataaaaaagtgcattggttttgccacttaaatgtgtaatacgctagcaaaagtcacttttactcacacatcgcgaagtgcgttggtaaaaagttatagttttacataaaatatttttttttttaattttttgagttttataattttttacaattatttttttatataaaattatttagtatatataaaaattaaaattatttaattttgtaattttataaaattgtaatctattataattagactctctctctctctcttcattttcactctgcaacaatggtgagaggctcctctcagtcacaatcctcatcatctcccaactcacgacctggcctcgttgctcggctcggctccgctacagccacagctggaatactccaccgccgacctagaggaactactaccaaaggtactggaccaacctcgacccagctcctcccttctctcggtctcgatctccctctcgaaccaaatcagggacagcagtccgtcccaaagcagatcggcatctccctctcgaacctaatcggggactgttagttattttcccctttaatttattttcagcttgaaaactcaaaaatcaaaaaggtaaaaaattaacgccgatgtacctactgcattgatcttactttttccttggaccatattgaagaaagtttggttattattattattattannnnnnnnattattattattattatttagattgatttgcgtaagtttaacttaaacttaggtatttaaacttagagagttaaagttaggtatttatgccgcaaattactctattatttatcatgaaatcgtgttattcatcgggaaggaacttgtttattaatttttttatttgctgggaaaaaattgaaacgggtcagcaattggaacgttgaaactgttggactgccgagggtcgattgcagcaggttaggactacatcagcgtttcgatatcaggtagagtggtttttgatttttgattcacttttgtgatttcattacaccatatggaattgccttgatgatccctgaatgtgcttatttgagttcattatctgtatttggaactaggctttgtttgtagattcaacattgaaagattcactggtttctactaaggctttaaattctgttgattggatgaaatgctttactcaattgcagaagcaaatatgccattatctgtatttggaactaggctttgtttctaacttgtttgatcatttggacttgaatttgtaacaagctaggcattgtttaatatgagccaaaatggtgcctgaatttggcaagaaaaactcagttttttcatttctttgaaatggaattttggattttgttttttctaatgtatagatgataaatacttgaaattcagtgcttattagtgaggtaattgaagaaacttagcatacccaattgaattgaacaatttagctggttattacatgtttttgatatattttgttataactattgaatgggttcgaattaattgaattcactattgaattcatcttctatctcttagtcttactatgtcattcgtcatcaattagctagttttgtacgaactaattataataagaagaccattttcttaagtataatatgtaatgtatttatgaattagttggtggatggtatcttcagtcaacaacagtagattttttttttttttgaaaataaactctaacagcaatagatggttatgcaaatcgaataaccatcttgaatatatggctttctcagatggctgccgcaacatcaaacaaagttaataacaacaaagaatttagatactctgatatagaggaagaaaccctacaatttatattggatagttgcgaatctagcatatcaaagtacaacaaattcctacaggtaataagagtaatttgcatgggaattttattatatgtttactttgcatagaaagtgatttcatttacaagtagttttgagtaacaaaaacagtggtaattttttgttgtaacaggaaagtggatcattggatgtagatgtgttatcacctaagcaactcaaccgaaggttgtttctaaaacaactagttgtagatctatgtacaaatgagcaaaggatactgtttcggcccaatatgtaagatttcacctactcttttagctgattattatcatttaaagagttttctttgtgtcgataacatgttctgtgactgacataacttagtgagttttttcttttccaattaaaataacttgttctggtcttgtttaacactgcttcttagaacacgcttggaccatttttattgagcccaactcaaggttaaactaattacagcttagaacttagaaaaaagcaagcctcaagaatgctaattagattcatgtgtatatctttggttctctcttctggtcccttaaatactctgcttgcactttgcaggtaagccagtagatctcaatgatttgagaagaattcagaatattgtgaatgatcaaattgcggcaaaattagatgtcttttcaaaggaggtaaatctggcagatgctgagcgcatcaatagtttaccagcagtttttggggaattaagttgattatgttgacacttttttttttctttcttttgataattcatgttggacatgttctatgtaatgatctgatcttgataaaaatattataattgtaggtctacccaaatcaagttagagtggtagcaattgggaagaaaattgacaactttctggctgacccagaaaatgatgaatggacctcaatttttgcagaactttgcggaggttaatatcttgtgtatatatatctatatagatatagatatatatttatattagtttttgagctgggataagtttttccatggagtttttgctattaaagtttacccttatggctgtgtcttgggacccatatatcaaatacaaaagaagccaaggcttttgcaattttatctaaagagggcattgctaaagggattagaagaataatttctgttacaactgataaggcttctgaagcaagagaattggccaactttcttgagaaggaagtagatgatgcatccaagggaaggcagcttgctagaaaaggtaccaatccccttatttacttatgtacaatacttttgggtgcgcttgatgttacttttcataatttatttatatatctcatttttctcatttcccttgtatatcattcttcatctatccattcaatttccatgccctttattctattattggattatatagtttacctctgtctcgctaggaacctgcattggcaagttctgtgaaaggatatggatatagttgccgaagttcttggtccaccacacgttcactttatgtgaaaggatttgggtcgttgcctaagctcaaggtcgttgcctagacctctcgcgccactgcagtttgattatgttggatctaattgggcagaggtgggagataataaattaataatggtcatggcaatgatgatattgatgatgacgaaatcgatttgtagtagtatactagtatttattttattttagttgagaaaattatatttatgttgatattttaaacgtatatttatttactaactttttgacaattataataatataattataataatattatgtatgtataattagaaaattttaaagttatgttttattctgtaattatttataatcaagttttcttgttctattttttaatttctatttattttaatttaaaaaataattgataaaatttttaaattaaataatactaaataaaaaaattaaattatacagttttaccgacgtattattacactgacataagttaaatatccatctatcaaaagtgatttttattagtgcttaatgcgttggcaaaagtaaaacttttcttagtgcatgtgttggtaaaagtaagatttttcttagagcacatttgcgctggtaaaagactttttccagtacaaatttgtgttggcaaaagttaaatttttaccagcacatttatgcgctgagaaaagtcatttttgtcagtgtttttcattttgtaccagtaaaagttccaataccaacctggatttgccaattccttctgctagcgcaaaaatatgctagcaaaagtaaattatgttttaccagcataatacctaacttttgcacaaaaatgtgctggcaaaagtcttgtttcttgtaatgatgtatgtgttcgaccgataacgatttctaaattatttggaaccttttgataaaattaattaaaaatttattatgtaaatttgaagtaaaaaaataatttaattaaaatttttaattagttaaaaataaataagtaataaaaatatttaattaattttatgttttgttcaattttatagagcctccatttttcatttgattattgtagcaattttggtaaattctcctaattctagttagatgacatgaggtcaatccttagcaaatttcaattagttaaaaacaaataagtaataaaaatatttaattaattttatttttttttcaattttatagagccctaattttttattcgattattgtagcagttttggtaggttctcataattctagttagatgacatgaggtcaatccttagcattttattttattttatttctttaaatcattttgtctgaggtttatggtacatattttattttatctttttatttttttgtattggaaaattttgaaataatttaattaagtaaaatcttaaattaaaaataataagaaaaaaattgtaccaaatactaactagtgtcttttagtaagtaagaactaccacatatgagttcaatctttagatcaattgaaaaattttgatagctagagttaacataaacattaatctgagttacaatgtaatttttaatcttaaaatatttagagtaaatattcattcgttattaagtacgcctgaacttgtcataaactatcacattttgaaaaacacataatttatttttatttaaattcttttttctttttagatttttcataattggtatttctatgtcatacacaataaaatataaatttacaagaatctatttatataactaacttattgtagcacatttggtaaattctcctaattctagtaaagtgacattagttcaattttttagatattcactttatagttttatttatatatttatttattttgtatttgaatattttttgtgaggttataatacataatatatatatatatacatatatatttcattttgtgcattggaaaatttttaaatttaattagctaaactttttaactaaatgtgttattgccttacataaccacatgtttggcttagtcgcgagaaagtgactatcagacccgaacgtttcatccaactttatttatgggcagtctggttgatctacttagacccagtgaatgggtcgtcattcttaacgggcttatttgaataaccagaaatacagattaccctcgccttcggggctcaggagtcacagaggcttgcaaccgccatctggatttgtcatcgcatccggagctgtgaacaacctgggtctttagagattctatgaatagattgggagtcacgaaagcttatttgattattatttattactacatgtgttattttattcaattaagcccatcaagaatgatgggcccattcactgggtccaagtagatcgaccaatctacccataagcaaagttgaatgaaacgttcagattcgatagtcacttactcgcgactaagccaaacatgtagttcgggaagacaatcacacgtttagttgaaaagtttagcctattaaataattttaaatttctacaatgcacaaaataaaaagataaaaaaaaatgtatattataacttcacaaaaaattattcaaatacagaaaaataataataaataaataaaataaaactttaaagtaaatatgtaaaggattgaactaatgtcactaaattagaactaagagaacctaccaaatgtgctacaataatatagttatataaataccaattatgaatattctaaaaagaaaaaaagaatttaaataaaaaatgaattatgtgttgtcaaaatgtgatagtttatgataagtttagataagggaaaaaaaacaaaaaaatacaaaaaaggaaaaaaaattacaaaaatactttgggccggcccattaaacatttatacagtccacatacaaatatttataaaaata

SEQ ID NO: 110697 - DNA, 4015 bp, Cannabis sativa
aagtgtaactggtttaatctatcattcctgtggttgagttaatatttagatttcctaatgcatatatatgtttgtctaggttccagttcagctacccttgatttctgctctcagcagactaaggatatcgattcctccagatctgcgaccattggaagcaaggcaaagcattctgctcgcagtacaggagctgggaactcgttttccccaaggtcttcctaagttgaatcctgtagcggtaactatcagatgtattagtgttattttattgtagaccccagaaaacaaatacggatatccattttactacatttattacatttaggaagataatcattacagcattatattaaaaatattgccatctttggattgtgctgagatcaggacatgggtattgaagatcctgagattgtcgagttggtcaaacaaattgaggagcttgaaaaaaagctatattcacacccgcttcataaggttggttatttaaaaatgcctttgaagaaaatactcttgaggtgtttttctcactgttattctttgctgatgcagtctcaagatgtagatcaaattaaatcatttcagaggaaagcagaggtgaatcatgaaattcaacaactgaagacgaaaatgcgtgattctcaggtatgggtttatatggatactgtgtttagctagttatgattggaattgaaattgtatcgagttcaataccctactaggtaggtagtcaaaattgtttcttgaaagtcaacttttttgatgatgttttgtcagatttgactttttgtctaatataattatatgtcagtcttcaataattctattctactaaaaataatggttgtacatttgaacaagatctccttttagactagttttctactgattgtacatcttcgtagtgctattttcatgttcaatgtcaatatttactttttcttactcttgaaagtgtgtaatttcttgggcacaagaaagaaaattattgtttgtctggttttggaagtgcacaatatgattttggtgtgctcatgcgatgcgattatttaagtgtcctatccatcttgggaaacaaagaaagtaaatgctatagtacaaacttgttagtctgactatagtgctgcattaatgctttgtggaaagtgtcgccaagttttttattttttttttcagtttttgtccctttttcctttgggctttggccttttaatttaagtcctcatgtttacagcttcaaaaatttcgagatgagcttaagaaccgatcacgagtcctgaaaaaacttggtcatgttgatgccgatggtattgttcagttaaaggggcgggcagcctgcttgatcgatacaggagatgaactacttgttactgaattgatgttcaacggtaacctgaagtagcttttcttgttttaatttaggcttgcattcatgtaggctgcctgagcatgcttaaataatacacatgggaaattattttttcaatttatcatttttgcatactgccacttgttcaattttgaattatttataaaaaatgcttgttgatcaggtacatttaatgatctcgatcatcaccaaattgctgctcttgcaagttgttttattccaggagataaatcaaatgagcagatacagttgaggacagaacttgcagggccattgcaacaactccaagacagtgcgagaaggatagcagaggtattgaattattttatactctgattttctttttgtttgtgtacgagcagtgtcagttacttccatactgtgcagatacaacatgaatgcaaattagacgtaaacattgaagagtacgtggaatcaactgttaggccatacttgatggatgtaatatattgctggtcaaaggtcagtttcgcacattcatttttgtataatttatatatgaaaatttgaggggtagtgattgttttaaatcattttctgtagggtacttttagtacaggacctcccacaattttttagggaatttcatgtaatttaagaagactaaatcaggatttaaacatctagttgcacatatttgaattccaattttgacattctaaattatctggaatttctttaaaattgtaggttcccctccaacttatccatgtactaaaattagcaaaatagcaaaaatacctatggatggtgattaaaaaatcactgctatagtggcacttttatataagtgtgtctatatatatttatatattcttttttaggagaaataaaaacttttattaatgataaaataaatggaaagaagaggataaggtatacccgaagaaagaaaaacagaaaaaacaaaagagacaagtgttttccattgaaacttgcacatatatatatgttgactatggtgtgttcatactattcctacttgaaaagatttggagtccctcttttcatttgatggttgattattttaattgactagggtcttgattttggtgttgtaccagtttgtctggcgatggttaattatttatgtcctgtctttggtgttgaattactcattattaggattacgagatgtcatttggttgctttagatggttgaagtgatcactttgattcttttaatatttcttgctgactgaattagtttctgtttttttcttctttcagggtgcaaatttttcagatgtcatacagatgactgatatctttgagggcagtatcattcgaagtgccagaaggcttgatgagtttttgaaccaggtaagatattctttacagtagaaatcctcacgtacttctttctaatgattactcctatatctacattgttcaagaactatacttgaggctgaatcggaataaatagaaagaataattaacacctttattagtttatggtagaggaactccttaaggagtctcggccagctagccaactaaatgattacataataacagctcaataaattgcattctagtcatctgttggcctagcgcatggcctccctgaccaatgaccagggtctttattcttaaggatcatattagaaattactgttagactttgaagtaacttagctctgagtgtgataacataatgtatgtgccaaacacctgcaatggagtgtgtggtgccacatgctgaactttatctttttgagtaaaatacggagtgatggatgtgcaccatctatgaaaaatgtctacgctagggttagtttttctgtatatacaatattaaaattatttcgccctgttttttctatttcaagttacggggggcagctcaagctgtgggagaagttaatttagagaacaaattcggtgcagctagtgagagccttcgccggggtataatgtttgcaaactccctctatctttaaaatctcttcctggagggcggcagaataaaatcctagtgatcttggtttttaatgacatctacagtagcgaatgctcattctgctgtgtgaagtgttgttgtagttaggttggtccttattctttctttttgcatccaagttttgttttgttcattttatgacactgataatgcttctattgctctctgttcaattgttagtttacactgtatacatcctagattggatcacaaggattccattcgatatatagttgtagaatagtttgattatttttgctggaaatgtttgaagtaattttgtgataaacgcataaaagataggaggattctaccattctcgtgttctaggcctttgaattctaatattatggttgtctgaaatgtcaatgcatagtgctagtgatataatatgagcaaatgtgatgtctaatatatgaatgagagcaaaccatttaaaaaaactttgcaagactgcaaaagctcaaatcgggggaaatttagaaattgggtgggggggtgaaattttgatgtgctcttataaaaatagaaaataaaaatgtgttttataacttttatttttatttttattttttgattttatttaagtagggttcatgttcgggtctgacgctgggttgtgatctgagtttaggact

SEQ ID NO: 110698 - DNA, 2995 bp, Cannabis sativa
  modified_base (2892)..(2892): a, c, t, g, unknown or other
tgtgttgttcttttctcttcaatgtatttctgatgtggaattgtaatgtaggtgccagcattggaacacaaaaatgaagtcataggagagagtttggacttgatcaaatatcttgacagtaactttgaagggccttcactttggcctgaatatgtgagagtttgaagctgaagggcatattttattattatcattattattagttttgatattgaataaatgcaaactccacaggatcctgcaaagaaggagtatgcagaggagttgctttctcatactgacacattcaataaatctgtctattcttcattcaaaggagatgtgaatgaagctggtgagctgcaaatttttcttttcttgatgctgtttgacttggaaacaaacaatttaacctggttattatatgttgcaacagtttctgcatttgattttattgaaactgctctttccaaatttgaagatggaccattctttcttggtcagttcagtctggtaatgtggcacacatttcaatctcccttttattaaaccaaagttcacattactcttttcatgaattatttactaatttcttttttaatcttcaggtggacattgcttatgcaccattcattgaaagatttcaacctttcttagccgaagtcatgaattatgacatcactgcaggcaggcctaacctgaaagtttggattgaggtatgaatgtatctaaagtagaattcctttttttttatgcagtaaaacaaagcatatatctcaaacttcagctgtcacttgcataaagtgatggagccaaggttaaaatataaagggggccaacattttttcttttcaacaagaattatactaatatacatatatatatatatattatatatccatatatatggaaatatctatagtatacactttaaaggattgtttcagtagatctccttaattgttttgacatttagcaagatttttagtctatttttttaatggttgcgtacgttgtacctatttaggattacctgtaaatttttgtttttttttgaatatttcacattgccggaaataaagttcaaacagttgcttaccacgcgtaacgagtataagaaaaaagagtcacgcatgcagcaaaatatttgaactttatttttgatactgtaaactattcaaaatattctcaaaatttacaggtgactctaaataatacaatatacacgcccataaaattaaattagactaaaaatctctcctgatactaaaacaaagggatagacatagacccctttaggagggtctactataaaccttttttatatatataaactattttaatatctattttttgaaagggagtcaatatatcctttaccacaatctgtccccctagttctgccattgcttgcatagtccagactttgagacttctcttgaagttaagtccaagtctaataatcctaagcattgatagcaaagtacttttagatgagcacaaaagggtagggaagtgcatctctaagagtgaagtgtgctctgagttttattttccctgaaactgaaactgcaaagagtgtccaaacatagctgttgatcagttgcatatgggactcatagatcccagttgatcagcaactcataagctccacaacacacttttagtttggttgtttattgtaaacgagtttcaggctgttcaatattatcatgttttgcaggagattagcaaagttgagggttacaaaccaactcgaagcgatcctaaggagatagttgcttccatcaagaagcgcttctcggtaaatttattctcaccactctctcaaattttgaaaaggctaataggtttaatgcataaattaactaaggcaggtctaattctttgccaaatccttcactactatgcagatgtcaaactgaaatcggtgcttcaaaccatggtcttttaagatgttcttatttggcctttgtcttcgagttgtagctatagcttagaacagctaaataatgaaattgtttataagttgtaaaggactaaataatgctaactcagtggccattgtaataatgcagttgaggagatttcatctgtgtcttttttctcttctgattattgatcgtttttgtccagtctaaatgaaaattggccaggcattggtttaagaagaaagaaagtgcttatattgataaacattttctaacgtacaagtaatttgttttataaaataaattttaaaataatcttacatctattttgcataaaattcatataaaaaaccagatttatattgagtgtaaaagaaaatataaaaattcatacctttcacagggcccttacttctcatgttgaaacttgaaacttagtttgtttggtactgctgaggaaaaagcctcacaccattgtcatcaattaccattttctccatcttacacaaaacaaataagaaatccaatttcaacactcatgagattctaaacattaaataaaatacaactgcggtttgtttcttaatttcttatgattttgacaatataatttttcattatactagcagtctttttccaagcaaattttgtttctttttttgcaaatgtcacgttgaagatacttgttatctttccttttcatttcttttatctttttcctattttatttactactacttttatcttaaaattgtatttttttttacagatattatctttcattttaagatttttaaaatctctttataatttaacattatatatctttattattttttggaactacaacatttcttataaagagagttctatttacactccataaaataataaatacaccatattattaaaaaaaatatatgaatttaaataatttttaaaaattactcttgatatttttttaatttttttttctcacatnattttatattaatttcaatacttatttcgattttattttcataatctttttaactcatgtatacatatttttatttttttctaaaaaaatttcatataatttt

SEQ ID NO: 110699 - DNA, 7887 bp, Cannabis sativa
tttttattattatttttaatattgtgatatgttcaattttaatattcttaaattttatatttattttttgtatttttatttttaatattgtgatatgttcaatttaaatattcttaaaactttatatgtattttattattgtaatttttaataatgagagtatgttcaattttaatatttttaaattttatattttgtttctcaaatttttaaaactttaaatattgttttttaaaaaagaatataaaaaaacctagtatatagatgaatgtccataattaattgtatatattatatatatttgggatgggtggcaagtacctacgccccagcatgagtacacttcatgatagtgttgccaccactaatgtttttagctattcttatattaatttataatatcaaaagtaaaaataataataataaaattatattattggcgctcttgtgacaatagcatcattataatattaagcattgacgatatttaatactattattttatgagttattaacagttttttagttattaaattaaattatgtttcacttaatatttttagtaattctcctttaacatgcctgaattaatgtatgtgattaaacatagaacaataaattaacaaaatttataataataaataatgggattgtgagtcaaggatgcataataattcatattaatgtgaaattggaatatgaaactaattaacaagtatatggaatgaatgaatagattgtaataaagatgatggaacttgttcatttgactttctaacattccagaatacgacatatatgctagatctggttaggaaggaggggcatgtgggtggatggatgtggccccctttatcttttctcttcttcaatttttataatattttgtattttttttttttttttgtaaatattatttttattgtgtatttaattaaattattgatttaacttcctattttattaaataagtaattaaaaacttttttttttttaaaaaaaaaacaaaccctctaaagtgtaaactgtacacccggcctgttatttctttctttagctttgctaccatttcaaccattatatatgttaagatatttccatctttatttctccaaaaaaaaaaaatctctatctttactttttttcactattacgtgtctcaatatttttttttattaaattacacaaatttattctaatttgtttagaaattacaaaaacttcccctaacagaattttcttattattattattattattattatttattttttttgttttttttttgaaagaaaagtcttattaacaaaaaaactaggaactacaccaagttaggaagatcagctgtacaaaaattagctaaccacctaggaaaagaatgagtaaaatttttagtggttttagttgcaaggcatttccttgctaacatattagcacactcattattgtttctatgaacatgaacaatggtattacaatttaaactctcccttcgcaacttgatttggtgaagtatagtgttgacagcacgtaaatgagtgtcttggttcttaacagcatccacaatttgcttgcaatccgactgaatctcgatggggctggctgctgtgtccggttgatttttgagagcttccaagatggcccaagcctctgccatttcaatcgaacagcacctatgacagtagaccataccagcaagcaaaattataccttcctagttgcgccagataaatccagtacctacaccagcagctcccatttgcatggcagcgtcacagttgacgacgatgtgtccagaaggaggccggttccattgcttcaggtgaggggattccagagtatgcttcttgtcattctgcaccaagggactcgatcctgggtaagctgagaagacccattcgatcaactggacaccattcatgacctgtagattgttccatttcctgttccggttctcccaaatggcccacataattttaatggcatcttcaaactcactcatgtttagttgtgcctttaaagtcaccaatatatcaaacatagaccctttgttaatatgttcacattttttataccaagggacaagtttccaaattggtttaactttagcacaagaccatagtgcatgagtaagagtttcagcttggttaccacataaatcacagctaggatgaacagtcatacctctatgggacaagtttgtttttgctggcagccaattatgacaaacccgccacccaaaaagcttcatctgaggaggtagttgcatgctccacatcatcttccaccatttgtgaatgtcttccatattagagcatctagtgggatgtatattgatttctctaccaatgcgataaccactcttgacacaatgtaatttccatttggggtaaacggccatatcaaagtatcctccatgtataagtctataggaattccatgaatctaagagatgtcctcctcatggaagtgttttttaatttcctccagtttccataggccgtctgtattgatgaagtggtgaagtttagtgtgtggttcaatcccaggcctttgtaaaagcatggcccccgagggccttggtatccatttatcttcctaaacccgaatctctctaccattccccactctccaccgagccccctcttgcaaaattttcctaccccaacaaattcctttccaaacacacgatgcccccggaggacaaccagcttccatgaaggatacatttggatagtagctgttctttaacacccgagctagtaaagattgaggactatggataagtctccacccttgttttgccaaaagagcttggttaaattcattgaggcttcgaaatccaaggcctccttcctctttgggtttgcagagtttgtcccaagaaccccaatgaagctttttattatcttttgtatccccccaccaaaaattggcagcaaggctatggagacccttattagtttcttgggaagacggaagcaactcattgcatagctcgggattgcctgaaccaccaccttaattagaacctcacggccggcttgggagaacatagaagccttccaacctttaagtttattccacactttgtcctttatgatctcaaacacctcttttttccttcttcccacaaaactatgtagccccaaatacttagcatgatgtgagacaaggcgcacccccaatctagtagcaagattttgaccgtgagaggaggagattcttttccccatacagacttttgattttttaaggtttatttgttgacccgagagtttggaataacgttgaaggatatgcttcatggtgtcacactcctcttcctttgcattaaggaatacaaagctgtcatcggcgaagaaaaggtgagaaactttgactctatccctcccaaattgcaccccatttatgctcccagccctttcggcatcatggataaggcaagaaagaccctcggagcatagtaggaaaaggtatggggagagtgagtccccttggcgaagaccccgtgtaggttggaaattcctgttcttctccccattaataagaaccgagaaggacacactttttacacacctcattattttctcaatccattgctcctcatatccgagacccctcatcattgtgaccaagaagttccattcaactctatcgtacgccttggacatatccaacttcagagccattttattcccattgccagatctcttagttttcatacaatggagactttcaaacccaactatggcattatcttgaatgagtcttccccctataaatgcactttgttcctccgagattgcttagtggagactttgtttcattcggccagctaggcattttgccactatcttatagatcacattgcataggcttattggtctaaattcagtcatgcgagttggtttaggaacttttggaatgaggcataggagtgtgtcattgatgtccttcacctgcatcccttcattgaggattcccaaataaactttagtgacttcgggaccaatgagagaccaatacttcctatagaataaacctggcaagccatcactaccgggagctttttgagggtgtatggcacgcattgcttggaagacatcctccgatgagaaaggctccaaaaggtagtcattggtagctcgggagattcggttaggaatgagcctctaaaattcttgcaaatcctcattagtagcttgacatgatgtgtatagattcttaaaatagtcacaagccactttccccatgtttcggttccctgttacccaattaaagttgtcatctaccagccctttgattgtattttttgcctttcgattgctagccttgtggtagaaaaacttagtatttttatctcccactttcatccatattgctctactcctttgactccaaaatttctcttctttgtcaagcaaaatgttttgtttgcgttccaattcctgtagctgttgccattccattgtgttggtacttcgggtcaacttataaattttctcctcatattccttattattattattattattattatttgaaatgggaatgttataaatttctatatataactaaatatatcatcattaagtcaactctttgtaaataataggaaatttttttaaaaaatatttttcttttatgttttatttacaatgttacggtctaatttttttaattacaaaaatatactttgtttagcaaaaagtgaaagaaaaactaaaaaataacaaaaaatcaacctcattacaactataaataaattataaaacaactaaaaccaaccataaaacaacctcatgatactataataatacaactataaataaacggtatataatttttactggagaaatatttttgtaaataaaaatgttcaaagaataaaactaaaaagtttttctgtgtgaacgtggtttcataatttttcggtctattatgtaaatttttttaaataataataaaaaaaatagtaaaattaacatctaagagactcgtgaggaaaaaattactagtatcaagtagagctatcaattcatgtgtgtcgtgccggacttaattggtattttgatgagtttgtaataatatgattgtgtcatgctaggccataaaaatatgaatcctgttgtaccgtgccgaaaattttataggatataatttagtatttttatgtcgtgctcagactcgtgccaaccctttttcttaaacagacaatctcatttttttatagaggctcaaatttgtgttccacatttttattaaaattaatattaatgatctaattactaaattatatatatttgtttattttcattttatataattttaattatacacaatcatataaaaaaaataattataattaataataaaattggaatttttactattattttaattgattataatttataaaaaatatttaatattattattaaattatcaaattttttaaagtgtcgtatatttgattattttttaaattataattagtttatttgtgtttatatgttgtatttttagatttatcgtgtcatacttacacatatattttgcatattaattatgtcgtgccattttgtaatattatgtcttatcatactcaaactcatatttttgtatcaggtcgtgctcatgtctcgtgtttgatcatgtggtcaaaaagtccggcccatatttataattatatagtctcatactaacaaagaattaagagcattaaaagtgatattttcaaatcaatattttaataaaataacaataaaaataaaattcttcacccaattttttttttaatacaacttttaccgtttacatttttttttttttttataattaataatagttttgagtagtttaattatgtgtgcttgttgtgcttgtgatttttttttttttaaaaaaaatcatgtctgtttgtctaaattttgatagcttttagaaattctagttacatagtaaaattattgctgagttgtgtaatttagtcaaagtaaagtggggagattatggtataaaaagactttcttataattatataatttttttttttgaacaattattattgataatattttggtgaagaaaagtatcatatactgatatactgctataagcctacactctataagaatagcttccgttgcctctcttttcatcacactcgttctgttctaccttgcttcaattattattatactttcttcgtcttcatcttcatttctttacatcttttgtttatgattcacttttcttctgcatatttctaattcgttcttccactccatgatcttcatcaaaaactcatacgaaatcatatttatctagtctgtgaaaagcctggctcacttcctcaatattttacctattccttaaccaaaacatttataaaagccttcaaagcatgtagtaatatctcttattatctcttctttctataaaaccaaaaaaaaaaaaaaaagttttgatgtttacatgtttgaaatttatatttacaattctctaagtaattagctataattaaattcagtatatagttatactacccaacacactggcggtagttaattcaattccttagagaaaacctttaaaaaaatctttaaaaacatgtaaagtctgtcctttcaattcataaatttctaccctttttatttattaataaaaaaaacccaaaaaaaaaaaaaaatagtctcatcaaagatatcaaaacattagaaaaaaaaaatgccagaaacagagataggatcaccaacggcagcgtcggctccggcaactccagggactccagctccattaatatcatcatacagaatagactcattatcatatgatcggaaatcgatgccgagatgcaagtgcttgccagtgagcgccccaacctggggtgagcctcactcttgcctcaccgatttccccactcctaatgtctcgctcactcgcaaggtacacttaaattaaattaatatatttatagaaacagattaattttacagggccatggatggactatgattgttacattatttataagaatatgtgtatatgcagctaggagcagagtttgtgggaacgttcatactgatattcgcagcaacagcagggccaatagtgaaccaaaagtacaacggtgcagagactctgattggtaacgcagcctgcgctgggcttgcggtgatgatagtgatactgtcgacgggccacatctcgggggcccatttgaacccgtctctgaccttagctttcgcagctctgcgccacttcccttgggcccatgtgcccggttacatcttggcccaagtgtctggttcaatctgtgcttcctttcttctcaaagctgtgttccatcctttcatgtccggtggcgttactgttccttccaccagcctcggccaggcttttgtgctcgagtttgttattacctttaatctcttgttcgttgttactgctgttgctaccgacacgcgcgcggtacatatatatatatatactcatttaactacttctttggttaattaatcttatcaaattaataagaatgtgcgtatgttttaataggtgggagagttggccggtattgcagttggtgctacagttatgctaaacattcttattgcagggtaacattctttattttcttcttttgacactaaaacttatttgttaagtaaatagattttaggtgacattattactaaaagctcgaatggttgttaaaacaaaaaaaagtaaatgttggttggaatcagtatggagtaatgatactgatgacagcatattatcacgaaaaattaggagtgttcgcggtgcgggtggtgcagtttttaaccattttttcaaaccaacccgcacatgcagttttttaattttccaaaccgcacc

SEQ ID NO: 110700 - DNA, 19472 bp, Cannabis sativa
acttttgctagtatatatatatgtgtattagtgtctttttttaagggtaacatgtattatagtttttactttatatgattggatatttttacaatacacattttaaaaagagatttaccgatacaccttatttatttcggtatttgagagatttttttagtttaatttctttatagtcgtatatattgtagttatttaagacattttgtaaaattttaaaagattcggaaaaattaaacatgttgaaaataaggttcaaacagtctattgcacgcgagactcttttattttacatgcctgttaaatagattgtttgaactctatttttgacgtgttaaatttttctaaatttatcaaaaatttaaaaaaaatatcttaaataactataatatagactgccataaaaaagtttaaactaaaaaattttacaatatgttgaaacaaataagaatacatcaataaattatttttaaaggaatgtattgtaaaaatatccaattacgcttaaacaaactaatatatatttagttggattaggtattcttttaagatgcagattatgaaaaatatagggacgattttgttccgttagtgtattttaaggggatgtattccatgatgtacgacaatcgttagatggggtagttatttgatctgatggctggggttgatctaggggtaattagggttaaaaaaatggtaacgtaccctgtaacccattacaacgtaccctgggacccataaataaattcacacacattattacttaccttgagacccatcagccgtacaatggaatacattccgtgttttgtatttttggacacaaaatcggctcccaaaaaatatattggtagatctctttttaagaagtgtattgtagaaatttttaataatttttcaataattaatatttatcatagtagtgtattaaatgtgttactatttattataaatagtgaaaataagcattaaatgctaggcaagtgacatacaataatagactgtgggaagaaaaagaagatcgtatattctgaccaatatatttatttatatgtttgtttgtatgtttcaattcaatttttacaaatattttcaatttttacaaatatttttttttaaaaaaaaaaaataataattaatactgcagaattcaaaaacatatttaattaattaataatacatcaactaatctacattcaaaggaattattataattattaattatcaatttattattatgggattctaatagtctaaaatttaacaatataaaactttaatgcactaagaatttatggttatcaaatttaattaattataattagttttgcatttatttgtttaatataactagagagccttatttagcagcaaaccctaaaacaacttttttttgttacataatataaaaacatagtgaagtgtcataatttactaaattagaaagataaaaatattgaattggttaaaaaaaattaaggtatttttttaattttatacttcaaaaaagttttttttttgtatctttacggaattccacacagaaactcctatagtaattaacgaaacaacttaagttgtaatcaaaatcggttcaacaactcacatagaaactactggaaaaatccaaatcgtaattttttttttttcaaaaaaaattaaaaaataatatataaaataattcctcaaaaatgaaattagaaatgtataataaaatcatatataacaacaattgtagcatttaaaataaaaaaaatggttgatgactcaagcaatatatatagtgctatttaataaaaataatcattattcaaaaataaatttattaaaaataatagtgtggatttgagcttaattcacctaccttattatagctatgattaatattatccagtaatttaattttaatcatgcattaattaactttatctccattatagaagctcacgtgtctaaagtttacattcttttcttttaggttaggttatatatatatatagctttttttaccatattttttttcttttaaaaaagttaattatataggtatactttaattgacctaatttaaaccttttttattcagttctaatttccactttttattattacaagttgattatgaccacatgttacaagcatttaattaaataaaacataaaattatgttactaaaccaataaaaaaatatacatgtatatatattgtagttttctatgtatactaccaaagagaaaaggttagattataattattttggtaatttttttattgtggtaattttttttattaatatactaaattattatagcttataggcatggttttcacaaagtcaatgagacaaaaatagtgggtatgagtgtatgtgtactcacatgtgagattaatttctctatttccgttctaaattttaatttatttcttttaattattattattatttgtaaatgtcactatttattaactcactttcaacaacccaaaaataatataaaatttaaaataatttacactaaaaaatataaaaaaaaaaaataaaaacgtttaagaaagggtaatttagtaaaatccaacaaaaaaagaccaataatgagaagagcgcccgccaaaactgtcggttctctccccacgtgactggcacgtgacatttaattaactcacccaactcaactcggtctcaactcgctaaccccaactcagtttctctctcatttgacaattcaatcagacaaaaaactaaaagaccgaccgacacagagagaaataaataattaattaattaattaacgaaattatgaatttacgaaaatgcccttatgaagaacagctccaatattgccggccaccgcgacgaccggcggcaccaccgtctcaatcagctgaaaagttatgggtcccactagtgaaagacccaacaaagctgtaattaccaataattattaaaataaaatatttggattctgttaatttttgttatattaatatataataataataataataattatacagctaacaatttgttctttgatctataataatatataaaaaatgaatcttgatttcctgtgtttctgtctttgtctctcgtactggtgggccgttgaattttcaactctctctctctcttcttagattctctctctctataatttggcatcaacccgtgttacagatcgaaagttaaccaagttttcagagaacccatttgtgagaaaataaataaaaattgaaacttgggttctctcaagcaaagaatcatttacccttctacacttaatatatttccttttttctttttatttaattaattaatttatttgtttatttctctttctctctctttcattacactctgtataaagctctgttttttattggttctataatgttgggttggtgcttcttcttgtaagaagaaccagaagaagaagaagaagaggaaagctttgttctttttgggtttggtttttccccagtgatgggagaggttgagaaactggttttctgaagtgggttttcgtttggtttcaatttcaaggctgaaagttttaggctttggattttggtagcttttttgatttggctcaagttttttcggttgctatggagaccaaaggaacactcattgcgggttctcataataggaatgagtttgttattatcaatgccgatgaggtttcaagagtaagtcttctcatctttcttaacaccttgctctaatggcaatggagcttcaacaagtcctccaaaatgagtacccttttggcctttctgatgattttttgtgcttagatcctgaaattcaccaagtgaaaaacaactttgtaactgtttttttcccccaattatttcttaccttcaatatcttatcttctccttatttttcgtagtttgggttgaatctctgtcattactggtttttcgatagaagtttgattagattttgttttttatactcttgtgtgactttgttatcactttttgtggactcttatgcggctttattaagtagtgttgctgtttttttctcttgatttcagagctggtcaattattgaaatgtttccaagaaaatttctacttcttctatcttttgggctctaaaagactgttttcttttcttcctttctttcccttttccactaattttgtttttgcataatgaagctgaaaagtatccagattgatattgatatgattactgtgattttcaggtgacttctgtgaaagaactaagtggacagatttgccagatctgtggagatgagatagagttcactgtagatggtgagccatttgttgcttgcaatgaatgtgcatttccagtttgcagaccttgctatgagtatgaaagaagagaaggaaatcaagcctgccctcagtgtaaaaccagatacaaacgtctcaaaggtacaattttttgaccatttcttcctttttagagaaatcccatttcagttgatctgtttttgtttcttaagtcaatcccagatcagtgtgtgtaagtttggattggtttactgttactgaattgtggttttgactttgaatttagggagtcctagagttgaaggtgatgaagaggaggatgatattgatgatttggagaatgagtttcatattgctaatggtggtggagatccaaacaacattgctgaggccatgctcgctgctcgcctcaatgttggccgtggtggttctcatgtcaatggttctgggatcaccacaccatcagaggtggattcagcttctgttgctgctgatatccctctcttgacttatggacaagaggtgaattgattgttgcttttctcttttcttttcatgaatatggttcttatgaactgaaatgactgatgattatggttaatattgctgtgtaggatactggcatttcttctgataagcatgctcttatcatacccccgtttatgagtcgagggaaaagggttcattcagtgccatatagcgagtctggatgtaagtttttctcgtaaaatttgattggatttgcagctgttttagtttattgatatgaggcttgacggttaggcttttatttgattatgcagttcaaccaaggccaatggatcctaagaaggatttggctgtatatggttatggttccattgcgtggaaggatcgtatggaggaatggaggaagaagcagaatgagagacttcaggtggtgaagcatgaaggtggaaatggcggtgatgatgggagtgatccagatgatgctgatttacctaagtaagtgtttgatttttcaatccaagtgaattattgagtttaggtgttgaaagcaacacatctgtaatcttggaaagttagcctccatttcatggtaacttataaaagactagaagacaaaaataactaactcttacaagtggagttttctttcctatttcataaaaaaagttcatggaagttcataacattgctttttcttgttagatgaagggtattttcaataatgtccgtatttaattttggcatttagtgtggagaataacttaacaaaaaagatgagtaaagagttgctaatgttgtccaatttcttcttagaggggccctttttgtttctgttcttattcatttttcggttgttacttaaatatatatatttatagtttatagtttattgatttcatcacacttttcagaacttgttggatgatcataatgaagtttaagaagctgtttgactaaattacaaaatcaattttccaaaatttgataatgaaactttctttttttagttcatgcatcacttaatactccttcatttaactgtctctttagctattttcctttgttcattttggtaacattttatattaatgttcatttcaattttataggatggatgaaggtaggcagccactttcaagaaagttgccaattagatcaagcaagataaatccatatagaatggtcatccttcttcgtattgcggttgtttgcctcttttttcactatcgaattcttcaccctgtcaacgatgcatatggattatggttaacctcagttatatgcgaaatttggtttgctgtatcatgggtatttgatcaatttcctaaatggaatccaattgaacgtgaaacatatcttgaccgattatcgttgaggtgccaacttttctccctcattttctttccctccctttgatatttataatgtgaaaatgtatatgtatgtgttatgttgggcctttgttgatatgaaattctgtataggtatgagaaagaagggaagccatctgatttggcatgtgtagacgtatttgtcagtacagtcgatcctatgaaagagcctcctctcattacagcaaacacggttttgtccatccttgctgtagattatccagtcgacaaggttgcatgctacgtctcagatgatggtgctgccatgctgacttttgaagccctctcagaaacatccgagtttgcaagaaagtgggtccctttcgctaagaaatataaattagaaccccgagcaccggagtggtattttgcccaaaaagttgattatctcaaagacaaagtagatccaacttttgttagggagcgccgagcaatgaaggtatgcattctttttcttttacttgtgatatagttgatgacaaaaatggtatctttatctgatgttgtcaatgtgttggtacagagagattatgaggagttcaaagttcggataaatggattagttgccacagcaaagaaggtcccagaggatggctggacaatgcaagatggaactccatggcccggaaacaatgttagggatcaccctggaatgattcaggttagtcatccttgcttcatcaacaagttataagcttctcaagaattaagtgtgtaaaagtgttacttacatttaccatattgttcaggttttccttggtcaaaatggtgttcgtgatttggatggaaacgatttacctcgtttggtttatgtgtctcgtgagaagaggccaggttttgatcatcacaagaaggccggtgccatgaattcattggtgagcctctctctctcaatttggttattaatcatcttttttatttgattatgtatttataattacttttgttaatgaatacagataagagtctcagcaatcatctcaaatgctccctatatactcaatgtcgattgtgatcactacataaacaacagcaaagcacttcgtgaatccatgtgcttcatgatggaccctacttcggggaagaagatctgttatgtgcaatttcctcaaagatttgatggtattgatcgtcacgatagatactcaaatcgcaatgttgttttctttgatgtaagtgtctcgacattcatctattgatacatacatttccttaaaatgccttaatttttatgttggtgggaggaaaagcttattctttttcataattaaatacagatcaacatgaaaggtttagatgggattcaaggaccaatttatgttggaactgggtgtgtgtttagaaggcaagcactctatggatatgatgctcctgccaagaagaagtccccaatgagaacctgtaattgttggccgagatggtgctgcatgtgttgtgggtctaggaagaaaaccaagaagccgaagactgacaaaaagaagtcgaaaagcaaggatgatacaaagcaggtttatgcgctagaaaatattgagcgagtagaaggtaaggggcaataacatcctatttcaagaccacattatttccattagttttctttattcatgatatattttgttgatgacataacataacattaatctgttatttgaactgtcttttcagcaatagacaacgaaaaatcatcgctgatgccccagacgaaaatggaaaagaaattcggtcagtcaagtgtatttattgcttcgtcgctaatggaaaatggcggtgttcccaagggtgcatcttctgcttcactgttgaaagaagccattcatgttattagttgcggatatgaagataaaaccgaatggggaaaagaggtatgcagttgtgtatctataattaaaattttgaagggtctgcaagcatttcttttaacagaaacttgacatttaattctgttccaggttggttggatttacggttctgttacagaggatattttgactggcttcaagatgcactgccatggatggagatcagtatattgcattcctaaaaggcctgcatttaaaggttctgctcctatcaatctttctgataggttgcaccaggttcttcggtgggctcttggatctgttgagatattgttgagcaggcattgtcctatatggtatgggtacgggtgtggcttaaagcacttagagcgcttttcgtacataaactcggttgtttatcctttgacatctatcccgttgctcgcctactgtaccttgccagctatatgtcttgttaccgggaggtttattgtccctgaggtaatcatctcatcaagtctattttttatagtgatgtttttatattgtcctttcttagttgcattttcggtttgtgctaattacaaaagctttttgatttggtcttctacagattagcaactatgccagtatccttttcatggctctctttatttccattgctgtaacaagtattctcgagatgcaatggggaggtgttggcatacacgattggtggaggaacgagcaattttgggtcattggtggtgtttcctctcatctttttgctctcttccagggtctgcttaaggttttagctggtgttaacacaaactttaccgttacatcaaaagccgcagatgatggagaattctcagagctctacctgttcaagtggacaactttattgatccctccaatgactttgcttatcataaacattattggagtcattgttggaatttcagatgccatcagcaatggttacgattcatggggtccactcttcggtaggctctttttcgccatctgggttattcttcatctctatcctttcctcaaaggtttcatgggcaaacagaacagacttccaaccattattgtggtgtggtcaattcttctagcatcaattttctcacttttgtgggttagaatcaacccatttgtggctaaaggtgatattgtattggaagtttgtggtttggactgtgactagaaaaagatatacaacaacagaacagaagggttcatcaaaaaggtttgatttttatgtagaaaaaaaaaaaactgtgtagaaatatgcacaagtgtaagattttttcctttttctttttattttttctcttttcgggttgaagatgaaggcatccctggacaccgtaccgaaagaaaaatgtcatcttggtaaaagatggaagtgcagaagagttagttggttggggatgcatgtagatataaaaggaactggaatctgacacattgagatttgttttgcaaagtttttcattttgattctttattatacatggttgaaagggagattgtactcaggtcttgtctgtaatctcaggagagagcatttagtccccattttcttaatcttattattataccttttcctaataagggaactcaaaattgtatgtctgtctacaaaaggggagagattgtgtttgaaaaagttcatgagttcccctaaacatggaattatttatatgttgctctctttcatttgtatttttgtatttttgacagaaaaataaactgcaatccaagtgatgtaattttcagaatattcattttatatctcttgtttggatgtttatttatttattttgttaaaataatgaaagttcaatattttataccttatgaaactcattgtttctacaaagcacaaatcgaagcatttaaatttgtaattattacacaacagaagaatactaatctaaattagcatacacatcaatctaacactatctaaattctgcatgagatatgccagaattaatttcaaatctctatgcatcatctaatattaattaagatttcagttaggtttcaatgaatgcctaaatattcggcaaattctccagagggcgtctcttctgtgattttttcgaggctgtaaagctgctgaaatgttccctcttggtgcttggcatgttctctttcatatcatgagaaatcttgagattctttggagttgctgggactgagaaaatgttattctgtggtataatagtagaatcacttatggactccttactataatcttgatgtgattccaacttcaggagccttgatttagaagaaactgcaaaatgagatcaagggccaaagagttagaccttatatttctgaaactgaagtaaaagatactgaagtattaagcttaccggtccatggagttgaagaaaactggtccacatttgttcctttcagttctgaatcatctttgttcacaaaaatttcttcttgctttgaatcctcagcagcatctatagaactctcaaacccagcagatacacctttattgtgctcaaagcaaccgccaacattacatttctcttctgtgatgttattttcaatgatggactcatccaaagcagcggcataggaacttgttacctgtgcttctgacagatcattgctaacttctgctgtcccaaccatgccttcaactacattttcattttcctcctgctttagatcaccacacaattccgctgaggaaatacctgagaacagaataacaataactcaatatttttaaggaaatatttaactgagacatacttgtctaggggtaggtgatgattaaatatacattacctttctctgctgaacctccattttcactgctgggctcatctgaatcagcagtaatattagtagtgtttccttctgaaatattttcattcaactcccttgtctctacaataatctctgtagattccttaaactcgagtgcctcggattcatgacagacagactcctttgatccctcgttttcatagatgagctcatctaaagaagtaaagtgattttcatgctgaatctgaacttccacaactgaagcagaaactgttgaaatactaactacagtatcttcctcatttttcacctcctcactctcaggttcaaatgttttgctatcttcgaaacccaaatttagctcaaaaccagtacttaaagactcttcagcatcacactccactgccttgtcatctgttttaatttttgcaaaaaagagattagtagctacaattaatcaaacaattaactgtattaaaacagatgatgagttgtactaaccttgaggtgtcaattgcattgattgactagaaagagcaatatctgagcattgttggtcacccttttcaggttctagaatttcttccacatctgcagtgtccttggatgcaccagaatatattaccactttttctagaacttctgcatctacttcctccgaactaatcttactgtcattgctactgaatagattgtgcagatccatacaaataccactgactcctcggtcagttccaagttcattactttcttcaatgaatgaatctaaattgtttagatccgttcctacagtaaaaattaaaaaaattgtttgtaaatatttaaggttaccaaattttttatttgatttgttaagaatacacaccctcttcaggcttcaatattgagagttcttccacacatgcagcagtgtccttaaatgcaccagaaaattgcacagtttctgaatgatgcaaatcatgcatttcccgggtttctttggaattaatcttgatgttattgctgctaaagagattgctgagagacagacagaaatcatcagtcttgtcaccttcttccaacataattctgtggcatcttgaggctctatggtcagttccaaggtctttatttgcttctaaggatgaaccaacattttcaagatcagttcctgcaagaatgttagtaaatatttaactttaaggttaatccaaatttttatttgatttgtaaagtttagagaacacacccttttcagacttcagtatggagagttcttccacacatgcagcagcgtccttggaattaattttgctgttattgctgccacaaagattgctgagagccagagagaaatcatctgttttgtcaccatcttgcaacataaatctgtggtatcttgaggcttctaaggatgaacccacattttcaaggtcagttcctgcaagaatgtttgtaaatatttaactttacggttaatccaattttttatttgatttgtaaagtttagtgagcataaacacaccctcttcaggcttcataagtgagagttcttccacacgtgcagcagtgtccttggaattcagtttgctgttattgctgctaaaaagattgctgagaaccggggagaaatcacctgtattgtcgccttcttccaacataattctgttgtatcttgaggctccagtgtccttggaattcgttttgctgttattgctgctaaaaagactgctgagagccagagagaaatcacctgttttgtccccttcttccaacataattctgtggtatcttgaggcgtcagttccaaggtctttatttacttttatggatgaacccacattttctagatcagttcctacaaaatgagaaaatagaatttttgtaagaattaagttggtgcgtccatgttattgattgtttttttttttttggctaagttaaaaaacagaattgcatctgtacctttgtcagtgttaaccttctccacaacttcaacactttctgtgacaaaatttctgtatacgtgacaaggagagtcctttcctgctgccaccatagaagaagagttgtctatatagaaagataacataattagaatgttaatggaggatacaattcaaaacttgaaagatcgaagtaaggaaaaacaaccagctaatactatatgacaaagaaatcattctagaacaaaaagtaatgctatacaaacctgttctgccaattgtggtttctgctaatgtcttaacgtctgaggtgattttctcatcacaatcattctccaatttctgtggtgaaatgggtggtgtacctgtcaactcagtaccgtcctcaacactatcaaaagcaattctttgatccaagctcccatcaccagcttcatcagttgaaactactttggtttcttgagaattaatcaatacagaatcagggagactgtcattctgtgcttgaatttcatcttcactgagtgttgtttcagcatgaacactaatagcctgggaatttgaattaatcaatatagagtcagtaccaccgtcagtttgttcttgaatttcatcttcagccgagatatcattgacatcaactgcagtagcacccacaactacatctacactgactgtggtttcaacatgaacactctgggaatttgagatttcctcctctccaccaatatcaacttcaaaactctcagtttctccatcccctgatacagagttatcagatacccatgaaacattttcatccagatcttcatcattgacagagacagcaccatcttcttcctccagctctgttctttcagtgttcattgcacaagcttcttcatcttcttctccaccatcttccagcatattctcaaaaccatgctcagccacactatttgtctctacgccttctactgcatcactttcacatccctcagattctggttcactctcttcatgcacaagatgcatacgggtctcattttctaaatactcttggatgatggcacatgcatcctccttctcatcaggacttccactatccccggaaatcatctctttggaaacagctggggtattatgatctccatgctctccaagttgtctttcagaaacttcttcaacttgatcatccattgtcagattttcctcaacctccttgtcttctaaattggcttctacaaggacttcattagagttttcaactccctctttttcaccatctcctaaatccacaactttttcaaaacaagcaatctctgatgaaggaacatgaagctctgatgtttcattaagctgttcattcattgtcaaattttcctcaacctccatgtgcttcccattatcataagattgttcagctctctctttgtcaccatcagctaaatccatatttgtttctgaagcaggaagctctgaggttctattacctgtttccaaaaagttcaaaaaaaatgaggacttgaaataaaaactcaaattaatcaaataaaaaagacagtaaacattcatcgctgaattgccaaattgtagagttaaactacctagtgaaggaacaaagcactcaacactttgtggtactgcaacatcatttacgtcatcacttcgaacaggattgctttcaagcgcttcctcaatactacaatcaatgtctgtcactaaagcagaataatctgctgcaacatcatttacgtcctcacttccaacaggattcctttcaagtgtttcctcaatgctataatcaatgtctgtcactaaagcagaatcctctgctgcaccatcatttacatcatcaattccaacaggattgttttcaagagcttcctcaatactacaatcaacatctgttactaaagcagaatcctttgctgcaccatctttgtaattggcttggacttgagaaagctctaaagtagttgcatcaatttcctggtttatgtcacttgcagctccatttcctagaatcaaaattttacaaacttatcaagaacatgtaaattttcaaactaataactaaaaacaatgcaacagaaagtaacagaataccttcttcctttgtatttgcctcttcttctgttgtataaactgcgtcctcacagggattatgagatctattttcatctcctgcaatttagtggttatgccagttagttagtctaactcaaaatattacaattatttaaaatcaaaatacagtcaaagatactaaccatgggatggagaaacattcagcattgagccacaggagatatcaatagataactctactttcgaagaatactcctcttccaacttatatgcactatccatattcttatagtcaacttcttcatctgtccaagtttgtggaacttcaacatcagcatcagcttcagtttgtggaaattcaacatcagcatcagcttcagcttcagtttgtggaacttcaacatcagcatcagcttgtggatcttcaacattttcaggcccaactatagctccacggtcactgtcatgcatatcaagtgcttcattggccaaagtattgtccattctagcatcatctttgttaaggttctcaatttgcagtagagttggaataacttcagttgttgcctcctttgtaacttctgaagacaaggatccaatagcatctaaattcccgcgctcttgctcctcttgtaacttctctgacttatcttgaaacccaacttggtcatcgccaaacacaagattatcagcagctggtgaagcaacatgatggtcaatttcactagaatgtggttgctgaatttctagcacagattgtgtaatttcatttgatgtctccttcaaatctccactctcctgctcctcttccaactcctcaaacttatcttctacctcaactttttcattctcaaacatgagattttgagcagctagtgaagcaccttcatcctccaaaggaacatgattgtcaagatcactatgaggttgttgaaattcctgtacagtttgcaaaacttcgtttgacgccatctcatttgagttacttggagactcacacttctttccttccaactcctccagcttctcttccacattaacttgatcagccatggaaatgaaatcatgagcagaaaatgaatggtctctattcaactctgaagcaacatctttgtgatcaccaaaagattgatgctgacttgctataactttgtttggtgcacttggagactcacactcacttccctcttgcaacttctccaatgtaaaatgagaccgcgactctgcttcaacatcttcctttaacacaactatttcattgttatattccaaacatgttgtaccaattagtgtccctgccttctcatctgcacatcaatagcctcatgaatgagaaaaatataaagaaaatcgatgaactataaagcttccataaagaaagcataattagaaaaataaaagggtgggtaccttgactattatttgcattttctacatgatcctcttgaatactaactttgtatttctcagctgattgattatctaactcatcactcccttggttaatgtttttatatccacctgcagtttaaaagcgtattattagaaaacgctaagtattataggacctttgtttgacagaaatatataaacttcaccttcagaatcttcatcatggatagatgacaaatcatagtgtgttgtcttcttataatcaccacttgcattcttttccagcaacttttctgtgccttcttctactgtgttgtcttctacaacactattatcaactacagatggtaatacctgaatctgcatacttggtgcaagatcaatcactagatttggtgaaatatcactgaccaaacctggcgaaatatcaactaccaaatttggcgaaatatcaaccagttcattattaacagtagaaacctcagcagaaccaagttgattcacggtggcttgtgaaacttctttgctacataacaaatcaggctcatttctgcttgttgaagcttctacctcagccaactcatcaatcacaggtgactccttgacggacaaagcgtttccaggttcatgagcaatcactgaactctgtacgttcaacttctcatgcttcgtagcaacttctcccaatttgtcagatattttagataaaatctgactagaagcatcaagagtagacttccttgtaggcatagctgcaatgttagcacatctttttaaaggttcttcctttgatggattcaccctttcactagtctcatgagtagtcaactgctcattgttaatagaactatcagcaacagtaaacaatctagtattcctcctggtccttcttgaggggccatcaggtaataattgcttcatagtatcaccatcagacccagttttagaaacagattccacttctgtcatctttgatcttttactgggttccaaattcaacactagtccattttcaatagattcaccagcaaaagtttcacttgccactcttcccttcttgccagcaacagacttcctcctcaaatttctgcccaaccccttcaaagattcttcaggttgaagaacatcttgagaagccttctttgtttctgcaacagcatatgcaccaccctcaacatcagctttccccaaatcatcagtcaaagcagtagagttgtcatccactgccacctttttttgagacttgggtcttctggctaaacccttcaaaggttcttcaagttgaagaacattttgacattcattctttggttctgcagaatcattctcattaatctgagtcctggaccttctggtcctaacaccaacatcaatttcccccaaatccttagtcaaggcattagagtcttcattcttggccacattcatctgagtcttagaccttctggtcctaccctcaacaacagctttccccaaatcctcagtcaaagcactagagctttcatctttagccacattcgtctgagtcttagaccttctggtcctagcctcaacaacagctatccccaaatcctcagtcaaagcactagagccttcatctttagccacattcttctgagtcttagaccttctggtcctaccctcaacaacagcttttcccaaatcctcagtcaaagcactagagccttcatctttagccaccacatccatctgagtcctcttagaccttctggtcctaccctcaacaacagttttccccaaatcctcagtcaaagcactagggccttcatctttagccacattcatctgagtcttagaccttctagacccaactccaacatcaattttacccaattcttggctcaacgcattagagccatcatccttagccacattcacctgcgtcttggaccttctggtcctagccccaacttcagttctgctcacatcttgactcaaagtattacagccaccttcatcctttgactcatcctttacctctgcaacgagattctcctgtaaagtctcatccaccgaaacaaacctcgtcttccttgaacctctaagagaaattttcttgcttggaactacttctccttcttctccattcccaccagcttcaatcacaacatttctacctctcaactgcctaacaccctcttctttcttcccttcatcacactcagcagaaccatcaacaaccgaagacggtttatcacaaacatcaacagtttccttccctcttctccctctctttctcccagcaacagccaaagaaaccacctttgattcctcttcaacaacactctgccctctagatcttgttactctaacagggtttacctcaacattcttcttcactacaacattcttactcgtagccctcctcttcctcgaattcccgttcttcgattttgaacagtaatccgaatctgaatccagatccgtacccacaaaaacaaatgtctcattatcaggactaaaagtcactttcttaaccttcttatcaacatccaccgattgaatttcaccatcaatttcgcacaaaccctttgacccagaagcctcaccatcctgttgacaaaacaaaatttacaggaattttacatacaaattctagggaaacaaacagaaaacaaaattcaagaaaagggtaccttgagaagcaaatctagccgatccgccatttcacgattagtcaaattagctggaatcccatgagtcttgcacaaagcttgaagctccttcctcttcattgcatgataatccatctctacataccaaagaaacgaaatccaaagtctcttacaagaccagttttttggagttcctactgttcatgcgtttttgggtttttttgaaattgggtttttattttgaagaggcaaaaaattcaaattttgaatttggacaggtttcccacgctcctcctataaaacggctagtggttcttcctttcctattatattttaatcttatcccactcgcgcgagtgtactcgcgtgaatattacgacaggtataggataagaagggttaaatggtaaattggggaagtattagatttgaaaagttacgttagttggtcaattgtggaagcttcgttcagaagtttgggttcaaaatggataaaccaaggctttctttttttattattattattttttcaaaaataaataaatatgtaataaatttgagtatctccaattttcataaaggtgctacaaaattttatattatttaaaaatataatattttattagggaaaaaaacaaaaaaatacaaaaaaggaaaaaaaattacaaaaatactttgggtcggcccattaaacatttat

SEQ ID NO: 110701 - DNA, 3174 bp, Cannabis sativa
catttactaacatagtgttatgatttatggtcatttgctatatttttttgaaatgaggacataaattaatatagtcctatgatttaaggccatttactataattccatattcttaagtttttagaaaaatatcatattttgtatacttaaatttttatgccatatatataaaaacttgcattttatttctcatatttttgtaatagcctctgtacaaattaccttacattgcacttttttatatttttattgaaaaaaaaattgtttccttttacatttttaccatttatattttttttatgaactgtttatcaattattacaaaaaaattttatttcaattcaaactatcatttttgatattagtgtagtgtacgcaaattaaatttctcaaaattaattcaaaattgttgaatattctaaataactataattaaatgtaccttgttatacaatataaagagtaagcttatagtacaccttctaaagagatgttcatccgtttatttatgtatttaagaaaagaaaattagttgattttttttttaataaccatgttataattatttaagaccacctataaacttttaaaattttttgaatagtttataatgccgaaaataagatttaaatattatattgtacctgcaattaatttttcttatatacgtaataaataactatttgaaccttattatcgtcactataaactattcaaaattctctaaaaacttacatgcaattttaaataactacaacatacacaaacaatcatgaaaaatattaaactaaaattttgtctatatgccgaaacaaataaaaggttctaccaaaatactccatcaggagtgtaggacaaaaattttccaatacatacataaagattttattttatcgggtgtgtacgttaaaaaatttgtagtttagctcccgtgttagaatgtggaataagatgaatgagattccatctcaaaaccaattgacaatggaaaaaaataactcgttcatcttatatttaataatttatttttacacattaataacgtgagactaactctaataattttaagtaaatttgtgacaggttttaaataattacactttacaatgtcatataaaataatttaaataattatttgttactttctcatggtgccgaaagacatgctcctaccataaaaattaaaattgtctattcttttacccgagtcaaactaaatattgatgaaatgctaatctcaactcacaactcatttaaagtacaccaaaacatagtatgtaaaataagcgcaacacttgcatcaaaactgatttgcccagataactacaaggaaataaatgcattaagtaaaatctcaaactcaaacatacccatcaaaaactaccttctgaaaataagcaaggttaactatatctgactggatcgggctatctaaaatccatttgatactttccacaagagtgctaaaaagcagagtttgaagactgtcaaaattcataaatccatcactccatgcaaaaaaaaaaaaaaaaaatacttatttaagtaaatatttgacattttgcacgcactaacaacatacaaaagtcattttaaactttcttcaagatatttgaaaatggtatttacagaactgaacatttctcacaatagacaatgacactattctagctcaaaaaattgttgttgttgtacttatatttttcactagatttttaattaaaggctaaaacatctaaagttataaaaattgtttcctatgagttatcaatgatacaccatacttgaaaaattggacacacaaactgttctaaagtccaatgcaaggacaaggtttcccaaaattagaaaattatatataaataatacaaaataaaagtaacattgatcacaaaataaaagtacgttggaatgacatgatgattttgatgcaagtgttggaagtttcaacaccattgatcacaaaattcgattttcatcaccagaatgatgagcctaactaattaatctgcttcacagtcactggaataaccagtcactattacgaccctgcaaaagcaacggaaagatgactataaaatcatgaaaaattttatatatgcatatatatatatatatatatatcaaacttgaacaacttagagaaacaacccattaaaaatcgaattatctaatggaatatggagttccttcctcctttgctcgctcaaaatggaaaaagaagattaggcaatactgggagaaggtagtaaaatgtagagaaatttacatcaggtgacacaaatttcattttaattataaaattctgcccgggaattttattattcaaattactgccgattttaatagtaataccgcctatttgcataataaaataccgctggtcctctgacaaacaatttccttttctttttcattttcttttattattttgcttagtttttcttgaatactaaaggtacggattcaattatttgaattttgacatgacagctatttttttttttttttcaattttacaatattatcaaaaaactttctgttttttttaaagattaaaaaaacttttttttttggccatattaataattattatataattatttaggttcaaattatattattgtgacttattttttaagatggttattttgatatgtaagaagtatatattttttgcattattttttcaaataattaaccatatattttaataaaaaaaactaaaaaaatggtcaaagtttaaatttgattgaaacttaataaactatccaattttatgagttactaaaaattaacaaattatattcttcttatgctcctgttatagagcaatttcaataggtttctaaagtaatttctaaaaaggtaccaaatagtatctatatatacatgattattgctctatagtaacttttatatgtaattataattattaatttcttaaatatacttacaattaacttgcaaagttgtttaagacaaaataatctagatatatgttaaataagtaaccaacttcatgagttactaaatgatatatatagaacaagtttatttaatagagttgtttaatatattttttaaaaaataacaaagtaaccaaatagcattttaaacattgtacaattagttatactatgaaaattattatttttatagttgtactcataa

SEQ ID NO: 110702 - DNA, 5232 bp, Cannabis sativa
  modified_base (73)..(92): a, c, t, g, unknown or other
tgagtagatctaagatcctgctaaaataattccaacaatttctgatctatattaataagtaaatctaattatnnnnnnnnnnnnnnnnnnnngggcataaaacccaacatcttcactattgctagtataatatattcatttgtataaaaacacatacttacagctcaagtacataatatgcgtgaacaaatagactactgtcatatattcacatgtatgatagatagggggttaagtggggatcctcgtttcaaaaaaaaaaagggtcattctacatagcctccgaagcaaattttaactcatacattattcagtattgtgttgtttgaattatgggatcactacccttggaaattctgttggatctcaaatcatagttcgaattaaaacttaagttgttaacaacttgttccaggtatcctatttattttgctctttgtgtaagtgtcttgctccagaacaaagaaaatttattatagattctaactattgattattcaaggtaaatctatggagagatgaccgaatttcttatggaccctggttaatatactgatcataatttatagtgtatttgtcttcctgtgatgttatttcagtatcgaacataaatcatagttaaattatgttgagaagttgaagcattggtgagtacgaatgcacaacttctgttttcccaatttgcttatgctattagttatttaagctgggaaattttcaagcacaaatgaactacaagctgccatatgtagcacaaggtacaagctgaatttaaagagaagaatagacaagaataagagttgcatagcgtgctcggttaagttaccttctaacaattaactggtcatatagcaacttatgtatatattttttttatgcttcattgtcattgtcctcaaaaataaaaatgcttatatagttggagtttacaaaaatattaatgacgtattctatgctgcagtttagtcaagcttaatttttatgaaatcatatttaagcattggtttgtacattgtgacccacctgcagcaaacatactgatttgccaatgccttctagcagaaagagcattctaggtagatagttatatcaacgtatgctttgtttaatttttgttaaacttctttgttatggcttgtaagtgatatagtagttgtgccttaaacttttggatatattttttattttctaatttttatagccaagatctgtatttgaagattttcattctacattaaactagactaacacttgagattttattgttgttgatgagattaatttacgaaattctcaatattctttcttttctttattgtttgtagttattatggtatgcacttctttttatttctcattattttcatatgaaaattgggcgaaatttaatgaatataaatatttaccaggtgtattttaactttcctaagtttatctattataaattgtatataaaaaatatatacctatcccgccagttgtaaactgtggttcaaagttgtttttctgtcgactataatctgcatttaaagtattatttcccgtcagttacagttcgagagaaaccttttttgacagtgataaaccgttatttaaagtgtttttccgatcaatattttaaactgtcatttaaagtgactttacctgacaattataaaccgtcatttaaagttctgtatttttatgacgtccacctagctgacgattttataaatcaacggaaataggataaaagattgtttaaactgattgaaaagtctaagtagtagttcttccacaaaaatggctggtctcggagacaaaactaacatggtgataagcaaagactcatgtgacgaaatattgtgaatttctttgatgagcaaccccaactcatactaagggcacctcattcaatgcaggggcaccaatccttgcaattatggaagaaggtgaagaaccagaagtgccaaagcttgaggagatcctcacattggtgatgacagggccgatctcggtcctattgaacaacttgaaaaggtcatattaaacctactaaaacaaaccgaaattgttaagatgatcaagcgcctcaacaaggaaattaaaaaatccttattcaattgttacatgacaaccaagatatctttgcgtggctccatttagacatggtggggattagtcttgatgtgcaaatttatgtcctcaatttaggtaaggacattccatcaaaaagacaaaaaggagacttcttaatgaggcaagatatgtggtcttgaaagaagaaatagccaaaatcctcaccaaaaatttcattcaagaggaattctattccatttaggttgccagccgagttttggttcacaaacccaattgtaagtagtacacttgtattgaatttacgaatctaaaaaaaagcataccacaaggactggattccacttccacagattgaccaactagtcgatgccaccgggacgcgaactcatgtaattcatggacgcctattctgattacaaccagattttcatgaatgtcgttgattaagagcataaaagttttaccacaaacatgtgattttattgctacgatgtattgccattcgaactaaaaaaaattggcattacttaccaacgacttgtgaacaaaatgttagctaacaatattgggcgaaacccttaagtctacattgatgacatgctagtaaaaacttaactagcaaagaaccaagcggaggatataaatgaatatttcagccttgaaattctcttttggtgtctctattggaaagttttttggttttattatcaactcaagggatattgaagcaaaatcagagaagataaaagctctcttccttcacctcaaagaaagaaagatgtaccatgtcttacttgtcgcatcgtcacactaaatcggattgtatcaaaaaaaaagtgcctacctttcttcaattttcttagtggaagtaataatgtagaatgaacggaagaatgcaagcagacattctaagcacttaaaaagcatctgggggagcctcccatttttttcaaaccaatcacaagcaaagtgttatatttttatctggctgtaactgaaacatccctaagtgccaccttggtacgagaagacaaaaaggttcaaaagccaatgtactatgttagcaagcgtctcttgggatcggagtcaagatatctaatcatggagaaattctcatttggcttggttcatgcatcaagaaagaaccatccatattttcaagcacacaccataaatatactcacaaatcaacccctttgacaagtattaatgaaaccaaaagcttttagacgattacttaaatgggatgtcgagctagaactgtttgaaattacttaatatccatgaactaccataacggcacaagctcttgccgacttcatagataaatgcactaggttgctcgaagaagagaaattcaaaagcaaagtcaagctacatggatattgtttattgacggattgtctgatcaaaagggcttgggggcaggatatatattggtcatacctgatggctatcgattccactaagccatgaaatttgcgttcgaggccctaaataatgaagttgaatatgaaaccttgtttgttggtctaatacttgcacgaggactgcaagctaaatctataagatgctttagtgattcgcaactggtagttcttggagaataccaggcgaggggaataaaaatggcctcatacttggtgaaagtgaaatttttatttcagaaattttaatattattcaattgagcaaactcaaagggaacaaaattccaatgctaattgcacggctacccaccacaaaggaagctgacaaactatatgtgttctagtggaacatttactagaaagaagcatcgcacaaagctaagaagatgttgagatgattcatgtcgtaaaaaactcttggatgacacccactacactgatgcgttgttcgactaatagtgtaggggctataacttggcgttgggccccttttattacaaatgagttcatagcatcttttcggctcatgaggcaaccgattcacttccacaacgtaaagtgaatatcaatgtaagaaaatctatttaggaaacaactgctttattagtactgtcgtctctcatgctcttcgttccagtaccttggtaccgacaccaaattcaagtggtagtcatagcgggccatcttgcatcctgggttctaacgcttctgtgatgaaatagggtacctttctctctgatttgaattcttcagtgtctctttctcggtcaatatcattatgtgactcataagacacatctttattgctgctccattagtcttggtatacgttggaaacagagggagaatcttcttcattgaccctttgtcccaagtcattttgggaagtatgggagtttcatcctcattgtcatcctactagagctcatcttaggaaacataaggtgaatctatttcgatggaggcattcaatgttgattcttcttcaccttcgtgatcaatgttcatcaaggacaaaagaagtcgatcaacaatgtaattagttgcttctagttgagcaactcctctaaccttcttgacagtctcttcgagcttgatgaaattgtcagttctgtctaaacaatcttgaatagtgtgttctaatttgagtgtcaagtatttccataattgactcataactgttagtccagcaaccatcccatgaccttggtgtcttcactaagtattgttgtctgcgtagttgcctctaataatcgttgtaagtaatcctttagaggctcgtcttcttgctacttgatgtagaccgcatcgttgggctcgatcggtctatgtcttgatgggaagaaggttggaacatattttacatgtatcttctttactaatcaagtatgtcgattataacattgtaatctaacatcctaaatatgcatatacgaaaaacaatgaatttaaacaagtaaaaaaatgagatttctcacattaagttgtagcagaatataatgtatccttcttttctaacactctaagttttgatttctttttgttgtaaggtttcaacaatttcagaacttgaatttattttctctaactttgaaacttagaagagcacaatcttctacaatttcttgagtatcaaattgggcagtgtgggatgacactcaatacatgaaggtttgatctcttgcttgtatgtgggtacgaattaaagagagagagagagagag

SEQ ID NO: 110703 - DNA, 14510 bp, Cannabis sativa
cccccccactattacaaatgtcgagctttgtctcctgaacgtttttttttgttgcgaaaattcctctgaactcaaaaaaatattgtaaatatccccccttcttttacattctgctgaattctatgaacaattagttgatgtagcactaaacgtgactttaatctggcccagttcaagagtccaaacaaaaaataaatgcacaaatagtagtctaataaagaattatgtgactatatacgtattcttagaattaatgtttgtatgcttagtgtcaataaactgaatttcaggtagcttaaagttgttaaatagaccttcgtactgcaactatacatgaagataagcatatggctttaaaaaatgagttgaatgtaactgaagggggatagttcaacaatttctaaagtttggggagattttttgcagcaaaaagaagtttagaagacaactctacaaacatcatagttcagggagacaaaaccatatttattctcatttaatagacaaatttgtacctcgatattatataaatatctttgtttccttaagggtacatttggaaagccatgaaagaatcggatttgggtgtaacgggaggtaattaggaacatttgtctgaccatactggaactgtgtaattcatgatgattgagaggttacagttacactctctaattttcatgggctcccatgagaattgagggttattacattgtgtaattactaaaaactttccactttatatattaacaactaaaaaatattattctcctgtgtaattactattttgccaaataagacagtagaaatttatatgaaattaccatttcatttccaaacatacattgtatttttaaaatgtagtgtaattactaataatacccagtgacttccaaacacgcccttaaaaatgattggtatctaagtttccacgtcaaggactttatttggtttccttatttagtcctacgaagatcttggcaagacttgttatcacaagtagttttcaagtcaaagggtgattttgtattaaaagggttattctttattctatgaattgtggtttaaataaattattgtgatattttgtttcctttaattttcagagtgtgcataattttggaagctttgaaattttattcactaatatattgatttgcatatgaaagtgttctcttgtgtcatttatcttttatgtgcttagcaatttttgtacaaaattctatagcgcatcacacatctggcacagcaaattgtgaatctgcttatttttgtttctacttttaattaaaaggtcaactgcttgagtacttggtgacactataaaaacgagaatttcaagaaataactatcatactaatttgaaggtgtgtaaatggctcataagaaattgattgtaatagcagcacatcacacatctggcacagaaaattgtgaatctgctcaacaaactgcccaagtacttggtaacactataacaaacatatatttcaagaaataaatgacatactaatatgaaggtgtgtaaatggcgcataagaaattgattgttaagggcagcagactgccactttacaatgaatacaatgcacggtgcagacataccttcccagagccaacttctttccctgattctggccctgattcttcaccctgtcatcaaaatcttattattataaaccctggacctcctccccagaggggagaaaaagctagtaatattgttgttgtattaaatagaccaattacctgtaaatgccagattaaaatatgggcaaatatatcacttctttgagctgccctcagcaaatatccttctactaacctctggaaaatgttttttgtatgaattagaatctagtattgtgaaaacaaaatcgatgtacaatacatataacaaattatgaaagtctgcaactccaaaacatagccttcctttgttagagggaaaaaaaaaagcaaggatagttcaagacctaaaagtcttcagaataactcaccccttcatcatatcgcaatgcctgaactagctgtggcatgaaaaatgttactctttcaggaggatatgactctaagaccctaagcacatatgccattacacgtggatgccctttaaatgctggagtaagaaattcgagagcttgtgtaatagaacaagctgcccagtgtggtaattgttgcaaaagcccagagttttcatctactgcctttggggtaacaaaataaggcaatacttcagggatgcttcggatatccaatatatgcaactgcaaggaaaattccagtttagaggctatgcagtatgataagatgataaagcatcagcaaagtttaatagaacaaggattctcatgaactactagatatcatgtttagggatgtctcaatctaggtgcatcaaaatatgaaactagctcataattttgatctggaatagaaagtcgttgccattaattttcaaatgacactaatcctttaggactatcctcactgttcagtggccattactttttttcccaccccaactaatcccacaggaggatacaccgtgggcccgccaggtcgcaggagacaacagggtcagagagctctacctaagtcagacccaactcacggtgcccttgccactaagccctgagggcactgttcagtggccattatcattggcattttcatgtcaactttaagaactaaactaagctgtgaaaattaatttcaacacgacacctatcattaaatcaccatcgctgtttccaatcacctcaacttgaataaattcaaaccacaataagacatacctgaactaaatgagttacttcagccttcaagaatgtgtttgttgggaaccttgatgctaaggatatagctatgcgaggatccacagagaaagcagtccttgcatattcaatccatttatctgagttaattttagaccgagacgacgtattttccctgaaataaaaatgaaaaacatcactagttacactcaaatcaattgcaaggttctttgtattttcaaaaaataaaataaaatacaagagagttaatagattccttgttaagtttacttagcattagagggttgagcccaaatttcaagcctatcagcctcatgctgacatagcatcaaaagtagaagcttccgcttttctcttcccacaacatagttctccatctggccccaaacagggtgatgttgaccgttctgcaattttgtaagtactattactttgtattgctatcaggtcatgcacaatcccaacaatataataactgaagggctgaactaaaatattatgtatctctatattaaaggtcctattgtttttattcagatcatatatcattaattaaaagcatttatgttctacatctcagttttacaattcaataatattaccacatcaaccacactgctcccattttcacgtgctcgtcccttagaatcagattgacttgcatctacacgctcatttgaaaggtagtgcacaaatacagatacagattgagcctcactctgggcaaaactcgtattgttggcatcataccattcaggcccaaaagcaaaccagcccaacgaggccctgtatcaaatccaatgatgactttgagaatcaaacagaagattgtgccaaacacaaattcagatagaaaaggtatacaaatctatttccaacagtacaagacaaccaaaatgcacatgccaacattatttaagggacaacattatctctagaataagtgaacaagacaatttgagaattcaagaaaaaactacatcaactgaagcgtgtagttgaagtttacacacaacaccctgaagccctgagtctctttgggattcaaaggaatgaaaggttggcagacttcaaaaattttgccgcatttgcttaaggagctcttgcttaagcaaaagctaaactaagagctcttgcttaaggagaatgaattaatctggatgaaacgtgttttggaagaacttaaaattaccagccctttaggattattttatgataataagctaactataaacatagttcctaatcaagttcatcacggcagaaccatgcacgcggaaatggattaacacttcatcaaggaaaaagtagaaggcaaggaactatgtactgtgtacgaaccaagcaaacaagttgttgatttgctaaccaaggggtacgttagtaaattatctcagaccgtgacaaaacttttctctacaaattttgggaaaaattattcaggttgcaaggctctaacttgaagaggagtacagcttatcatccacaatcagacggcctatctgaggtggctaacaagtgattagaaacttatttacgatggtttacttttaacaaaccaaattatcattggtcgttgtgggtagtatattggtacaacactttgtgccactaagccgaaaaaatgctcgtcattgtctatggtcaagcaccaccctacctcatatgctataagaagggcatattatgttgttgactcaattgctagaggacaaataaaatattagacaaacataagatgcatttgctcagagctgaacactacaataaactctaagctaattccaaacgtcaccataaggaatttgaagtggggggctttgtctttcttaaacattggccctaaagatagcgacgtttggcccaatgcaagtcaaagaagttgagtactcgatattatggaccctacaaaatcctcgctcgtataggaaaggtgccatatataagttggagctacctaacaccacctctacccacccaattttccacctcccatcttcggatttaaagttggtggtggaacccaaccagcttctaagtgtgtgcaaaaaaagccaagggcaacaaggggaggtggaagttcttatcaaatacacatccttaacagattttgagtcacttgggaagactacaacaaggaagatttggactcggggtaatattacactgactgtttgcctaaaatattccaagcgcaataaaagcacaagttcatggctgaatgtccaagtcagcattctttattgggtgaaaatttgtgtttatgtggttatcctagtcggcataccaatcataatccgactatttgtattaataaataattaaatagaacctaagtcaataaggagcctagttgattattgttctaattgtttagactttctcagttgggatattgcaaggtcttgaattgcttggaaaactttgtaactttggttctatttcacaataaagattcacataaagcaatcaccttgtgtgtctcagaacaaaaaaaactttggtttatacaaagagaaatattcgttgaaaatagatgcactagatacaagtcaaggacatgatgtagcatagaagactagattacaagtcaatgagtttgcatcaagtatgaagaagtaaatttctcacctgtagatacgatcttctagcaattgaagacctgttttaaaattcagaagatttccttgggattggcacgagcaaaacttcaggccaagaagcattacagtgaaaaaagtaccagtagcggcaggatgatgtgaaaagttccatgggagctttgttgacccttgtaacattcgaccaagaagtaaaagttgctcaacactattatgtcgaactacctaaggcagcatacaaaaaaatataatgtgaatcatcttaaaccacaaaacaaaagacattgatctacagcattcatagtaagatatgacacaatgaaaagtaaattatacatcaagataccatgtcaattatcatggtaaatatataaatattgtaatatgacaaatataattaaattatacatcaagataccatgtgtaacctaaggaactagaatagttaaaaaaattgtcaaagacagatgtaatcgtggtacaaaagaattgaagattaggattgcatcagtttcaacaaataagaagagaattatcaaaatttgcaagcatgcctactatcccaataaaaaggaactcatctattacatcatgtaccttcctcattgagcaaaatcatatttggtgcaaatattataaccaaccacaactggcacccaaagaaatacacatattgcaatttaacaaaccatgattgtatttatcttttcaaagctgaccctattaccaagtgttcaactcaagcatctatttgagcaaagaaaggatcacagggacataagttatgtaatttcatacctcaaagcgatcaatgaaaaaaccaagccacagtctatgagccattatttgttcaacgggatcaacttcaggtagcccttctggctccccaggagcaaggtgaggccttaattttgcagctggcccagaatacttcacatcagatgcaaaaagaccccgttttgtatcaattgtccacaaccatgcatcaacaagttcagcaaggacaagagaacccaattcaggtgcagcagaaactaaccatgtccaaatgaaaacaccagtttccattgcatcttgtgtacagatgtaagctggacaccaacagagaagacgaagaagttgtgaacagccctctacattttgttttgaatcagaaccctggaataggatagattaagaatttaagtacatgaatatcaaccaagatattagaaatataaaaaggtaaaagaacatctttgtttaccaaatttgatagaagtaatgcagttgcttgggaacaagtttcacgaaattgtgacttgtcaacttccccacctttttctgcaatattaacaaatttttgaagtaaacgaacaaacttgatcagcaacatcccattaaatgagttatcctcagcctgtgactgatgaggaaacgctccagatatcagcctctggaggccagcaccaagcccaaacccacttggtgtgttaccagaatcaaatccaccaatactgttaaacaaccttctcattccagcaatttctccagcatggttgcacttcactgttgcactgactatcccagtactgagcacctccaaattaaaggcttctgtcaattttaaatttgctcctgatgctgctgcagcagcagccatgacagcagggatatttgctgtccgtatgccagtccagcactcactttttgctgtaccaatacgtatctcagacagaagagaaacaacatcagttgtatgttgtgctctttgccatgtgtttgctttacaaagcttgtcctgcagtatgatattaaaacaataaaggtacgtacttttacacgtaaaaactacttaaaataaaaataaacaattgaaacaaaacatgtggtctgaaagatgtattatctctaaagaatttatgaaacataaaccaccatacaatttttcaggtcatggaaaattaaatgcgcttccacaaaacacctcccaatagatgtgattttatgactgtcaatgtaaatggtaagatccaaaatcggggaagtgattcaaaatatgactgagcaagagagcaacatattgtaaattgacaacccttcatttaaagtcaaagaaacaagatttcttggcatatgagaagaaaacaatttaattaggcaaggaaaagaatgccactaaaagttcatatattttgatgcttagagagatggacactttatctcagaggagagttttcaacctgtagaagaccctggctagtgcaaggagcataggaaagtgatttaatgatccattctcgaacaactttttggtacaaagaacgaacagtcgccacccaagtagggtcattgacaacagcagaaggagaatcattatgcattgagaacagcagggaatcgaaacatgaagagttccataaaatctgtataaatgttgagattttttagagttaaataggtaagggaaattgcacaataagtgaatgagtacttgttgctggcataatttacctgtggaaatctatctctaatttgggttaacaagttcacagcaacatcacgaatatgttcctccctctgggacatacttctgataagaaaacaggcatgaacagaaagagttgattctctgacctcagcttcctttcctgtttctgatatcctatcctcctgaaaccatatgaaaaaacgacgacattgacaatgcaaagtcacagcaactcttctaaataataagaaattccctcatgttaaaaaggttaacgcagccagttacaataaataatgtatatgcatccaatagcgaagaaatcactttagctatcttttcaaaatgtaaactggttccatgttgcatccttcagaaaaagaaactgatattgttgggaaaaggagcaaataaaaagagctaagtttagatgttttctcacaagaaatacataccagccataatactgctgtgtcaaaagcttgatggacaattgccattaagcattgaaaaacagctggcaaaaggtttggcgtttttaagtactcgaatacacaactaaacgcacttctagaagcagttaaactagcgttgccatttaggatgccaccattactgccaaagcgaatgatctccaaaaatgctactgcaagaagataggttgcctttactcctgcaaccattgaaaagtaccatttgaaacagtagatgagaatattgaaaagtaagagaatttctaccttcataaaatcagtgttgatgtcttgtaaacaagtaatgaagcagcactcaaaaaggaaggggaagagcgaaacaatattttgttcaactaaaaccaataaataagtatttactctcaaacaatctcaaaagggcacaaacaaaaatcttattttatttttttgtatgaagcacaaacacaaatcttaaattcactaagaagagaataaattacctgaaattgtgctcattgatccaacatcaatgcgccctccaagagcagaagagagagcagatctttgggcaagagcagctttctcatttccacttcctcggcggcttccagggttgtggagagcattgagctccaactcatcctcaagccatttcacagaactaacaacctacggaaatggtacaatagcctcaaaattactcacaagacagacacaaaactacaagcatatacattgaaagaaataagcctgagttcaacacggaaatccaaaaggtacaacacgtgtaaaaaaaagatgattgataaatgactttgaatgacaggtgccgatacaaggagattaacgaacagtaagcacaatgaatacacaaagctagtaggtgtagccaatcatcaggagttcaatgtgataaactttcttcagtccaaatatttttatcatgtttgatctctcagctattgtcaagtaggataaactctacttgcacctatagaaactgggtttttagtaccaactgtgattttgcaacaaaacagtgctcatcaaactcaaactcataattcttcaataagaggtcaacattaaaaaaaaaaaaaacagttctacacgatttgtaaagagaaaaaaaaatagatagctttgcttcagttttattttttattttttattcttttgtcttttgaaaattatacagaccatagtttggtgtctttcccaaaacctactggctcaaccaaagatgttataataaactcctaggttggacatggattcagaacacagttcatccttccataccccaaaataatttttcactgatcagtcttttcttcttaatgaaacattagccaataacatgacattcattaatttaaaaaattacacaactaataaactttttttaattaaaataaaaagagttccaaggcaagagagcaggaacgaaagtgaataatccaagatattcatcacaaacttaccagtggaggtgtcccttgagcaattcgctgcacagcagaagaccattgtgtattccacatgtacggacccccaacagcttgaagagcaattgtccccatgctacccacactgttcaatgtagtggatactgacttcgttgttggtggctgtgttttttgtatgggaggtgctaaaccaaacaaagcaatatagaaccacaggttacgaaataacttcaaaagtgaaggttccacgtctaaggtcggatcaaaatcagaacatatttcagcaacagcaggaagtagaggcccaaggaaatctgctccacttctgcaatattagaatacatttttaagaaaaaatattaaaaaaataaaaaactagaataaaataactgcatgaatcaacgtcactgaagccttgcagaacactgcacacatagcaaaatcaaaactacaaagactagcacagcagcataattgttttctaagagtgctctaccttccactttttgattcagcagcaaggcctacatcagagcacaaagatagcaaacggtaacgataatctgaacgcaacttagtattcttaagaccactagcaatgagaaggaaccctgctggaagagtctagaatgtgattgaaccagtgagaatccattgaacattatatttcaacaagtaactcaatagtaatattatggttcatatttctgatggaacactgacctcaacacgctctgttgtagcctcaggcgccactgttttactttcagcagatcctacactcgaaagcttatgtaagtaacttcttgtcatcaaaacaaccgtctcacgataggacttttcaaaacctaaacttgccatgtgtgatacagcatcaagaagctgcaaaaaattattaaaacaagattttagaaaatgccatcaaattgaatgaagcaataagcaatttgatttacaatccaagtaaccttaacactacgtttggtagaagagaaaagtggagggtatattggagagaaaagtgaagagaagaaaagaaagttgtatgaatggtaggaaagaaaagggggtggaaaaaaagttagaggaccccaacaaatttattccttccaaacttggagagaaagttgaggagaaaagttttataacatacctgaaattcaaaacttatttacccttatttttattccaaataatttatttaataaattgtaatttttcttttatcattttattccttcctccctctctaccaaacaacttaagacaaacctattttcttttctatcttctccattttctatccctcattaattttctttccttcaacttttctttcctttcaaccaaacatagtgtaaataaatcatgagatcgaagtaaggttaaagaaataacataaaatgcacgctttaaagactaagattccatactcggagtcgcaataaactaggagccgaagcatcaccctcttccaggctctcaataaataaaggtaaaatcatgtccactacttcagacttgttcaccgcaacaattaaatctgctagcagacgaataatattaagctgcacaattggtagagctggtttgtctttctcaacctgatataagaaacaatataaaatgaaatcatcaataactatgaatttactcttcttttttgtactcttcttcctattgtctgatcactaataaaagttaatgttttcctttgaaaaaaggctacgaatctatgaaatcaataatatgtagaaaaattagatttatttcacaatctgattcttaggtagatctatcatatatagttatttatacgtaaatccatataattccaaagtatttaattacaaaacaagcgcaagtccacaggtatatatattaaacaaaagcaataaaccaacttgttcatcatagtcatttcgttcacgaatacttgcagccaaacccataatgaatgtatctacaggaggtcgctccttgctccagcaagattcaattatttcacagcttgtcttcatgacgctctcaaacattgctccctggttggttgcccaagtatcagcctgttgctattacatatagggaaaaggtaaatagatatttgtcttcatcacattatatattaataaagcaatctacatctaaactgttttacctgagcacatacagttagtacaacaggcttgagccggatgagcaaaatccgaagtgattggccccctcgagttattgcaatttgtgaaagcccagcaagcaaggaaccaaagagttcttcacagattctcaacttacgccacactgaaagtaaacatgcttcagcagcatccataaacaatgttagagtctcatgtgccaacttcttagccactttcccatcagaatcaaagcaagcaaggctcctgagagtcaatgtagcagcagctttataaactaacagttttgtattgattctagccttcagaagtgagccatgttcattccaatcgcgcttccttatctgtccaacacgttaccaattatacgggtcatctgaatttaatatttccttgtctttaataagttcaaagtttctcaaacgatactctcgaaacaaaatacatttcattgcaataactatatggtcaaataataaccatataagagattcactttgcggggaaaaaaaaacactaaagagattaccttcaaaaagactgtcatcgactggagctgcctctttgctattagcctaacgtgctccaatagcccagcgtcgatacggactttatctaaaatgtgagcaatcaatttgaaagcaatttcttgcttctccaaactctccacaggctcttcctcaaaagaagacacttgctgcctaagcaacgtagctccacctccctcattgaacccaaaattcccactcatttgatcaataccactcttccacaaaatgccagccgccattgaaccccttgacgaagcactagttgcctcatctgcgacccgggaagctgcactgccagacgaacacgaaatttggctcgtttcatttcctgggcttgaactttcattcggctggtaatgcttcacactcaaaggtgagctttgtgatgaagaagtctcggaggtcactcgaattcgttccctcggagtggccggagactgaaccagaggaccagacgctgccagctgatcaaggagaaggttaatcaatttttctgcgtccgaagccgaaattggagggaagctctgggacagggccattagaaaagccctagaaattcccaaatctcctccattactgatggccgaaaccacaacctcgcctgtgaactcggctatctcagctgtgaaatccggcgacgattcggcagctttccatacatatcccagaaattcaacaaagaacgaagcaatcgcatctgtgccgaacgcttgcggccaaaacgattgattgaatgaagccaaaatagaacgaaagaactccaagaccactgctttaggacggagatcggcggaatctgggcatttagaaaggaaccgagccacggcaaggacggcattgagctgagggcgcgaaaccctaggagatccagcgacgagagcctcgggcgagggacatcggctacaaatccaagacagcttctcagataattggattgggttctgcgcaatcaggtcgcaaagctcgatcaaagcttccatggagacctaaggacaaatcaaagaacaaagcaatgcaagaaaatatttgaataactggcagtccctccaaactgagaattatccaaagaattacgcatcgggagctccatcagaaggtaccatggccgcacaaggaagtagatagccaatgtggatattgggattcgcggatgggaacattgcttctcaggttcccgctgtcgtcgtttttcatcgttgggccaaaggacagagaaacaaaggtcgctttttaagttcagttttctgccataactgttttccttaagtttcttcttccgtatttgctttttttaataaattaaagcagattaaatgattttgaagatggtgatcggttcagcccaaacgttgtcgggaaagcccaaaatttcctgagaaaggaaaagaacaaactggaaaaccaaaaaaaattgtggggatttcttactctctttgtttcttatgatattaaaagtggtatttatacaaagtggtaaaaatctaaacaaagcccaataaatataaacccaatcctaatacaccccctgaagatgaagtgtacaaattatgaagcttcatcttggatacacgagattgaaattgattgggaaataacggtttagttaagatatcgacaatattgtcctttgtagaaacatgtaggagtttgagacgaacttgttggagcttttccctcacaatgtgacagtcagcttcagagatgtgtatagcggcggtattatcacaatacaagacaggtgggctggtgtaatggatgccaaagtctgataaaagagcaaggatccaagtgatttcgcaagtagcttgggccatggcgcgatactcagcttcagcggaagactttgaaacagttggctactttttggacttccatgaaaccaagaaatacacaataccctgtgatggaccttctggtgtcaacacaagagccccaatctgcatctgaaaaaaattttaagttgtggttctgcatctttaaagttagattc

SEQ ID NO: 110704 - DNA, 2292 bp, Cannabis sativa
tgtggaggggatggaccatccacctccacaggggtaacgacagcatccggcacaccaacagtagattcctcatcctcaatcaatacaaaatcgtttgtcaggattgcaatgtccatcaaacgagccttggccttccacaccgtaagtctaattggctatcccaataaaatcaatttgtcaacctgctgggtattaacagtagtgatcttagcacacacattttctccatttcattgctagccatcggttcatccaaagttccatcagaaacacaatttaccttagcatctttaattgcaaacaccgggcctgttccacaaggaaaatctctgactactctcattactcttctaatggacaagcatagcttgttcccaagagaacaagttttaaaatccaaccttcgtttcttggtaggagttgttcgttcattaatttttgatgaagcttgggcgccaatgttaacacaaaaacttttcctcttattttggctagaagacccaaggttttcaaatttctagatgtaaccttcctatgcttgaaatttttttgatagtgatctcttctcatcaaggtggtctgaaacatcttggcccaagcaagagctacttgcatcacatttaaaaaatccaacatcaaaattagtttaagagcccaccactaactgctcatttatattcgacccaattaaaagaaagtttttaggaggcccattatccttacccatcacttggctattgcatggcacaagggccatctctccatcagcattaaacacatgattttcaaccatcaaaggcccactaaccaaagcaatagggttcgactatccattctaagaatttcattgacttttctccgtatacagctggcctcacccttatacacatttgaatgctcatcgaaaaacgacatatcctcataggtcttttcaaaacgcaaagaaaattttgaagagtagttacccaaaccatcgaacccatgagagatcttacacggcaaggccgactgtggcttgggaacccacaccaaactaccctttttccctgttcggcccgtagctttcacttgagttcccttcctcgagctgtgagtaggacgttctgaagttaccaagttcgagatcgaattccctcgcaccgacgctggagaagaagaccccaaggctatcaaactcatacatgcacccttggatcccttgccattctcggactagttattggaaatatcaagcttgcttgagaaacaacttgggtaagaagatgatcggttaagctagaaaccataaaaagggaacgggatacccttagtgtccaaaatagtgaccggcgagatgagagcgcaatcacctctcaggtgatccaactatccacaaaggtggcaaaagttccctattgattcatacttgatttgaacccagctatttttaccgtttaatagttcgaaaaaacacccacagatgaaaggattgttcaaatcaacatctatttgtactctgatcaatttatttcaagtaactattttagatttatccaattcaatacaaacaaccttacctgcctgagctcctaaaatattggcattagctctagagaacaagtcatgtggcagataatggatttggattcataaccgaatggtgtcaaaagaaagcttctttgtaccaaagccaaaagaccaagcaagaagcaccgagatctctccttcgatgcaccaagggccattatctaggacacatttcttgtctgccaccttttcgaaaccaaaacaaataatgtttgaagagtctcagccaaaaaacagtgtgtcaaccttcacttgaatcttccacaacttagtacaaaaggtttccacttccacatccatgaactctctgttagaaatcaccttactaataaggcaaaatttcaaaggtacctgaatgtttgcgtcactagagactaaagaaagaaaagcttaattcaatgagatacatctgcccctattaacttttggctgtgcaatgacaccttccataataacaactactaccaaaaaaaataccaaccaaaataacacgtgaacaacaacaagaaaagtacacacacaaaacaaaatacagcacccacaacgaagaagtaggaaaaacagtcaaaagaaaggaataaaacaaaggactcaaactaacccaactcactcaacctcacaggggacacaaactaacccatcatttatatattacctttattgaagcgtctataaatatatgtataaataaggctaattagaaattcccccccccccccccccccc

SEQ ID NO: 110705 - DNA, 1807 bp, Cannabis sativa
agagtcactgttactttatgctttgcaggcactttagtggtgtacgtagcctccatataagtttccgttgtgcttgttattccccaatgactttcatacgtagattcagccttgtattcgatcttcccttcatatatgcatggaatcactcggcatgtgacgcttgcactggtgcccaacttaagtgaatagctggccccgaaactaattgtgtttgttttcttgtaggcaaacttgaggcttatagtgctgtctacacagtccgggttttcggccgatgcacaacccttctggaccttattttcgttgtagattatggcctccttgtctttgaatgcgatgtcgtatatactcttcgagatgatgctctctaccaccaccaacttcgcttgttcgataatattggagggcacatctgcgtaaagatgatctaatgtagcgttataaccaaacatacccatgtggcagaatttgttgttccacttgctgcggagcgccacaatgttgtcggcgagttggacgggcaagaagagcgtctttgggtcattgtcagttttgtcggaagagtctgccgcaattatgttgcccaatagatcgttaaccctccagaacccatcggtggaaatgttcttaatgcggatataacgaccgcaggcggtggccgtgatctgatttagtatcgtttgatcgccgtgacagtcctggaggtcgaagtaaagagtgtttgtggcgtccactctaagatatttattgttgtcgcacgggtgcttgaaggccacaggggttgtgggaaatgttacaagcgattcacaatccaagactttgaacacatggcgatcctcatcgctgggagtgatcagtgctgcgcacaggccatgttttggctcggtcgcagtgctggagagggaaaggtagcacccggtttcggggtggagaaattgaaagtattcttcatcatcctcaaattcagtagctttgataggcttgaacatggtactcgagtgtccatcatgttctattggctggacagcagtggcttcaatgtactgatcatcagactcagatatggtcaagaatttgtagttgtggcaggatcgtatgtgcactagttcaggatctttcttggctttctccagttcgaattttatgtaaggacttgcaatgtcctcacctaaaaaattcagggatgtttgagacagctggttttggctactagtaattgtgcttttcaagtatttgccattcgattttgatttgataaccacaaaccttggcaatattgtttggtatgacattattactcagtattcaattattgatacttaatttagtaatgggatgaattgaattgatatatgaaagcatctatttatagtgacacaaagtattatgtgaaatatatatatcgttaattaaccaatcatatgactacgtactcatatcgtgaacgggtgtactagtaggtgtattattggttgttagtataagaaaaatctttaatcgactagatattatacaatatggtcccataaggcttccacgacacattcaataaaaatgattaatactaaaaaaataaataaaaaggcatgagacgactttatactattattctttaatttgttgatttcgaaggaaatatgcatgatatgatctatttggtgtcagtaaatgtgtaattttaattaagtaaaattcgaagtaattataagattgggtttgtttgttcaactaaataattacacggtaattaaatagttaggtgtaattaaactatcttaaattattttcatggctcccatatatt

SEQ ID NO: 110706 - DNA, 2246 bp, Cannabis sativa
atcttttcaacccaaaaacaacaatttttctctttatttttccattaattttcctactactgctaggtgcagaagcctctgaattccactgcacatgggtgtgccaggatttttaatcaagtacctagtatttagtaaagttttgatttttatacttgagaaacacaatagcctaaataaagcattcatttttaaaaagaaatctaggttatggaaaatattctagttatggcttaatcatactctaaagttttgggttacatgtatctaactagatttatgcagattaagttgattatatacgaaaaacaaatatattgctggcttcatttttaaatatttgtttttttagaaaaattatttattttattttcttttgttggggctatacccactaggtgtgggcatgttttgcattaattgtgtcggaaaagaaattttgtcttcactaagaatacatgatgggactgaatcctagatacaaagtatatttattaaccccatttcctccataaaaattatagacttataatatctagaaaaacattttcataattcatactatagggtaagagttgtacatatgtgactatttatgtgtgaatttttgtttactgctgcgatggtttattaagtgaccaccccataattgtatagtttttgttcaacataataataatagcctcctgtggcttttatatgtatattaaaaataaaaagctccacaacaaaatctgttatttcttgcacaaattgttatatatgatgattgctcagtcagtttgtagagcatattattatgaaatgtgaagttatatatatattgtgtctttatctgaataagatggcctaattattggaattcttttaagtgacacatttcaagaagtaacctgattgaagatcattgcacttttgaaaataaataattattataaagaatatttttttataaaaataaaaaatttatgttttccactaagagagacaaacccttttaagagggccaaaccaaaactgtgttatcattttcttggggttactatcagaatactagtactgtcacctgctttacaagcatgtaagagctgtcctataaggcgattttcccttctttcttctctattttcgttttctgggaaaatagggccatctaacatgtgcacttctttctctatatattaagtccaaaacgatttgttcatatatgtgtgtgtttgtgttacagcttcacatataaatatatttgaagatacagaaatatattttcatgatgacacgaagaaataataagattgcaaagaagacaaactcagctccaataatttgacccccaaattttgtcaacaccagaacccaaaacttcgatatggaaattaaaatttaaagcagccaatcaccttatccgaactttgcatggcctttattttctctcacgaattatatggcaatccctttagccacaacctcccaaagctagggcaatccctttaatcttctctcttttagataaggtatggaaaagattaaaaatattataaataaaagtactcttcatatatatgtatccacaaattttgatgaacttatcaaggatatatatatagatatatatatatatatatattcactacatatgacactatatgaaaaaatgggtcaacgtcaagaagagaaaagttattactgcctaactagctagataaatagatagctagaagctagtatatgaacaaatttcgaataagttcttcaaatgtgttaataacgacatcaaaacattacaaaaggtttcccttttaactgtgatgatatacattcctccatatttggagcttggaaaagcttaaatattcgaataagaaaataataatataattaatgggtagaaaaattatactataagataaatcgtaacatgggcacattaagaatacataggcaggtatttgcctaagggtaagttatcatctcgtcggtaagaagacaacaacttattgatagaatcatagaaaaaattgttggatgtttatattgaatatattgaccaatatatatatatatatattttaacaagataaatagttcaatgggtacgtaattgtttctaaatttggtttccataccctcgacgataacatgtacaatttattaggggtgttcgcggtgcgggtggtgcggtctttaaccattttttcaaaccaacccgcacatgcagtttttccaattttccaaaccgcacccgc

SEQ ID NO: 110707 - DNA, 11650 bp, Cannabis sativa
gcggggacactttcggaaattcagtttaagagagtagcgtcaaaatggcgcgatcttcaacggttttttttttttttgtacaacacaaaataaaaggaaagtgaatctttcaagaaactttccttttgtttttttttgtttttttttttttttttaatttaaaaaaggaaaaaagtttacagggaagaaagaaagaaccgactttttactaaaatggaaggcacatgagcgctcactcactctggagtctggagtatggaatcaggataggtcgtcctcacctgtgctcgactgtgtaaaacattattcctccaatcaatatttgccacgtagctcaccactttccccggtttcccaccattcaaaaccctaaacccttgtctctgtctactttctttctttctttctttctttcttttagacaaacactaaaaaagaaaaggaaaaaaaaaatctcatcgccagtgccatgaaaaagtttcatggtttatgattgtggagatgatgttgaagaacgccgtgttgctgtcttgtcttcttgttctctttgcgagccatgcccaaacggcgtcgcatttctcttctggtccgcacattactgatgtgaatattctgttgcctcccaggatgactcatcctgtggagtacaggcttcaaggaactgacggttgcttcaaatggtatgtttcaccacatttgaaatgagttgtacttagtgttacgatcacggtgatcaattagactctgattactgttccctgttttatttaattgaaaaaaaaaatgtttttctttggttgttgaccgttaatgtggttaaaatatataggtcgtgggatcatcatgacattttatctgttatacctgaatacaattcgagtaatcactgctcaacaagtgcgcggttgagatccgttgcttcttatagtggtcgaaaggagacagctgtatatgctgcggatgtccacactggaactgttattcgttgcaaagttttcattgataagttttccagaatccaaatttttcataactctgtcaaacttgatctagacgggcttgccactctccgtgttcgtgcttttgatattgaaggtaattataaaatgtcaatgatcattactagtgtaattattatcctgattactccttaggtatctcctttggttactacattatccaaccatcactatgttgtactttggtttttctttagttacttacattaggctttaagatactgctgaatttcgtctaattttgttttggttatttgttgcagaaaatgttttctcttcattagtgggcttacagttcatgtggcaattgaggcctgaaagaaatgaattgactaatcaccttgttcatgtacctttgaaggattctcccctaagtgattgtggcggattttgtggagacttagataagcagatcaaacttgaagacagtgtatgattgttgatatttgataagaataagcaatggaatgagattttttttttcttattttcattttatctaattagtgtttcaatttgtaatgcagggtgtattttcggatctttatgttgtgaagggaattgaaattgggcatgagattgtttctgtgaatttgtttgagccaacatttgagcatatggcagataagattattctaactgtggcagaagcaatgtcaattgaacctccctcacctgttttggtcctcattggtgctgttgttagttatcgtctaaaagttatccgtggaaataatcctcaaggtttatatattaattgtttttggggattcgaccattcaattcttttgtacctgttgagatatgttgttaaaacatgctcaagtttaaatatgctaaatcaaatacttactgatagattctttatcgtgaaggctaattagtagattgacattgagttcacatgtttgagcattactttactgtcattgtgtgttatgttatttattaatgttagctgagtctttagcaaaatgtataacattctttatataatttagaattttatgttagccacattacctatttctagtattgctttagttaaataaattttgaaggtattctttagttgtatacatatttaggtttatatgagcttttcatattatgttgttttagtctagttgtgattgcttactcatttactttttgggattatgcagtggtaactttgccgtcaccccatcatcgatggtcagtttcaaattcttcagttgcaaaggttgactcactgatgggttcaaccaacgcattacacttaggagtaacaaatgttatagttgaagatacaagagttgcagggcacatccaattgtcatcacttaatgttgtcttaccagattttatttctttatacattttacccttgtctatatctgatcatttggtggaagggactgaatcaatttcgtccaaggcgaggtggcatgttgtttctggtcaccaatatctcatccagataagggctttttcacagggatcagatgcacaagaaatctatataacagaggtaactctctctctctctctctctctcttgtgaacataaggtgacctgcctgcatcataatctgtctaagatatggtaacttaaaattctgtctcaatatgagccattcttctttgaaattgaaacttttcgttgttgtttcctagaatttattttgtttggtccggatctgtagtaagaacctggactaggattttccataaataatttgtgagattctgtgttgcttaggaatgtataaatcatgttgtttaaaaacagaaaaataaactaagcgaaaaaggttacgcaatctttttattatcgcttaatcttcgtaccatgttgtttctcgttgtcattagctgcactttgctcagaatttatttgatgaatgcagagcgatgatatcaacttgtatgatgaccgtacagacaattggaacatgattccagtttcagataatatcgcatccacatatggcagaaaaaattccagagttctggaagcaacttcacagggactgggaaaattgacagcaactttaagctactactttagtcagcatagtgaaatgaaagaggtattgcctttttgtttattcttgtttgcatttaatcctagtatcttatgctgttaccatcattgtttgatctgttttgaacactaatggtttttctagtagtaactattagtgataaataaccccttcaggttctcaaggtagtccaagaagtcatggtttgtgatcaagtgaagtttcactttgacaaaagaagtggtgcatctcaaagtattatcctaccatgggctcccaatgtttttcaagagctggagctaaaggcttcaggaggtttgtagcgtgttaccatcactaatttttttgttgttgtaaggaacactcaattatttacatgatatgtcattaataggcccgagctctatttcaatcatgtaggctgtgctaaagcatcaaaggattacaaatgggtttcctcagacatgagtacaatatctgtgtcaacttctggagttgtccaggctaagaagcctggtaaagctactattagagttttgtctatctttgattcattcaactatgatgaggtaacatctttactgtttaggttttacatgtgctcactctgtagctttttggataaatagaagtgaacattgaatgattgaaacaatctctttctctctcattcatttgtaaattttgtttcattaacatatgcagtatgcaaaattttgttgctatttttgctcttgttgttatgttgatcaaacctataaaaaacattagaggctttgctttgactttttacctttgtctttccaaaattagagtacatttattttatttaaaaataagtttttcttagaattctatctcttattttctgatcgtagcgtgagtttatggttgttcagggtttccatggcccttttgaccttggacctgaacgaagagtgcaccatgacatgaccccaccgtgtcatggtagtatcttcataacctaatgagtaatggacgaaattctagaaaggaatttagggagtttgaagccattaaacataattggaatttcagaagtgaacataaggtgtttatgttaatgctttccatggatgtagctttcgaaagaacctagggtgaccataaggtgttcacgattgtctgaaagaaccagactatcgtggtgtgagttgttagttctagatattacacactctatcttcttataataggaaccatattaattatacaagtaattttgttttgttttaaagcagttggagctaattgttttgtcctaagaatatatattattacagtgcgttctcttgcaaattattgtctttgtatggatcacaaaatacttgctagatgtgtgctctgtgccgacttagtggctgaaaatctgactcattataaaacagtttgtcttcattatacaaatatatattattatttttgtatttatatatagctcctatgttccttagacccaattgtttaaaagtatcatcaagtcgttgcgccttgtagtaattggaaatgtatgatcatgttacctttttataattgcatctttactttccatgtgttaagtgtccctctctttatcttagtttttatatgttatttgtaatttatattaggtgatcattgaagtttccattccatcttctatggtcatgcttcgaaacttccctgtcgagactgttataggatcttatctccaagctgctgtaacattgaaagcacctaatggtaatgccttaggttacattactttatgtattaccttgtttaagtgttagtcaactttctataactgcagtatgttattggcaggtgcctatttttatagatgtgatgcttttaattccttcataaagtggaaagcaggaagcgaatttttcattgttggaaacacaacaaaagagacacctcctctagatgtgttagggcatgctgacctcttcacagcttttcatggtcctccttgttcatggaaaagcatatatgcatctcgtgctggtcgcgatttgttgcatgcctcattttctaaagaatatgaccattttgatagctcttttcatgggccaattattttgaaagcatcttcacgtattgcagcatatccaccactcattattcgtcaggcaggtgatggaaaccaatttggtggttattggtttgatttggatcaagcagaagctggtaataatatggaaagcttggagaagttattccttgctcctaaaacatatctagatgttatgctagttggtggacctgaacaatgggataaaaatattgacttcatagaaagagtagacactttgaataaggattatgatcgaggggatgtcggagttcgtgtgcatcagttatctggtggctatatgagtttgtacagagtttcatgccaagcattgggacactttgtaattttctttctaatatacttgcttcataattcattagattcagttcaatgtcttgcagacattaatttctttttaaatgattcaggaagttgctttcgaacgtggtaatctggtggctgatgaccatcctcaaccagtattagagaaagttctgttgtctcttacttgtagcattccagattctattgcggtcatagctgacgaacctggtataaactattttcctttagtctggctatatgcagtgatgatttgcttttagaatatttacttatccatgttttcctttaacatgtgacatgttgtttttcagtaaatgggcttgaaactatacggactgcaattcaagctgaccggagttcagaacgaattcgcagcaccccaataactgtagctaatgggcgtacagttcgattagctgctgttggaattagcaatactggcgaagcttttgcaaattcctcttctatctacttgaggtggcaactaagtagttgtgatggcttagcttattgggaggacactgataattacaaggggactaagtacaattgggagaggtttttgcgcttgcaaaatgaatctgggctggtacaaccaaattttgatattttgtctgtttttatctgcattgacatttattacaaagcattccaatttgcatgattttactgtgaattttcttgaggaaaatttactaagataagttttgactcagattttactgaaaatagcaagcatgttaattgttttgttcccatggcctgagatgggctaaagattttattgaagttggatttccatttctcgttatttattgtgaattgatattggatcaattcagtattgaatgattagatgtatttcccagtcagttgtgaaactttcgtttgagcatgagttatgatagggggtttatgttcatgattgtgttatgtaaatcaccctccttccatgctaaaaagtgtgacaggtttcaattctaagttatcttcttgagctgcagttctaccattatcttatttatttcgtatgataaagtaatatatatttatttgacattagattataaattgtcttctttttcttccccctctctctttctgcagattatctaacctggttaatgtacttccttagtttctagacacacttcaatgtatgaatattataaaaataagttttccttggtatgatgtgtttaataatgggtgtgagctgaaatgttgatatcttgcttctcagtgtattgttcgtgctattgctatgctctctggtgatttgactggtgagaataattatgttcagctgcatgagaatttagagaatgttcttacggatggagtgcgtttacaggtattttgtttggagttaagaccaagcaagagaagctcttacacttttagaaatgcattgatattccttgtcactgtttctgtcttcttttccttgtgttttcatagtcatgctgtcatttatatctcatttgctgaagcttttctcttgtttaatctgttgaattgtacagctggtttctactttgagggtcagcccagagtttaatttgctatttttcaaccccaatgctaaggtacgctttatatctagctataaaatatttgtatttaatttagtcatatagcaaattgatcagcgtgtttcttacttctctcaaaacaactatttcttgttttaggaggaccatatattccttaatagtgcataatcatatggcctcgtactttttattcatacttggtcaaaagggggtaatggaggctataacatgcctaattgtgtttgaccaagtgctctaaattatgcacgttgtagaatctgcaagtagacatctgtttaattgcaatcttatgataggctacagatgtatgattatttcatatatatttacgggaggccaagagctttgagtcttgtacagagtaacatacattttgaatgctgggtaatgcataaatgtataggtgattgcactacactaatttgcgctctggcttatgtagttctctttcactaatttattagaaattccatttgttataaccttccacagcataattgcttctttttattttttcaaaggttaatctatcaaccactggtgggagctgcttcttagaagcatttgtgaatgatactcaagtcgtagaagtcgttcaacctccaacaggtctacagtgcttacagttgatattgtctccaaaggggctgggcacagcggttgtgactgtgtatgatattgggcttactcctccattgaccgcgtctgctttggtaattaatatttacaaatccatttgatatatttttctgtgtagacctttatttggctcattggctttttatttctcatttctcccctttatataatttcacttattatccatgtattaactattacttttaatgctggttaagaaaaaagaatgttttactgaacaaagggctcaatttcgaaaataaaattgcaattcttgagccattttctgtgttcaagtttaatttcctcaatggagacttttgattttggcacagtattactgttgaattaattttagctttctgctgtagttttttcatgcaatttggagtagcacaatcaaagagtcccagttgccatcatacattatacatcaaaacaccacttttattaatataaaaaaaccaaaattacattaaataatgctatcctaatgaaaaaaattctaatgctataaaataatacatcataattttatagcttccaagcatcagttgctgtgcaagagtttgcagaggaccctttcttgcaagtttataaagttgtcctaaaccaatttaataaagactacatatcatactctcagtttcaaatgagtcatattcattctaaatgaatcatttgcagctgtaaagtattacacgagatgagactttcttttttctgcgattaatatcattttatctctgtaatgactttcattctttagcttctgacttctcatggagataatttattttgtaggtacaagttgtagacgtagactggattaaaattatgtctcatgaggaaattagccttgtggtatgcttcttgttctttatcttcctttctctttactttgtagtcttcttttgacgtccatattcaagggtttgacaaaatgaggaaatacaaacattgctaaagtattttctgaagctgatctgaaatttgtacgttgttacaggttggaagctcctggactattgatctaatggctggcataaatgatggaagtgcttttgactcttcccaggtctggactggcttataatattgtgtattatatgctacttactttcactatgtataactttgttgatgttctggaccctttttttcccaatattttcttgtgttcatgctagctcatcatatttctatgctatgtaatgcactgtgtttattagtcagcttaactcacaggaaaattatatgcagtttgctttcatgaatatccaagttcatattgaggatcccatagttggatttgtcggtaatgatgatatcttaagctttgatgggggacatttaaatgcaccaaagtttgaaataatggcaaaacatctggggattacaactctttatgtaagttcataaaccttgtaataatatgttgttctttttcacatttgttcaatttctttattgggttttctggagtgatgcaaatttactgttactacttgaatcaggtcacagctgtacggcactctgggcatgaaattttaagccagccaataaagattgaagtgtatgcaccacctagaattcaccctcaagatatcttccttgcaccaggtgcatattttgtggtatgtatgctcacctcttttactttattatatcaggttagcaaagctttacttgctactaatatactatggagctcaatgtgcttgtttgaaattaaacgatgaattttattttacctgcccttttacgttctctagtcatggaaacgttaatatgcataactttccattttttattttatttttgggcccggtcacttgaaaaaatgttctctttcatgtctcttagattttgtaatcaaatttggtttgtttagcttactgtggaaggaggtccaacaattggtgtatcatcggttgagtatactagtaatgaggatgggattgcaacaattcagaaatcctctgggcgcctttctgcaatttcttctggcaacactgtaagtgattttcagtgaatactatttgaatcactttgttctcttttgttgtattatcctctatcattaatacaagttcaatgttttgtttcattaaataaataataaaataaaattatgcactttgtttagcacagagctttcacaaatgtttagctacttgtgcagatgcatttttaattgttggcatttataatttctgtatgaagtttccccgtaacataagtttatatttaaactttagaattttgtgttcaacactaccgtgatgactcttcattgagttgtccttgattattatttctgatttgacaacattttaacttatgaactatgggatgcttgacaattgtcctttttaggtattctgtcgttggaattattttacatgtatgattggtgagattgtggttcggttaatgtcattcttgcaatcgtgcttattttaatttgtcttcactagaatgatgtttaatcttaccctgagcataaaaagctgtctaaaaaaagggtttatctgtcctgtgacctgtcatgagttaataatttctcattgcttccaaagatgaaggattattacatttacatttatctgatatatgtgtcttatattatgtgctcagactattcttgcttcagtctttggaaatggaggcattgtcatttgtcaagcatatggaagcgtcaaagttggccttccttcttcagtgctgttgaatgtacaaagtgagcagcttgctgttggccgtgagatgccaatatatccattgttttctgaggtaataaatacaaacaaatattggaatctcatgccaattacctatgcttatcaatatattaatttgtgttggtgttttcagggtgatttgttttcattttatgagctttgcaggaattaccagtggactgtagaagatgagaaggttggacctcattttgttacttgtgcttgcaaacataattgtgtcttaaagttacactgaacatgttgtatttgttgatcaggttttgagtttctattcatcaaagcacttaaatgtagataagcataaggttcagttggatactccggagaaagttcaacccaataatcatttgagtgaaaatgagcttggttatatcaatgtcttgtatggaaggtacgtacaaattacagattttttttcctcaaaacatttgttatctcatttataattcatactataataaaataagatgtagatcacaacatgtgtagcctatcacgatatcctagcttttctttcttcaacacctagggcttccaattggagtcatcttcactaggaggaatgatagggggatggggggcatctaaaaaagcaattgtttgtaggacaagcaaactttctttttctatgtcttggtaaaatatgaattatgaaatagtaaagtaaaaaaatcttacagaaagtcagatagaggttttagactcaaatatcttctcttatgcttcttatagctaaaatttcaggacaaacttctcatatcatttccttcatttttttctctgcgagcaaatttgacatacttttatctaaaaagctccactcaagccggtcgtaggttttctcaaaatcgattttgaaaactaagccacttttgcctctacttctgtaatcttctactgtttcatttgcaaccaacaatgaatccaaaatttatgcttattaaaatgtattatttagttaaatctatatattattacaacattagtggtaaacacttttaacatgacacattttctgaactacatgataatatgcttattaaaatgtatttttttttgaaaaagagaaagaggccaaagtcaaaacttgacccctcccccgacatatatagaaagcctcacttgtggcgggggaataccatgattacaaatgttctatcacaaaaatataaaacatttaaaacaacaacac

SEQ ID NO: 110708 - DNA, 7456 bp, Cannabis sativa
  modified_base (93)..(117): a, c, t, g, unknown or other
gtcattatattctgctgcaaccaatttaaggttttctaaactcttatgtgtttaattttattgttttagagaaattcatatttaggatgttannnnnnnnnnnnnnnnnnnnnnnnngatcctagtaaaatatttccaacccaaaaataccagacctacgggtcgttttgggcctaccctttaaaatgttggcacgacacggcacgatctatatttttttgtggcacggaacgacaagagatgttttttgaaaagcatggataaatatgggtcaggccagcacgatacgcacaaacttacaacaatgtatttaactaacatgtgcacccagctcccaatagaaaaatgatgacatgtcaagaatatgaaccctgacagggtatccttgcttgatagaaacatgcgagaaggtgtgaccgagatagggtctagtcgcatactatgtcacgcacagtaaaaaaggataatagcgagacatcaagagaagtttgcacaatcgcagcatattttcattatatgtgatgacttggtgtttctcccccgcaccttatgtaaagactgcatctttatagtggttgcttcgaatgactaatgagcacgataactcatcatgaacctgcgagttctatatttttagtacatggatgactgatgtgcgatcagtattatcgtgcattctattttatcacctcgatatgtttatgcccccaaaaccccaaggggttcatacactcccgaaaggtccaaagacccaatatgtgagtaactcgagtgaacttgcgagttcacatagttacaggaatatgaacagccgatgtgcaattatataatcgtgcccagtcgaacataaaataagaacggtcgaaactattatttcatttattctataaatgtttttcatttcaatcaagtgtatttaattttgtaattgtcctgtctgatcagttgtgtaattgaatagcaattattttctatataaaggagtgattcgatatgaataagactaatcacaatctatcttccagcgtggactaagcagaccgagttctaaactactataattcttctgtgtcttatatatatttgttgttaatattttgttgattgtttcagtatttgccactctaggtgaaatattcgcaattctgttagtgggtattcttgtatagctcgaatactcgtatattttagtgttgtgtattttcctccaaccacacctactaatctaacaagccggtacaaaaacaaaaacaaaacaaacaaaaacaaaaaataacaatgcaaataaaatagaaaaaaacctacttttgacttgggccataccataacaatgaaaaacaaaacgccaactcgcgtagaacccaagcaagaaaatgccttggactgctgccaacaaaccatcagagcactagtaatgctccaaaccgcgtagccaccaattaagagtctattctggatcaccctcagacaatcttaaagttttcgaaagaaaattatcctagcaacatggaaggaactcaacctctatctacaaaacagaatcactcccaaccagaactacgctagaacccatagaggggtcgacgtgcttccattgaaacatgaagaatgaagcaagcagcacttgggagaaaaagatggaaaccctagcatggagagaatatgtggttggttaattataagatacatatttgtctagtatagtttttatctttcataatttgttatgattttaaaatgtgggacccatagtcatcctaactcttaccaacttaatttcattacaccacatccacacacacacaaatagacagagaccgactcctttcaaaaaagggtgttttacgtttgattatttttcaggctctacgacggatgacatgataggttgggttgggtggtctccacttcgtacatacatgatacatctcttttatcacaaattaggataagaagttagaagcttcctttatttcatcatttattgtttcacgttattatcttattattatttgtttcctaaaaattaaccagagatttttaaaatccaccaaaagtatgtcctcaagtaatttaattttattccgcctttctttgagtacgttttactttttcctgttgtctttttcagcagtggagcccaactcaacagaatcttactattacttttaagtataacccaagtcatccatcaaattttcttcttttaatttctaaattttaaatttgacaattaagttgaattaatgtgtaattccacttccatttattaatttatcccgggacacaagaaattattttgtttattggttcaaaattcttcatctacaaggtccaaagatattgagaatacattgtcatttaatattaatagcaattgattgatggattaggatttttggcttccaaaatattcttcatctttaggaaaaagtctgaatttcacaatacttcctactactcttttaattatatgtataaataaacacttgaacagacaagaataccaaaagaaaaaaaaaaatcaaaactgtaagataaaatctcaagaacctttataaaaaggagttcgtccaactaatgtttttaagtttttaactacaaagaatgttacaattaggtccaatgagacgtaattagggattacccccaaagaatacctgagagagagggaactgtttccttcaaagaagtttgcatactacactagtcgaccctcaaaactttctccatgatcgataggcataggctgccattgcccttctatacgttccgagacttataagaagagactagttcaatatcttaacgtgatgattttggcttctgcagtgttgagagctcagaaaccttgtaaaattattggagaagaagccaaataagcaaaacatgagtcttcagttcctacccttataacacgtcaatacacaagtcttcattgttttgttcgtctggcaccgagttcagatctggcaggaagtagaaactgtcccggtccaagacggcctttgatgcatcagaagaatctgattttggatgatcatgatctgtcaccttattgggcaagttcaaagaaacagctgcaaaagtagaagtgattctttggtgtggctgaggggaaatcgcgctcttgagggggttatctgcatccacatattttgcagaattctcaccaaactcaagctgcacgagaagaagaatgtaaattgtcatacactgacacgttataaacataaacaagtttacaaaagtcaaaggtctaattcttcctttaagggcttgacataatctatgcaacatttatacgctagttgagtgtaaaaaagacatataactacatacacaagactacactacatgtaatccattcctatcttccacaggttaggctaaggaatcttgaatatagatggaaaatatgataataaatgaggccaaaacaaaatggtagcataagaggaagaagaaggctaaaccaccttaatcctcttcaagctttcatttgtagatctctgttccttgattgttgcccttagtttttctaactcctgtttcatacccaaatttaatgaataaaagtgaaaatacaatagagagagagagagagagtaacacaatgatcatacctttctcaaattcaccccttctttgataagtgaactctcctcctcttttagttcagcaaatgtctacacaatgtcaacggttctcaattaaaaacataattaaagtctttattaaatcaaactagtatgtgactaacaaaccatatgcaactacaacagagaatcagaacggaatgatttcatgaataaacaagccttaagtattcaccttcttccgtcttgatcttctgctggaactggtattgcaacccaaatcattatttgtagcaataccctgaacattttcaaaagaaatggaaactgggtcagtaaagactcctcataacaaccaacaaccacgaccatttgaagttttaacaaagcaaatttatcaacaggccatgaatgcaaataacaaaataatataagagaatagaatccaggaacggcttcgtatacaagttcttcataattttagattgattaatcagtaaccagtacaaatttcgtagcctaccaaggtcgcagtttcaagcttacaccttcagacacgtgtaagtgacccaaaatctattctaatcaaaaaactggcacaatgttacatgacaacacaatctattctaatcaaaaatgcattatatagagacacagttgatggtctctatcgaaacacacaacaaaaggaacaaataaaaattaaaattacgaacattggattggagtaaaacaaaaaaaggaagttacacaacccaataattataaaagtaaataaacatattaaatacaataattccaaagcgtccatacttgtacgtcactcctatccaatgaaaacttcccataccaccaccaattgaagtacccaacaatagaccccaattattctattacccttctccaatggatcaatttttcttattaccaatcatctcattcatttgatccactatgcttcatctcacatatcatcatccacgtggcaacatatgatggaatccgaccttttacatataatatcttaaaaaaggaaaaagaaatgtttgttcgttcttttgaaaaacgtactgagggtcacgtgacatgtccacatgccattcatttcattccccttggtaaaaaaatatagtataataatattaatatttataataaaattaaaaacccttggttgcttgcttgctgacaactcgtggaatctattatcaaacaaccccacacacaatttttaacaattgctatcggagccttaatcatgaccagcgtcatcaaccaccggatcttcggatccaaaagcttaaatccacaaatcgacggtccacggtcgcaatagtcatcagagaaaatggaactgggtatggatttgatattttcaggaagcttaatttagaggagaaaaaaaaagtgacaaagaaaatgggacctacagagatgatataaatatcgaaattccacacaaaagtccggtacagacgcgcgcaccgaaccatatctctctcacaagacccaaaaggaagcaactcccacgaactacacaatacacatatcgcaaaacccagccaaatctcctaacatccctctccctccctctctctctccgactcgtagtctactagtcgctccatacggccccactaaactttttcggatatggcccacttcttcgcactcgaatgaaacctttcttttttagtaccggaaatgacctttggtcccgtttgaacttcggacaagggagagaccgagagaagagatcccaaaagagaagagagaagaaaacgcgaatagcttaccaatgcctgatatcacggaaaccaaacaacggaagaagactgggggtatttcggtcccatcaacatttaattaaaccggaattcgcaacatattttatcatcgttggcagaggccggtgacgacggagtctgaaaatctaaaaaaagaggtggcacaaaaagacagatgagcccttgtcgcatctgacgggggttattttttgcatagtacgacaagagggagcctgatctaaaaacggagacacgggtttttcttttttgaaaaaaaaatacagtaaatcaagaaattaagcatggctaaatgctcagatggtcacagaaccacctccctctcgttggtaactggtgaatagaacaacacagaaaaccgctaagcttacaaggtacagctcactgatggccacagcaagtacggttttcgtcaactcagtaacgaatctaacataccgccaccgaaagagactagagaagagtaaagagagaacaaaaccttggatctggagtgagaaggagagcggttagcagaacggctggactcttcaacttcgaagccatcggcggtggcagaaggagaagcggtaccgctccatgaaagcggcgtggtaggactacatctggttgaatcggattgtttcctttgtgaagcggcggtttcgttgttcctgagtgctcttgacctaggaagtctgacactccaagttagaggaaccatagtcgagggcaggtgaagctgagatttgagaggtgacgccgcgtgagactgcttgagacgaaacagaagctccacgacgagagtgtcatcggacatggccgctcgcatccactcatctttcaccatgctctgagagaagaatgaagaagagatagaaagtggggtttttagagagagaaaagagggtggcggatgaatgagagagagaaagggaaagaaaaagaagttgaaaatagagaatgacttcaccaaatcgtggtcttataaatgtgaatgtgagtttttataaaaatatataataaataaaatagagggagagaggtggtgtcttttgtgtggtggtgaagttggagtagattccagtaattcggtttttctctcttttctttttttttttttaatttcagttaattaatttcatcttcgttgtttgttgaggttgggtgtgccttagaggattcttacttttttttttttgttttcttttctaaataaacaaaattatatgagttgtcactattgggacccgccaaagtccacgtggcaatggtctttttgagtttcgttttgggcttctagggctccgtaaaccgatcacccaacaccgttccgcgcgcctccttttgagtgcgaatgaatgagagcatagtttagaattaatggagaatttggagaaatggatccatcatcattttccatcactttgattttttgtttttataattcttacacttttttgttttgttttacatatttcgaaaactatatattataatattttgcaaatatccacaaatttgaaatctcatcgatataatataatgtatggtccacgacgacggaaatgagatctctcctccttaagttgtttatttaaatagtcatttgtaaataactaaagagtaaaatattgttagaaaaaattacaattagtacgcaaatatagtaacataattatcgttctcgttaaaatttacacaataaaatttaataagcgcgctaagtttggttttctaattactcctaatttggtcgctgatttagaataaattacaaaattaagtcttctgttatttacaagaaaaaaaaaactaaatttacatcatattttttacaaaagaatcatttcaacaacaaaaaaaaaaaaagaaatttttacacttggtgtccttttttatcctttttttacttttttgtcaatgctgggttatttaaacttttatacaagttttatttttcaattttacattttcaaaagtttcataattacaaatatacctatccctatgcttatgtcatggttttctctcttcttacactccaccacttccataactcctcctttcttt

SEQ ID NO: 110709 - DNA, 10274 bp, Cannabis sativa
tacatgtcaatcaacattcaatctgcacaagtgcggattttaaattttttaatccaatccaatctgcacaagtccagatatctgcactttgcgaattgaattggattgaattgtactgattaaattggattagatgaactattttataaacactcctacttgatgataagtctgaaatcacccatctattttggctttttcatctttgaggaacaattctatttctataatcaacatataattcagttgcaagcaaaaagaaaaagaagattttttttttatgccacattttgtgttttgttttgtttttctaggatctaaggtttttttttttttcttttttaaaggtaggatctaagtttcttaatttaaaaaatgagaaggaaaaaaaaagttcactaatgtgtggttacatgaacataacacatccatctcaatgacacgttttattagttattactcattaactaatttattattggcattaatgaatggaaataatttcttttcctttatataatcttccatggttattgcacatattattttctctttctacatttatactatttttgactagctgtcctaattaattaattattattaatttttttttaacaaagctgtcctaattaattattattattttttgtttgaaagaatattattattattattattattatttgagaaaagaattagttattattactctgacaagatcaaagatgaaaagcttcaatttattgtatttatcctctttattttagtattttaattttaatacatcaaaaaattatttattgtcggttatctaccactaccctaaaaagtaattttttttttcttttatcaaattaaataaagaaacttgaataagtgttttccaacgtaataaaatttaaaataatcccaatcgaaaaaatgccaatctctaacttaacttaagtattaaaccaggaacaaatattgaccaaatattagaagaaaaaacatcatcctatttatttatgtaggggatttattaactaatagtaataacgccttttttttattccttttatttttaattttattttatttttaatttgttttttcccaaaagttttttttaatttttttttttttgcgttccttctctttggttcacaccgaactgtagatgcttatgtcggaagattgtctccggtttcaatcgtgttctccaggactcaaaactttccgtttctggttctagggtttctccgatcatctcaaatttctctctggtacttacggtagttttttattttttttttctagattgagctatttaatttctcaatttctttagtatgaaatcggagttcttgtttcttctctgagaaaattggggaaagggattaaagatagtggaaatttatgtttttggggtttatgatattggacttcattttaaaaaaaaaattgattttgttttattcagttgaagttataactattagtcctgtcttgtattttggatctaaattttcaatttgtagaagagtcaatgttctagtctttaatagttttcctgcattttctaagctacttaaaatgagttttttttttttcgtatagttgatcaaggaggcctaatttcttttcttttcttcgctttgttgaattgaatttgaattttatctattaaatgtatgctctgggcaaacaaggattaaaattagggtttcttttattccccttttgaaattcaagtggtaatatattaatttttaggtcattggtgaaactgatctttgtattgcattcattcaggttaaattttttattgtttacactagattaaatgtcacaattattttccttcttttgtagagtaaaattgactttgtattgcaccatcttaatcattacttgagacttggaatctgagatcatggccatgtagagtttttgtcatgttattcacattctgatggagtcaagggtcatcttgcaatccgaggcacacctcaattcagacactattgcatctcaagaaagagaaccaggagtatcctcttctgcaccaattaacattgtgcctcagcaacctggtaatttgttctgacttctggtttatgatttcttagtccggacattttaatgatattttccttttgagtaagctgaaatgtcatcctttgattgatatatcattggcaattacagtgaaaaagcaaacacgacaatgggctgcgtggacacgtcaagaggaggaaaatttctttactgcattacgacaagttggaaaggcatgttcatatgtaatgactgctttgacatggtattagatgttttatcatggtagtttctaactgtaatttcttctgatttcagaattttgaaaagataacttgtcgtgtccaaagtaaaaacaaggatcaggtaatttttatgaaatattttggggattcttaactaattgtattcatactgtcttgcaatattttgattttgatattcttctacttttgtttgtttgcattttaattgtttttaggtcagacattattactatcgtcttgtgagacgaatgaacaagcttcttggcccaggattgtatcttgatgccaaaaactctaaagatactaatgctgcaatgcttcgttggtaatatttatttgtagtggaatgcatggtgtaaacactttatttttatgagttggggagaaaataatattgcttcctgatgtttgtctctccttatttggggcactgttctatacaattactaatacattttgtgactttggtggttcaggtggtctttattggaaaagtatagctgcaaggcatcgaaacttcacttgaaacctagaaggtttaagatattcatagaagccttggtaagcccgttttctttctttttttttttatttatttattccattaatgaaaataaggaattcattctgatttttaccaaactgtctgaaacattcctttcaatgaaggagcaccaactgttaaaggaccgaaagaagagtgtgagaaaacgacctactaatggggatcacagctctcctactcctaacacagttataaatcagggtagaacttcaggtcatgaaagtcgtactgttaaattggttcttgttgacagtcaaaacattcagaaagtaggatctgggaaagcaccgttgaagcgcaatgtaaacttaagcattaaccgtagcaataataaaggggactcgactaccatgaaacctgcaaggcaacaacgacggaaaccaggtatgttttctttttctatgtatgggcctaaacattatttgttgttgcaatattcactaaagttgattattgatacatacaaaggacagtcaattttttttaataataaacctgtatggaacttatacgcattgaatgccaggtgttgtatcatctgcagcatataaaaaatgggaaaaggctgctattgctggggtctctctggttgctgatgcggctgaacacttagagcggacatcaactgacaaagagattgagcaaaatcaaagtacctcaggtgaattgttatgccactggttcctcattgttattttttattgaaaaagttataaatcaaggaggttcatataaatttattcatattaattgtttattctcttctgatttcaggccaaaataagagttctgaacctgttggacaagtattgttctctttgcccaattttcctcaaaatccttttgctgagagcaatataaattcttctatgaaacttaagctccaattattcccaattgatgatggtactagacgagccttggaaatggtaggcactactattaacaaaactccattttatgagatttttcggaattaccattcactgagcgccactacttttggcttcaatgtgttcacaggataaattgaatccccaccttgagctcactcttagtaatcgaaaaagaatatcatcagttttggaacgtctgaatcgtaaatggggcagttcaaaggttgcctccggagagctaatgcttttccctttcagtgttcaaaaagaaaacatagttggtcatcagagctggactctagactcagttgctagtgcagccgatgtatatgcgatgattggaagtcctcaagtttttcgattaaggtttctaactatactctctctctctctctctctctctctctcaacaatgattttatgaaattaatgaacactggaaccagctaactgaatattcttgaaggtatggttggattcccactgccgaacatgggtttgccacatttcaggagcaagcaccattgccacctcgttccatttcaggagagcctaatgtaaatatggaaaagagggaccaggatatgcggggtacaacaaccatgtccgttccatcaaccactcatcaatccatggatcttcatgaggataatctagtttcggtgaacaaaaaccatgattctgcttttacttcagctaatgtggtgctgaatgagaagcggtatagctctgcaggtccaagagataaccttctggactcctgtgatcctactgcaagtgataaaccatggcatggaaagggtgctggtggtgagactagcatgaggcaattgagagatacggtacttggccttcctctgttcctttgcaatgaatgtcagcttagatgtgttcctaaaaagttgtgccctttgagggccttgatttttctccttgtgccattcattctaaattagtgccttgaagctgttatgaccattttttttctattacattttcttttactaactaataactactattttgcattgtttatatttagcagaaagatgccccaccttcattcaggaaaaaaaaataaataaataaaacaaaagagaaagatgtcccacctgctttaaataatttcatgttacaatctattaattttaattcaagtggactatttaaagtttaattttgttccctagtggaaaccgatttcttgtgtcaagctgtttgtgttatttataacatttcatctatgtttgttaatgttcatctgtatttgctgagcatgtaatttccttgttgatttaggatgacataaggttaagcaatggtagtggtctatctcctggcgaatgggctgatagcctaaccaacataagtgttggagatctactttcaggagtgtctcaagatatgaatgctaacggcattgatccaccacctgctgaaagtgctcactgccttcagcagatgccattcagctgtgactcatttgatgctgctattgccgctcatatatctaggcagcaagaaaaaatgggatgtcagcctactttggtgtcttcaatttgggatgctgaagaaacttgtgatggcttcttatttcaaaaaaaccgagtccggtgtcatgagatggaaagtccaactggtctcactacgccaaatgcttgcaaacaaactactgagacaaatgtaatggaatctatccatttggatgaggtaataattgagattgtgtcatttaagaaattgatcaaatcatactctgggaacaagcatagttatttgcaacatacgtctaacacttttgatcttttgtgtaggagttatctgaagtggaggaaccaactgatgattctgctcgaggagatcctatggatgaccgtggtcttgactcacaactcctagagaatccagctaaagatttcagcgagcttgcagatatgtattgggtactttactacttatcctttgaagagttctgtttctgttatattttaaatcgcctggttgcttcatagttttccgggtttatttttgctggaaactgtcattgatgttataccagaagtagtcatttttctttgtactaagtgtgtttatttattcacctaaaaaagaagtgtttatttatttaatttttattctatcaacaaaagaaagtctgtttatttttatctagttctccttgatgctttatctacatcttatgtagcaccattctcagtagcctctttttttttaagtacatctgattttatgattctacatcttgcagcccgagtccttaggaccattagatttggatataccatcttccaagtaccactctgaagatcttattctaagcgatagccttagcggattgaaccgtctgatagccagcagtttagatgcatttcaaaattgttcattttttgggttggacaagaaagaatcagcatcaacagttgaagctcgagagtctgtctccttttcagattttaaaattggcagcggtctttgagaatcttcaaacgggatataagatagatgatatcttgtagattcgaggtttagcattgaagtatagctagcatataatgattttctcaagttcagctagctgacttcatagttgcatggtgaaggtaccgttgtgactggaacagataatggttgtgttctgattgaaaatatcatccacttgtagaaattatagacatggaagaaacttcacagttccaacttttttttctttctttctaatagcttcatgtaaattgtgatccaaagctgatgtgaggagctatgcaactttaacagaccaaaaggactttgttatcggtgcggtgccagtatatatcctttggtctctaatattgatttcttgtacattcatattgtcattctttagttctctactcttctaattagggttctattggattaatgcctaatgaggaatgagatttcatccctttgcatgggttgatgttcttatatttagtgtttggattcttaattgtttttactttacctactgatggggcaaatattgcaaataatatgttgactttaggctcatttggtggagcttggctcatgaggctctgaatgtaggctgatgtggatgccatatcatttgattatctaatttgtgttttataattgtggataataaagatacattaaatgtttgatactcaattactaattttccatattgggaaggtacgatccacaggcgagatcttgggatttaaattttgatatcgtgggatctggtaattaatgagcacgatacagagttggttgtttagatgtctgctggttgcttctttggacgctccaaatgatgtcttttggattcttgttgtgttggaggattatctcgcttggacgagttgcctatttgtcatctagaagatctagcttcgctaatggatctgatccattatcttggttggtccttaagtgattgagttgtaactggctttgaaaattacacgtgttttcattcgaaaacacggataacatttactttaagctttcgaaactctaagtgttatggaagcttgcaccctccctctcggacgctgtgaggacatttggaggctaaaggtgaaacctttttgaattccaaaccaaaattgtttctggttaacaacttgtttttttttttgaaatgaagcgacatgtggcattatatttttggctcgtgaggattacttttctttgtggagcgcttgcagcagagcttcacgaaacgacagctgattgcgttagcgtacgtatcaaggagaatattatcattggatatctggttaccaagcattgcattaaatacgtatttgacaatttttttggaccattggatttgtcttgtgttttctttgacataatcttggccattgctctgaggccacatggatttccatttttatgtataaatacgatgaaattttttctgttagcacttctattcaaaattttaaattgagttcaaacttgttgagaaaagacgacgacgaataagagaaccttagagtattacatcgatcatttcatttatcttctttaaatttgtgaatgagagggtctaggagcaccactcccaatgttaactaccgattcttcaacgccatcaaaaacactggctattcaagcggaggttgaagagctcatcaacaaaactcatatgcttcaatccagaattcgacgtcttaatcagatttcttcgataggagtttccttgccaccatcacatgccattagaattcctgaatcaaatactcgacttcctccttgttcttcacctccttctaattcttcgttatgtttcccttttttaccattctggaatcttgattgttgtttgggtttggcattcttttttaatttttgcatgcttgccttgagttgttgatgaatagaatttagatcttggagtgattttgaatattttgcaaaaataagatatttcgcacatactgtctgtagtcttgactagtttttgtaagatttttctctttctattgaatattcaatttaaaacaatagggatggctaacattgcttcctctattcgggactcttatggttctggataatatgtcgtttgtacttttggttagctttttgtgttccccatttaataatattctttgagaactttgttcagtaaatttagtgtgtaagtatacacaatctaatgaagtaatataataataaagtagagtatcgtttccacgagaattaattatcaattaccaattaattaattctttatttctatttgatcaattaaaaagttttagaaaaatcaataaagcaaagaaaataattaaaaattagagaaataaacaatgagaaaaataaggattattatgattctcaactatcttttatttcacttattaaagcaatcactcaatatctcttctttctattcaattgacaagttgaattaagttgttcataatctggttaagaatcacaaactcaatctatatgaaaactccctatattcctatagtaaagtttaatcactaacaaaacattaaaccaagaaactcataaatcatacaaataatctagatactttcgtcctaaattaatttgcatccataataatcaaagtatatttaaatctcacttttcaaaattttgatttgaattcatagatgataattatagattaccaatagagaattgcaaaattaaatcacattgcatggaattgaaataagagaagaaaaagaaattgcataactacattaatccataaaataaattcgaatggttcacataataatctgtggagtcttaaactccaaacaagaaccaacacaacaccaagaacaaagcacaatgatcaagaacacaaactggacataaactaacaacataaaccaacaacataaaccagaaataatcaacaactaatgaaagcataaaacaacaacaagaacttacgtggttgggctacacaatcaagatgatcacgagcttaattcacgggagaaagtagccttaaattggctgtggagatgagctttattgatatgaaaagaggttacaaaaatagggattaaacccttcactcaatggagtcttgctccttacaatgtgtcacactagtgacactctcaaacaaacacataggaagccatttacaactctcaaagactctctgaattttctctctaaaccctctaaattgttgtcttgaacatacacaagtatgaaacatatttataggcactcgggtaacacacataactaacataactgtcaagactgttaagttagttgggagagtaggctaactgtcaaaatcgacaatgagagagtgagtccaagttcaagggttcaaatctcaacaaattcggcttggtttgatcacttgaacacctctgtaatgacttccaatagaagaattactttctaattccaatgtaggttgtctccacaaggagacattgctttagttgattctgagtaagtttagaaaatgtctaaacttgtcacttgtggtactttttgtaaagatgtctgcagggttgtcatttgttccaatcttcttaacttgaaatggaattttatatcaatgtgcttagacctctcatgaaacattagatttttcatgagatgtaagggactttgattgtcacagaaaacagtgatgtcctcaaagtttatctccatttcatttgagccaaataacttccttgatggcttctgttacaaccatatattcatctatagtggatgacagagcaaccactttttggaagtttgatttctagctaacacatccttcatagacagtaaaaacataaccggttagagaccttctagtgtcaatattacctgcatagtcaaaatcaacatatctagttacaaatgtaactggtctctgtaatcaaataccagactagtattcaatgttccttttgttgaccaaaagttaatcactcacttattttgatgatcaacaaatatttgattattatttgttactaatctttt

SEQ ID NO: 110710 - DNA, 2487 bp, Cannabis sativa
gcatctctaactcgcctttcgtctatagttaaaggcgcgccgatatcagaccaattccaaaccattctcttcttttctctgaaatcaagcaagctaatgtaacagttatcttttctagggaacaaagttgctacaagcaaacaattagtaccatttaaccattggagtttgtcagcctcaccaagtgaccaaccaggtggttcatagtaaaaatcaacttgttttccactcacttgatcccaaacaccaattccatactcattgcttctacctttacagcttgagtaaatcttgtaatcagagctaaaactcaatggcccagctgtgaaactcttggtctgttcctcatgtctgacctgaaatttgtacctaagctcaccactagaagagctaaacaagcccattccgccatcgcctcggctcggcctctcgcacacactcacaaccacattctctgaatcgacccaaccgacgtcgtttactctctgataatctagattgattggagggtgttcttccatcatccaatcatagacgtgaaccatactaccgtgagcaacgcagcagccgccatctgggcctgctcgaatggcggttccgtcgccgggagcttggccctttactgaacgggaaaggcctaatctgttgccgtcgaattgaccccatttcgctaaacgaacatggtctaatagaccgtagtacaaggcttctctgtagagaagcttttctgggatgtttgaagggagataaagctcttgtgttcggagaagatcgaggagtacagagaagcaatcggggtttcgatcaagaaagtactcgccgccgccgccggagttaatggattgttgttgaaggttccaattttcgtcgaacatggctccgaacatggaattacgacccgcgttggctaacgttgtggctgttgtttcgaagattcttcctcccacgttgaatctaactctgtctctttgaattcccatggtcgaaaattttcccggaaaatgaaactattttcccggaaaaaaataatttaaactccaatatcgataaaccggaattgggaattgagaaactcgtttatataccagaaactgtaatggaaaacgaagatttgtgtatcaagaagttacatgaatgagcattttaaggttaccttgttaataaacagaggaaaaagaaaaggaaaaacaggggagttttgattgatcaatatgaagaatttgatcgagttctgagaaaaatgaagatctgggtaatggagaggagaggctaatggagatgggtttttaaatttgtgggatttggtgaagaagaatttggagcggttggacttcaaaaaattaaaaatacaatcttttttacttcttcttctgctgtttctctctcttaactctctctcctctctttactttgctctcttctccatgtttttctctctcttcatttctttaccttagagaaggacatagttggaagtttatttttcaatgggatcctctgcgatgtgggtctacgttaagagttgtgatcctcctttgatcttcacccttggattcttctgaaaatgatcatcgaacggtcaggagattgtgatgtaggtaatagtgccttattaaattccttttgctgttaagaaacgattccatgaagtcagctctctttgccctatagaaagcgtgtcttgtggggttgtttttaatgttctttaatcttaaaatgttaaaaaataaatacaaaatttgaatgaagatattgagactttctattgtcaagagatataggtttttaattatttaatttgttttccttaagttatgtcactaattaagggttcttattaatcttattcctatccttactttgatttggtcacatcaaatttatgacctaacaaattatattaaggttgattagacaagttatataaaaatattttagtgttatctttcattggataataatgtccaaatttttaatgggagaaagaaaatgtccacaaaagtaacaacctttggctttgagtaaacttccttagacttcaaaaaattcggctaggcttttaaattttaatcttatattgtggtaaagttaagtaatacttgaacaagcaaaaataatttggttttattcaattcttttttattttttgtttcatcaaaatttggtttcaatacttaaaagcttgaattggctcttcttgtacaaactactagattgtgacttgtgagtggaataatgcaacagctccaccatgtaaacaaaaatgtacttctctttatctaattttccacctaacaacttattttcatgccttaaaatagtattggagaagttcataagtaaattattattattattattattattattattttaattataaaaatataacttcccatgttttttttttctttttgtatgttatggatcattattataactcatatatacaataaggtgattctacaatgcacccccttaaaaggg

SEQ ID NO: 110711 - DNA, 3366 bp, Cannabis sativa
ttgtttcaacaaatactacttttcaacaaactttcttactaatttaagtaccttccatgattctaattatgaagatgcacatgttcatctcaaaaaaattcagatattaattgggccacttatactgacacccaccaatctgtcactggctattgcgtcttccttggacaatctctcatatcttggaagtcaaattcttcgttaaagttgagtatagccacaatggctaatgtcacatgcaaaatcacttgccttttagcgctagtccaggattttggcattgttcataccagcccatctgtcctctactatgacaatacaacgaccactcacatttccaaaaatctcatcttccacaagcaaccatccacatttggaaaaatctcgtcttccacatccacaaatgaaacatattgaaattgactttcatattgttcttgagaagcttaaaaagaaggatatctgaaacttcatgtctccactaaaaccaacattgcaaacttactaatcccctttttcccaatcaatttaaaactcttgtatccaagatgaatgtttatagttgtattctgggtacattatgtttagaatattgtattctgtttttaggtctttgcaacttgctgggttgatttccttggtatttatattgggcaggtcctctttgatttatttgtataaatactttcttttgacaaattaataaagttaatcagagtttatactcttttctaaatcccatcgtatgtatcagtttgtatccttccaaaacataaaggagcaaatgcattctgccaatcatggaaagagataatcatcgaaaacattctaaacaatatgttttatagtcactaatataagaccaaagaagtcagaccaagatgtgtaacataaactaaacaacaaaaaatcaacttgtttgtttgttttaacataaactacgcatttgggtgatctggtaagcgcttcagatccatttcaacttggtggattgtccattgcatggtttccaagtcctgcaaagattatattagtagctattaaacaatttactaaccagagtgattaaaatgcgagctgctgacatacctttacaatttcacggtactgttttgcaattgaatcaaagtgaggatcaacaccttggtactcacgaagacgcgtaacctggtgacgaaatttcataatggtttataaagtcgagggaaaagaaattgaaatgtcaatgctactgctaatgcatgtctaataaagtcgagtgaatgcaatcaaaaaggagtttttgctgaccctgatggcataaatgatatctttaattgaaatataatgttggaataatcaagtcagtaaatgatttagcactgacgtagtaatctgtcacatcaaatataccctataagtcacctaggacaggctgacggaagtcccaacaataacaagaatagttcgggagaatttttaacaagaaaaatgtaggggacaagatttgatagtggtaatagttcgcgagggatcctatttattcttgattttactattacagattgaacgagaaattctgttatgttctaccataacaccttcatcccacattttattgaacatattttcttttgaaaaattagattttgcttggaggacagtagagtttggttgatagtagtgaaatgattttgtgaaagtcagcctttcaaaagcttactatgaattaagtcttttcagaattatacaatagacaaaactttatggaagagctgtgtttcaagtaaggagaaatattttgtttggatgctgtcttaaaatcgcattaatgtcaacgtgcaaaagaaaagaccctgccacttatctccagaatattgtgttgtaaatcacatggagagtctggtaattgaatttttccctactgtaaattctctttgaatttatggcacaaaagtatcgaatgaactcttgtgggatggagcataactcttattgcatagttttttcaactatgtagttaataaatcaattgttcagatcatatttgatttctttttagctaaataattgttaaatgcttcagagtttaaatgtttacattgtgttttagaatttttgtttataggtcatctgaagtggtgaagattttaaaaattttgaagctgttttatgagaagttgaagatggacatcaatttgacttaaagggggcgtttggtataaggttcacacttgatgggaatagaaatgtcaaactaaattaaattttaataacaaggagttggtgtttccaagtggtcctactttttaaatttaaatggtggtaatgttaatcccctccaacacttgggtttcaaattcccttcaaatctactccttccaactctattctttccaactcaaactcacataataaacaccccattaggtggcgtttagttgaaaatgaataaaaacataactagaatatgaatggcattccaatactttaaaataaaaccaaacaaataaatggaatagaaattgtttcctttctatttcattacctcaaatcaaatgccacctaaaagagttgatttcgcggtggggtgggctttgtggaataagagattttttatgacaaaaaagataccagctagtttttatggaataagatcaggcaatgggttgcagtataagggtttcatttccgatcttatcaagatttccttgtattgtcaaagtgaccctcattattattattattattattattattattattattattagccgcggtaaaaccacctaaatttaatattttttaatacttaacctcgaaaattaattttttgacggcaaaagctaccaaactcatattctgttttgctctttacacttccgttcaaaactctcagttaagtaccacagtggactgtctacgtgtatacaagagtacacgtggcaaaattttagtggtccacgtaattttaattttaaatataataaaaataatttataaattataaaaacaatttataaaataacaaaaaataaaaaacttatttttcttttttttttctctttctctttctctttctctttcttctcgaacgagaaccccaccaacccaacttcttctttatcttcttcttcttccttctaccattaccaccaccacaccaccatcatcccaccacaacaattgtcacacctcaaccaccatgatcaccatcattgtcccaccattaccaccacccttatcaccaccaccattatccctaccataccaccatagccaccactacattttcactaaacctaaaacattttcaaccaccattatcaaccaccattatcaccatcacaagcattttctctaaatcaaacaaaaaacatacagatc

SEQ ID NO: 110712 - DNA, 1737 bp, Cannabis sativa
  modified_base (1669)..(1701): a, c, t, g, unknown or other
agtacaacttactagagaaagatctcgaagaccggtagagtagagcctgtctagctcaccgtcaccaagctccttcagatcctcatccatgaaggggatagctctctcaatgtgcctattggctgcctcagcagccttgtacccaaaaattgaccccgctcctctactgggcctcacagtaccctggtctgcaggccgtatcacaagctaccaagctggtgcacgccaaggcagagggggaggcattgacgacccagtattatctccaccatgagaagtcttggccaccttggccttcacttatcttgtgggctcattttaaggtcccccggtatgacctctcaacttagaagacatatctggaaaaagaaagtagcagagtcaaaaagcaattataaatattaatacagaataaaagcatggtgttatcaactatcaaatatcactatcattagaaaaggaactatcagagtcctcgacaaccgccttatgcttgcctctagatacaggcatagggtgagtaggttcctaagaagcttggcctttaaacccgattcggagagaagcatcaccaactagacctccactaactaatcgctggcggagggccctctccctcctctctaaattctatgcaatgtgagataaaggtacgtcatcatccaagtcaggagcttgcccatctccaaggtaggtcccatctacagctgatgcttctgcaactccaggaacagaaggatacatgccatacttccaaaaattgccgcactagtcaacgccaatatgttttcaatttctttagaaagagcaaagatgtggttcgccctataccttatttgcaatgtggggatagaacgcttgaagaatggcactgacggaatggccaatcctcctaaggccataagcaatgaagtacctcttggcatacctgccaacttttgacatcaatttaccatttgtgtctcccaacaactggtgaccgctctgattgaaataaaagtacccagtcctgttctgcttcggggcagatttcacatcaaaaatagtatatgatcttatagggagtaggttgtggccaacctagctccctatataagacaaacatcactaaaaggtacttgatactttttagggtgatttgtgtcagattcatcccgaagtatgcaacattgtttaaaaagtaaggatgaagtggtagcgctgccccatgctcgatgtggcgccctgaccaagccaaccacccaaggggaagctgatgcacccgataatccctacaaggtatctcgcaatggacacccctcactaagccactagcaaggaccttgctaaaggcttcatcagaaagagaggaatcgagagagacccaactatttccctgtggtctcgcatccaatatctccggctcagaagactgctctaagacatgatccaacaaaagctctgaacgctcaccaagcatgttcaacaggttatcattagcatcataacgactcaagggagaatttgggagaacaaaacaagtcctctacctcctcctcctcactagtgcggcctcctctagattagattagtatcagatttttcatcgccttagtgaatctctaactcaacatcagcacacagctaagctgtctcctccaccatcctaactgttgggttttgtgccctnnnnnnnnnnnnnnnnnnnnnnnnnnnnnnnnntaattaataaagatcataaatcgttttatgttgcat

SEQ ID NO: 110713 - DNA, 2063 bp, Cannabis sativa
  modified_base (1960)..(1966): a, c, t, g, unknown or other
cttgtcttttgacatggttctttactcttgtcttttgacatggttctttagtcttgtcttttgatatgattttttagtcttttccttttagttttttctggtttgggtcttgtcttttggcatgggttatgtagctcagaatcatcatggttctatagtagaagtattcaagaaggggaagattagatgtgttcaacccaaaattgctgagataataggcattaaagaaacattgagttggattgcaattcattcgtgtgatagagtcatgttggaaacagatagtttgatgtgtgtccaagcgattcagagcggtattttataccttcacaatttgtgttttgtaaaacgatctgcaaataagttggttcattgcttggcaagagactcttgtttctctacaagtcgtgtgtttcagttggaggagtgttcctctgaagtacgttctattattttgaacgaatttattaattaataaatcttataatttttttaaaaaaaaaaaacaaaaaaaacacaaatttcattcctagctgtttcatatttataaacaacttttataaatttgtaaactttacataactaatttggtaaattacgatttctttttttctaacaaacatcaataaaaaagatataaattttcctaatatgtaagctttaaccttaatttatttagaaaaggagagttatagtgaaataatttatgttatattaagaataataaaagataaataagattggtgcatataatataataatattggcacgtgatgaattaaattggtgaattgtatgaaccgtacaggtactgaacagtacagaactgtattgagaaacagaccccaatctaattaattaagctaagcctagggttgcaaaaaacacgtggttgttattcaaatcatatatcattatccgtactgttcagtagtgggaatctgacaccattatttatttttattttcttactaataatacaccactcacttgctatgcaaaattagattatgacttcaccaaagtctttttcttttggcatattcacttttccaaattaaacaataacaaaatctctaatatatatttggggccctgcctccaaaaatacgcccaaagccacgtaaaattatggggatttttttttttttcttttcaagaataagagaaaaatgaagaatttttttgattaactacaaagtaaaatgagaaggtagcagtcacaaaaatgtagtgagaattggaatgtttaagaaaagtgtgatgtgaaagaaaaagtgataatctaatttttaaattttttaattaataatttttatataaatataaattaatacattcttataacaataaactaactttgtctataggtgagacttgtctgttggctttgaattcagcagtggatcaaaagcatgaatatgtgataattaaaagtgattcagatattgtgatcaatgttacgaagggaatcatgtcaagttaagaggtgcaaaattatgttgatgtgcctttttgaatgcttctaatttgttgttaagattgtaattattttattactaaaactcatatattttttctaattttatggtttataatgttaccaaaagagcattagctgtaaattttattggatatttagggatcgcctctatgtcaagtgatgtattttgtttgggccagtaggtatttcttctaatattaacgttgcttttcaaaaaaaagaacttggtctagcagtaaggaatttaatgttataattggtgaggttaggggtttgacttttcattttgttaaaattttgcactcaaatttattattatttttttaaaaaaaacttcgatgggagtcaatcttgagcaaagcaagcaaaaagattatataggtgttattcccgcaagtgtacgtttatctctactcatgtactgttaatttgcaaaatttgtgactaaaagtgaannnnnnntgactaattataaatcataattcttatattgtaactaaaaagttcgtggataaaagtattagtcacaaaaattacaacttgttgtgactaaatatat

SEQ ID NO: 110714 - DNA, 9134 bp, Cannabis sativa
acaagatctaaaatcaacggttaaaaaaaaagttctctaccgatagagaacttttactaagtcctaccataatatatataatttctaacaaatactaattattatataaatgaataacatttttcattatcttttcccaaaataagtattggtggcgggtgtttttgtcaactgtcgcgtagcaaaggcacaatgttgagccgaggcagcagtagtttcgtcaaacacttgttgagctctcggcgcttccacaaactcccattccatgttcaccctttctctccatcttcacgctctcttttctcacccttattcagagcccaccgaactctaaagctaaaccagcccaaacccatttcaaacttttcttcagagacttccacagccagctcccttgtctcttcttaccttgtagtcgacgttcgctgccataaacatgttgcggttggcttcttcctttccaaacttaagttgggtatatcttctttttcctattaagcatacggattattgaggacccaagtcatattatttattggccaggatatgctttcagaggctcttttgtgctttggagcaagctctgccaccattgaccaaaatgatgctgatgacagttctgagtctgatgaggtgaacccatctgtctctcacttgcattggccaaaaagcttaattaaaaatgcttgcattttatgtcatttgttttttaaaaatggcttcacttttctgttttgttttgtgtcttatggttcttgtcaacctttttaagagcatacaatagtactaaacaatgagcagtaagggataagattttatagtgaaggttttgtaatttgatttagagtaaaatcaatataggtaatttaatgcattagtggaatgctcagctgagaatggtttagaggttgtagtggaacaataaccaaggttttttatatgtataccagtgtgcctccattatatttaacttttaagagagtgaaaatatgaatatgatacactaatatgcaatgcatatgatattttaaaatacggaagataggagcctaaagtttaaagggaataacgaaaacaatggagagatttaaacttgaatctgctgcatttcaatttcatctgtattcatgtttttaatgtttccttaattataaccaactataataagtaaacattactatgtatactgctacacttttcataaaagtagattaacttttatgcagatatgtattagttccatatttccagaagatcacaatataagttcgtccatttcacatgctgctgattctattggcctgaaggaattacctaaatatgaagttagggtgggcgagcaatatgattggataaggaaaactcaggtcaatttactttattgtcctttcagtaggtgttgcaaaatcttagcattgtcttttatattaaatacttgcaactagattaaccatattgcttctttgcctatactatcttcagttttatatacccctttgatgacactgatctgtttttgttttcttaagagctgtataatagggatcatgagtaggatcatatacctattctaaaattgagccatgatctttaaagcactttctaatatggctcatgcattaagtttctgttgaatgctttaccactcaagaaagttatctttatctgaattttattgcagatctatacccttaattagacgggccactgaggagaattaaatttttatctatggattggatatgttgagaagttctgctaattcatcaattattttaaacaacttataatcagttggaatttgttgtatgaattttacaggaatccttcaatccagtcgaagttacaaaaggggtttggattgtgcctgagtggagaagtccccctgtatgattatcttaatcttcgtctataagtatttgttgcattggtacatggtgattgggtataaatgttttattttctagtgttagtctgctggagctgtggttcattttcattcatagtgaagaatgtcatctttaaagatatcttacttgcagagtaaatatatttatgttgctttgctgttataggacattaaagcaacaaatataatacttaatcctggattagcattcggaagtggggagcattctacaactaagctgtgtcttttgttgcttcataatttgattaagggtggagaactcttcttggactacggcacaggttctggaattctcgcaattgcagcacttaaggtatacattaatgagtgaatcttaaacctaaaacttatggaaactgggtggaacatggacaaaagtcaagtatgaaccaaagcatagtaagcagttatccatattacacttactatttataactttctcattaaaatgtgaacttaattatctttttggtgtctttacattggtgatcctttgtaaagcaagatgctaaacaaggaacatgtttctttttaagcaataattatgccaactaactcagaaattctaagttcacatcttgagtggtgaaaatacagtttggtgctgccttgtcagttggaattgatatagatccccaagcaattacatctgcacgccagaatgctgcactgaatgaaataggacctgagaagatgcaattatgccttgttccaaacgaaacctgcactacggcaacagactcatggggaacaacagaagaacaaagctgctatgaagttgaaatgatttcagaaacggagaaatatgacatggtggttgcaaatattctgatgaatccactattagatttagcagaaaatatagtgtcttatgccaagccaagggcagtgattgctctttctggaattctatccgagcaggtaacttcccgcaataacatgtagacttgaatttagcttagtgtggtttcactgttagaaatcaattctttcttaaaattggtgtagtgaacttgtatatcttaaaacaaaaaaaacagctagctgtagtattgaacttgttagatcttctcaaatgtcgtcaaactaaaattgtttggtagagaagttgtgtttattatttttgttttgtcatatgacaaaatcacattcgatttgtatacttttgattcttataaatcacaccttcttggacctctgataaagtttggatcatgggtttgatgcaggttccatacattatggagcgttactcaccattcctggaaggcataacagtgacagagatggatgattgggcctgtgtttgtggcacaaagaaagcaaatcctgctgccaactgagaaaaagataaccctgtgaaattctcaacgaaagtccccatcaacaaattctctgcttggcacatgaagaacttattcaaaaacttctaacagtgaacttattttccatgatatccgttctatattacacacaatttagaatactatttataatcaatgatatagaaacatacatcattgacccattaagataattgaaaatattaaaaattgttagtgcaatattaagtcttcttccctgtctctaaaacagaagtacatcaactaatcaacaaaaaagtacaattatgaagagcaataagcatttatagagttaatgagatacctagtaacaaaaccttagttagactggactcctcatcattagcttcagttaaatagaaaagactactacactattaagagttagtttcacattgctaatgtgtggaaataaattatgataagacgaatgagctactccttctattgtcaattggttttgagatggaacctcattcatcttattccaaaattttaacctctagtgttggggttttcgacctgtttcaaaattcacaaatttttttgagctacttcttccattgctaacgggtaaaagcccattactgttattgtgggtgttttgctacaattgttgttgtggactgtggtcgtagaccatgttgggctgtgcaacacttacattggtctcgttgatggccctcttaacctccacatgcttatcgtttagtttataaaaaggttcattttaacacatcttctacagcttctttccgtactaaaagtgacagcacaaaacctcttccttttccagtaaaaatgtcacgcttaatattctcacaatcacatcaccatatgtggccaaataggctttttagttctgtttccttctggtgatgtagacctcaaataaagatgttattcttgtaaaaaatagaatcatcgttggtattactgtttgtttcccatgcaccattctatacatacaataataaaatcaaacaattaattaattaacataaataaagatttaatgaaaggaataataatatcaatatgttatagttcaattactaacctatagaatagtgaaagtaacctatggatcattggaagtaagttgtggaggaagagtagaagaaatttttgaaggagcaatggaagtaacttgtggagcagcagtggaaataacctctgaatcaacagaagtaacttgtgaaggaacaaagaaagtgacctctggagcagtggaagtaacctctggatcatcattattagtcgtatcgtatatgataatattatatggattttggaggactacttgattttgttctcttctaaatcatgtaaattttagagagtaaaaaagaagagagtagatttggaaacttatgagataatcaatgagaggttgattttataggtagggatagaataaatatttcaaatttgaagttacgaattttgaaaaataaaatatctcaatatatctagaattttatttttaatcggagttataaatttataatctagatataaacgattttctctccctcaaaaaaaaaaaaaaattgtatttttttttaatcattatctcattttaaataattgagtattaataatctttatctgtagctatctagacctaaaataataacttagggaagatatttttataaattatatgaagaggagcataaataaaaattaaattataagaagagcttaagtgaaatatataaatacatatattatatataattttctcggagattattatgttaaaaaagtggagaagatggataattttttaaagtgagcaatttccgtgaacatattggttcagtattttttttagtgttaagtaatagtattagccattaggttcgaagaagctatgttcatttaattttttcccatccttttctcaccacgagttaactcatatccttgtaggccaaactacccaacaaaatttatttccatttgttaaaggagttttatttacacccaaatattaaaaaaaaaattaagtttatatatacatattattttatgttaattttaataattatttttaatttttttcatattttttttaaaccatgtataatattttcgttctatgagaaacttttatatattattttattttattttttctatcataaattttaacatatattttatttttatattatgtgtactttttaataatatgagaaagcaagaaagaaattggaaaaaaaaaattaatataaattaaagatatatattttcataaaattaaaacataaaattatactcaatatgtttataattctttgggtacaaataaaactcctgtattttttaaaggaaaaaaagaaaaaaaaaatctttgactttatacaattacaataatttttaatgtatcttcaaatacataaattaaataaagacaatgggcttcaacgacaattataaactttatcaactataacacaagtcctattcataatcaaccgcaaaaacaacccaatatattatatagttcacaactttcttctatccttcaggttgaaataccagaacataaatgcatgttaaaatcatttaaaaaaaaatccctctatgttacagaaaaatcttaagaaggtggtatgtttttattattattatttattttcctgagcaattttttcgattttcaacaatgacaatgggttaggtttgttcaacagaatatcatcgcttgagttgcctcctcgccaaagcaggaactttcttagggatgtacactttgtagctcacctggcagcaaaaatactgagaatcaatacaaccaaatatacactcgcaaataaaaagaagtaataataataatagaggtccctcattaatagagtaaaacttgcgataggccaaatcacccacctgtaccatttctccacctcgcattacagacattgtcttctgttcaaactgtgagccttcctgagcctcctcttgcagtgtatcagatttagtatctcctggtgaggatttaagagaaggttccaaagcagcagagctactggcattactgatgccttcaccatcattattgttgctactttgggtcacagttgggttagttataacagcagtctcatctaatgttttctcatcaaccaacaacttttcctgagttttctcacatttgggagcttgctttagcgttgaatcagttttagacaattgtcgtttcaatgctggtgtagccaactttgatttgacagtagaagtgcctgcattgagcttttgttttagattatcagcaatagccatctgaaatgttgagcgagcaatattatgctttgtagatacaaattcattgcggccgggactcttagctattatgttttctttgatctgggaagaatatgtggtaacattccctactgcagggatgccctgctgtttcactgatgggggttcagttgatacaagctgttcaacacaagcctctctaggggaattcccaccaaccactctactctcatcttgctcagtgaacttaatttgagcagattctgcctttgtggtagatgattgtggtgccttctcatcaacattatttttatccttctgattggcagaatcagttttcccattagtttggcgacctccgcgaaactttcttagattttccaaagccttttgtcttaaaactaactctaggtcatcattatttccactagtaatagcatcaaatggctcagcttgtttttcatttgcaggatgatttgtcccatattccttagtgctaggatcacttccaacctcatcatccctatcagaaaccttgccagagttcacaagtttggggaatctgagatgtgagacagcagtttcctcacctttctcattctctaacctcttgctccccacatcattactatcattgcttctagaagaagggtaatcatcataatcaaataccatctcttctttatgttcatccttatttaactcttcatcttcatcaggcctttctgctatagtaataactgatctcaaccgccttgaggtgttctccaccaaaactccctccttgctctggtaggtactactttcactacactgactatatgaaggactccttgacccatatctactccttttaagtggggattcagccttccccaaatttctttcctctcttgcacgcttactacttttgtgcttctttaagtcaacttcatggccatccttacaacttgagcagctcatagacctgtcgctggaagaactaggagtatcattcctcctgcgtttcttcttggaataatttttattcttagcctcataatcatgttttctctttgacccttttctcttcctcgcacgagaagaatcctcactactttcactactataaaatcgactcttagccttcttcttatcctttttggtgtgactccgagaccttttgcttctaattttcaaatcttcagaactagaagagtaagatgaacctgacattgaactatttgaatcatcatcatcagaaacatgacgacggcgaagcttcttggattcatacttcttgctcctagtctttgttttcttccttgttcgagcctacacaaggaacacgagtaaaaagggaggggcataattagaacttgtcaaatcaaaattttgcagaaaaaagaatgcccaaatcgacgttaaacccgtcaaaatttgtttgaacaaattgcaaatgaaaataacaacagaaaatgtgttagcaaactttattagactggtactttcacttagatttgaatgcaaatgtagttacttaatttttgtttatcaaattagtatgaaacaaaactgaattgaagtaaccctaagttaagaagagattgtaaccaatttcacaatcaacgtccgaacctaactttagaaacaaagaaaggaaaatagaaataaaatggtattcaccagaaaaatacagaaaatgaatcaggagtgaaagaaatgcgtgaatatgaaactactatgttgatcccaaaagtataaaaattgaagataacctgagatgaagccttggcattggagcggttcttcttgcgagaacgagaagaagatttagccatagaagcggttatacctgcaaaaatacttaacaaaaccaaacaaatcagagaagagaatcgaaaatcaatggatgaaaacgaggaaggcgaatcaaggcggaaagaattgatttacagttctcactgtttcttttaaatgcaataaattaaatctactgcgtgtgttttttagattaagttaccagatggattctgtttcaaaaaaaaacaaaaaaatcttaccaggatttttttaaaaactagtagccaccttactcaacactatatagcatcaataattagtcttcctaaaataaataattaacattttttttttccttgtggcactacatcatacccttaaaatattagttaaaaaatcctcgtaaaatatattattatgtctcttttcttagattagtggttaaaaattaaaaattttatccctcaattttaattaatataaaatttagggtgattctaccatgcacctccttaaaagagatgtactgatgcattctctatttattacgacatctgaaagaattttttagtctaattttttttatattcatgtacgttatagctatttaaaatattctacaaaattttgagaaattcgaaataatttacaatattaaaagaatgttcaaacaatctattttacatgcatataaataaaatagtcaccatgcaacacactgtttgaacgcagtttttggcgtgttaaatttttccaaattttttaaaattttgtaggatgtctta

SEQ ID NO: 110715 - DNA, 3457 bp, Cannabis sativa
tcctggtaaaatatttcctacaatatattggtgtcaggttgtggtacggactcacctgattaggtgatgcaattacatgatatatagctgcaattttttggcacgggctcacctgattaggtgatgcaattatgggatatatagctctaggctatgacacgggttgcctaattaggcaacgcaatacaggattatcagaccaatgcatcgacttgccttattaggcaatgtgatgtaatgaagatggttattttatgaagtaatattatttatatttttaaatgaatatgattcctattattggtatatttgttttgtattaccaaatatctgtatactgatgcttattcatggcagatgccagttgtgatttggatttcatcttatgaacaatgcgtaattgtttgattctgattgtgtataaatgataatattcaaataataaattttatgattattattattgcttttctttctgagtccttgtgactcacaggtgctatgtgcatggtgcaagtaagagcgaggagaagtattgaccccaccgtcctgtgtgccaagttgccaggagttgttttggactggctgtatctgctgtattttgaattgtgttttgaattgctattttctatagtatttcgggtaaatcttttataacaggaatccccaaaacacatttttactgccattataatgtccgtttttaatattttattttagtcaattttttatattatcttggtttttataattaattaatatattagtgttaatgtagtttataaaatcacaaacgtggcatctctatagaataggacgttacaaggtcaccatgtacaatgtactagttgacgaagagtctaaatacttaaacaggacaaagagacaaaaatggctaaccaaatgggtctggctggacctcccctggccagctattgtgaagcaagggccgaccaaccactagcaaagcatagggttgctagcttcctgcctggtagacacatttggtgtctctacaactttttacctggatagacattctcaactatgaattcaattcaacaacccacaaaattaagggttaaacttgagatatttacttatttttttggaaataattaataggttattttcttatatatttaatatgtaacaaataggtgatcatctgcatgcaaatgacaaggggaggtgagaaaccagacaaagtgacaagatttagacaagagtcttgtaaatcgtacctaagggtactagcaaaataattccattgtacaaagctgggtatcaacaaagtatggttccatgtgtaaaaacttggacaaacattgagtcttatgttgattattcgactaccatagactcaccctaataagtgccatacagagttcctaagggaaccaagtattgtacaagtgctgaataggttcaaggccataacaaaattcttgctaaggtcacaagaggacaaaaacctggccaccactttgggaccgaagccctaggccagctagagtcctaaggtattgaagagggacagttagggtcccttgacccttgcaagaactggccagggtcccttgacccatgcaagggctgacctagtttctaggctaaattctagaatcgaccagcctccataaaaaagcaatatgggccggccaagtctcaaacaagatcccataggtcggccagggtgtctaatggatcaaaaaatgtgtttttccaagactagaacgtgttctttattttctttatgactcaaaaagtgaagaatcacaacaaagctcaaaatgcacccggtcaggcgatgccaagtcttaaacttcagtaggcctttttgaattgtggttgttattgttttttttttgtatatatgtccctcttttgctactattgttaggatgcagagacaatatttatttgccccagccacgtggctatatgtattagtaaatagggttctcttttccaatccctttctggagattcattgtggtagactcttaggggctggttgcgtcattgaaatatctggttcaaccaatcaatgtttttagcccttcccattagtcttaataatctctcaatcaatccatggatgattccttgatttcaccctttctttcctgaagttataatgcttctttttgccacttaacctattgtaaaaaccacccatttagagttaaatcggagatggtttcttttcgtaaaaaagggtccttcgcaatttcacgcatcttcttcaggctttagttcttttacaaggttgattccaggagccatgcccatgattacttcaaacttttaggcattcttcttctctttttacttgtcagcctaacatttttgccaatcatgcaacccggtggactaaacttgtggaagtccacagagatttgttagaaggaatttaggcgtattttttcttttcaagaattttggccgaatacgcatcttatctatatatttgtatttgagtctagcctttgaggaaagaattcaagtgcatttccctcaagaggacttagttgaaaacatttctgcttttggttgcatgtgtacacttgaactaataaccttagcagacgtacataagaagttgaagttgtcagcaatcgggcgtatcataccccccaaatgagctaagaatttcggtctcaaattcttggtcatttactttggaatctaactcgtgtcctttttcagtttttgaggaggaggtttgagtgtggttctgccttgtttcgaaaagcatactactttttcaggccatgtcttctctatccgtgactacttggaagggagtcttttgaaagtgtaattagccatttcttggcttctgtgagaaaaagttgtggagttgttggagaaaactgagttgtatggctgaccccaaataattcctccgtgatatggaccgcgtaaggggaagcataggctcttgcgacccagcaggcttttggtttgcggagggaagttgggcttgcatccttgcgcagaaaattttccatgtacggaggtttgcttcgataagcgagagtcatgctgaattttgtaatggcaaactttttgctttttctaggaaaggctaaaagtgcaaaaaatttagacactggctttgcttgaaagagccagagggtgaaacatttcaggccgcatgagattcacattgaagttttatgaaaccagcttcgttttttgcgaaggaaggctgaagttgcataaaaattcaagcttaaactttttgcttgaaaagatcaaaaggagaaaacaccacgggaagtaaggtaaacttcaagcagtccttctatttggggaaggagggttgaagacatgccataccccaaatgatctttcttccttgaaaaatatcgtgcatgtgagagtcgtgttcaatttttatgaagcaagcttcggcttccacgaaggaatgctgaagttgcataaaaat

SEQ ID NO: 110716 - DNA, 4282 bp, Cannabis sativa
agggggttaagtgtataaaaatcaaaacataagggggtttcgccgcaaattgctctttaatttaattattatatatattttttaaataattaatataagtaaatatattatactttttattaattaattttttatatttgatcattttgttatttttttttaaaaatatttactaacttaatttttaaatttaaaattattttagatctcaatagtttgttttaagtacaaaactaaccaatgaacatattttgttacaaagtctttaattttagaagtttttttaaaaaatatatcttgttatttaaggagtaaactaaaaatgatataatcttacaaaaaaaaaagataataaaataaaaatgatggaagatagtaagaaaaaaaaatagatatgttttctacgagattttttttttttttttttaacttaaattataatttatataaattttataaaattatattaatttttctaaaaatataaattttgatgagaaaaggaaatctttgattttatcttttttttttctttctccatttatataaattagagttttgccacagaaatgctaataagaaatcaaaattacaaataagtatataaaaaaaaattccttctcagtcggagctttgcctgcaagtgagagtaacaatggccgccgaagaagaggaaatcgctgcggagctcgaggctgttcaagcagtctacgccgacgattgcgtggtcttcgattccttccctcctcatcttcatctccacataaagcctcgcaccgctgatattacttccgagcaggtcctcttcttcttcttcttcttcttctgatttatttcattgtttggttcctcggaaaaggtaggacacaatcagaaaccaaacaaactatgattcattcaattgcctagtttgtgtgtgtagtttttgattttaattaaggatattagtattcgtttctatgattcatttatctattttggtgattttgatttttattattctttgttcgttgtagtttgtggaagctgttattgggataagagctggttcacaggtattacttgatcatataaaagttcttatttttttttttttcatttaatttgatgttaataggggctttttgctttttgtttgttgtgatagtatccgaaagagctgcctcagattgatcttttagattcaaagggtcttgatgaagaaaggaaaaaacatctattgacttgtattcgagccaaagctactgagctctcttcttgcttaatgttggtagctctttgtgaggtaacttttttgttttttgttttgacgattatcaaaaattgttctgggttatggatgttacttaattatagtgatccgcatttgtcattaatcaaaaccttgtgagctactccaactgaataacatcccaacttgtttatggatttggtggaaagggaatatagcccaactctttcctttagaactatgaagataggtgatttttcttttggatgaatttcaccttgcttgtggaacaacttgaatttcaatatgattattagcttaaaatttgaatcgggttttgttagattgtaagcatttctggattccatacatgacatcgagcttcagctgattttttattttattttcatcaagctttagctgatagaagatgctgtctacttgtgtctttccctacaattacttgcaatacagtgcatccttgttgataaggattgattcatttagttttgtttatctacagttctattgttctgttgaagttatttctcatgattccttattttctccatttttgaaaaatgtatatgttggttatgataatattgtagaatgaaagacatgcttaacttctggtttctttcttttctgtgtcttctatatttattttttgtcccttctaacagtcgattgggttttcaaaattttctaggaagctgtggagaagctctctctaatgaatcacccagatggtgattgtccattgtgtttggatcctttagtccaccaagatgagaagaataagattttgccatttatgaagttgatgtcatgttttcattgctttcactggttggtttattctctaattgaaatcttatagttaccagcttttggtgcataaatttattttccacctcaatattcatttatatatttctagtactttggcagtgagtgcattattaggtggtggacatggcttcaaacagaacaaaaaaccaatcctagtaattcatcaagttcctctgggcatcctgtaagaaaaaatgaaaatagaaaaggtactcttggatcacaacttaatgtggctatagcattatgttttatacatggctagacattagtgaggttaatttgctcgaggataattatgatagaaaattcttgttgctataccattttatggttttagttttttcagcacaactttttgctataaactaaatttaaagactgattgattagctgtcgttgaatgcagatggggatgcagaagatagtatgggaaattgccctgtttgtcgcatggtttttcacaccaaggactttgaacatgtactcaacttggttgactcccttcctacccaattggtatagaatctatcatccttgcattatgttagtatgcttatagttgtatagattaaatttctgggtaagatacatagttccaattgatcaagtgcatggcatcattgataagctgttattagtttttcatacagacctatgaacgcattgataccctgttatttggttatgggtatatgaataccatatatccaacttgttcaaacaaagaatgatgaatttgatagctctgctattattgccttttctacatttttcatttggtccatttactatgacatttaactgagtagctgttaattttaaccaactatgatttggagatactactctgtgtcttattttttatttatatatcattgtgacattactatttattgtatatgaagcacctatagattccctttcacaaaaaaaaagcacctattgattagtgtttgttttatattgctattcgcatcgattctcttctatcctacatttgaagttgcgaaagctttcttgactatctgtgattgggttgttgtagaacattgctgaaaatgatatagaagatagtgagaagatccttcattctgatcaagagaacatcagaagacaaagatttgaggcaacatttaagttacagcaagaaaacagcggtctaattgaacctaaaaaagaagtaagggttttaccaggtatgtttcttccacaaccagtaacacctcccacagcggaatccaacgagcaacaacataatgcagaccccccagtggcctctagagtgcatagtggtgcttcatcccagaggcctaacaaaagcgatcatagataccgaggtggcatgaggaaccatagagcaaagcataacacaagaaaaccggcgcagcagtggattcagaaagaaaatgcttcagcaaaataaatgtttaatatttgctattttgggagtttttctaatccttgctcccagcagtattttgattattcaggttaatcaaatatgctataggaagaaaatgtacagccaaagaaagaaggaaaaacaaggaaatgatttttagttatttgttaacattttattttttctacatttgttgattttgagaatgttaaggaagcatgaccctgcctatcgaatttcaatatttgggtcataatgttaattttgcacattaagtataatctgaatatttagtataatgttaattttgattctgctacatattctttcacctttgaatatattcttcatatttagagagtggattattaagtagacttcttataatattggtataatttaatataataatattagtttactttgaattaagaaagctatctaatttttgaattggtgcccaatatcatgtaagatattattttatttttaatttaagatgtctaacactaaaataaattataatacagataattcgttgtcattttatgtagtgttaatgttgatcactttatgctcaattataactagggatacacgggccacatcctctaatggggtgggaatttcctatttaaataggaaacgaggcgaagacacggatgagacttcccgttctgataagaattcgtttaatattttattttataatttatgttggtattttttagtatattagtattttttttatgaattataagttgtgttttggataataattagtttattaa

SEQ ID NO: 110717 - DNA, 2753 bp, Cannabis sativa
  modified_base (2659)..(2673): a, c, t, g, unknown or other
aatggaataaaatttaaaatgcttaaaaaaaaattaataaaaaaaccattaaatattttttcttgttatattggaatgatctttcctttctatttaaaatagaatagtcattccactaaaataataattccaatactttaaaatgtaaccaaacaaaataataaaatgaaaattgttttcttttcattctaatcaattttattatctaaccaaacgtgacttaaaagaatcacaaagctcctctactatgctgaatgacacgtgtccaaagatgaataatacgtatacatttgataccaacaacggagaaagaggagccacttggccatccaacatctattgccaacaattaccactttctaaggaccaccccttcagcctttcatatgattgaatccgtagctacaaaacaaattttttttgttgatatcggcatatccccaaaagccaccattcactattgtctaccgatcgagtaagtaaaaaagcaagatcaaccaattatttcgccccgcccaccaacaaaaaataatatccataaaagataataataaagaaaacataataataagatttagaaattcttatgttatgatgtatattgtaaaatgtcttccccatgtagttcttctgatttaaaaaatagtggaaaactacacaaaaaattcagcgtaaactatgcaatgaatgcaacgatgttcaataaggtgataaattgtagagtttttttcggctaaactctcccaactgtcgtttcacttgtatttgatcttccaagtataaatattagcagtaaaactcttcaaactactgaacaagtagcaaatttaagatgtcattcgattaactgccactataagctgtttatttgtacactcttatatacatgacacatttatattgtacaactaatattattatttaaaaattattttcaaaattcatattaaaattaaataaaattaaattaaatatttaaaaaataaaaaatattataaaatttaaaataatttttatatttttaaaataataatattaggcataccactataaatttgacacatgtataaaagtgtgtatataagcagtctatattggcagttaattgtaaaaaagttaatgatacattaaatttacaagcagttcagtattttgaagagttttaccgtcaaaacttgagcttagagagttatgtgcaagtagaatgatagttgagagggtttaactgcaaaaaactttaaattgtatagacattaataagaatattctgacaatttgtatagacagtgaaagacctaacttagttactaagtttaattaacgattattactttattcatctgttcactttgattcaaatgttataactataaattgatgaagctaaaataaaaaacataatcaatttataagtttccctagacagtggaaacaaattctagttgagtattgcttaagttccatgaactaggataagtaatctcattatatgatttgcaaatttacaaacaccaattttatacaaattgtcaaatcacttacagtaatgaaatcaccccaaataccaactcccttgaaaacccagcaagattcccttacttcttcaacattgaaatcactttaacaaaactctagatcgaaacaccttcagatttgcttgtgaagataaagctgaagtccttttagctcacactaattgactatgggccctattcagaaactttattaacaaagcatcaagcttcaatctgtaagaacacaagaatgaaagagtggaaagaaaaaacatgatatcaactatgataaaaaagtgctagcaacaatagaatcaagaacacgatatatatacctagatgtattaggtgaaataccaaataacagacagttgtaacaaacttgacctaaaataagctgacgtgtacaatgactaaataataaactgcagacataacaacttaagactctagacataactggacataatttgtcatcacaaaatactggaccctacattcacccacttgacaaattgtagtcaatgacaaaaaaaaataaaaaaaaaatagttgcaacacaaaatagttccacgcagctaaaaacttaaaacatacaaacaaaagtctgaagaactaaaattaacaacaatattgttaacctcaaaaattagcgctactaactctcaggattagacgcctcataaccaaggattaatgagggggaatctgactcctctactctattgacatacaactctcgaagtcacccacaatgttgctagctctcggaaacacatgagcaaatcttagcattgcctcgtgattaacattcgtgtgcgggagtatgtaatggaggctcgcatgcaagaatgcatgaaagtgcggtcacatgcgtgcgggtgcaagacgacgagatgggggctcgcatgcgagcgtgcacatgtgcatatgcgaggctacaagtggctagaagagggctcacgtgcgagcccataaggggctcgcacgcgagcttgcatgtgtgtacatgaggcgacacgaggcttcatgtgacgagatgggggctcgcatgcgagcccacaagaggctcggttgcgagtgtggtgcaacgaggggcagcgaggcaagggcttgcatgcgaaaataacaatatttaagtatcnnnnnnnnnnnnnnnttagatatttaattttcaatttaagtaaatgcattaaattcaggaaataaataattaagtgtagagaatgcttaattatt

SEQ ID NO: 110718 - DNA, 1496 bp, Cannabis sativa
  modified_base (29)..(47): a, c, t, g, unknown or other
aaaaacaaaatttttaaaaacaaaaattnnnnnnnnnnnnnnnnnnnaaaaaattagaaaacaaaagtgttcccaaacagcaccataaagttaataaaaaaatatatatttatttgtagatttattagttttttctttagggtaaaattagtgtttcattcaagaaagaactaattatgattaagtttaatacaaatgtttcatggataaaccaaaataataaatcattctaaaaataacgagcaagcgacaacaacgctaatagaccgacaaattaggacatacatgccaatcaaaatcatagtcgttaataaatatcatattatcttaataggtaacaaaataaaacaaggatacaaatttttattgagataataattaataagaaggatatgaattaagggttatccaaattaaataagaatatgttaatttcaactattgattattataaattcaatgaatctagctaatagcttgattaattaattgttaatcatcacaacccatgtaggaagagttccatcacaatataacactttaaaaagttcatccaaaactttatgatgagttggcttaattggttttcttatatatttattattatatattattacacaaaatgttataacaattaattactaattcttttgatgtataatttttcatttatatttttataattgactttttatttatttatataaataaaaataacataatttcgaaataaaaacaacatatcatcaaaatagaaataatttttataaaataaaaacaaaataacctcgaaacagaaataacataactttaaaataaaaatagcttatataaaaatgaaaaaaaaaaaaatatattaaaaaaatgtaaaagtaaaaaaaaaatgttatgtacatgacaatcccttaagtatatttttaatttaagcttgagatacatgcatattatatgttaattgaatatttatatacctaaataattgaatttattataaacatcatttgactcacctcaacatttccaaatacattattagtgtaatattccaaaattagaacctaaaatcaatattgattgtagtcttatttatttatttttgaaaaatgtaatgattgtagtttttgaaatataaatataatgaagatgatatgtagtactagtgcattgtgaccttttaaataaagcatgaaactttatgaaactttgagaaatgacttgaaacttattgcatcttttatataataatatttaattaaaaaagtgatgactatatatatgtaaacaatatattttaaacaaattataagaaagtgatttcataaagtggagttacaatttttctgctaattaattgttttatttgaattaacattattaatgaagttgttgaccgaggttttcggcaaccaataaaataataaaaaattaaggagttgtaagaaattaagagaaaattttttacgtggttgggtggttaatgagccttagtccacgag

SEQ ID NO: 110719 - DNA, 10380 bp, Cannabis sativa
  modified_base (10077)..(10085): a, c, t, g, unknown or other
  modified_base (10224)..(10243): a, c, t, g, unknown or other
ggagacaacggaagtatctgtttggaccggcgtcactttggctcacaacggatcacaaataactttttagactggtggcaattcggacaacggatcacaagtggctctgataccatgttagaatttgaggataagatgaatgaggtttcatctcaaaaccaattggcaatgagaggagtagcccattcatcttatatatcacaatttattttcacacattagcaatgtgagattatctctaataagaacctaggaagagccaataactggaatggaattgccatttcacactttctaaatgaggcctttgaggagtagatctcttccccacaaaatgcttctccaagtggctgaagtatattttaaataccttactttagcatttttaactaaatagaggagaggttgaggaagatcttccaagtttgatttgcaagcataacttaattatgatagataatagatctgaaaccaaaccttaaaaaaaatattatagttcacttgataagcataatttaaacacatttttcatattttactttttgagctattttaaaatattgttatgtgtaaatatgataaatcaaactcaatatcctttcactttgcaaaaaagaaaaaaactcaatattctttcctcaaaaatttccaaatcataattattattttattacaaaatatttttaatattggaaactttttagatacattttaaacagagataaaatttgtggaaatatttatgtggaaatttatttcttttttaaggtatgtttcattaatgccttaatcgccaaattgattttgattgacaagtgtatggaaaggtcacactaaaccaaactccaaaaaaaaaaaaaatcacaaaaaagctgtgacaaattaacgtcacagccaatatacgtcatcaatattctaaataaatcttttattctttattaattaatatttttctaattttttttttcaaaaggcattatttttgagttatctgttctggtttagataaaacacgcgggccccacgcaacaacacaatagtaaaatgactaaactaccactaacttttcgtttctcttctcccgacacgccaccatatccatactattaatttcagaaggttaaaatcgtcaaatagaaaaatctgcgcccgaggaggggcatagttgatccgcataaccatatttttgcgaagcagcgaaatttgtgtgcgtgcgcttgggtcaccgtgactgtcattgtctgtgactgtgagcgtagacaaataaattagtataaattagtactacctataataataaataaataaataataataaaaaagaagaggtggagtttacatagaaataaccgtagcaattaatgcggttactttattgagcttattaaatctgggccgttgatcagagggtaaatggtttttagactttacgaactgtagagtgtgatacttgaggggtttcacagcacttaaaacggggacacacggaagggactacatagctccactgttatcactctctcactcactcttcaattttcttttctgagagagaaaattagctatagagagagaaacagagatcgcttcaagtttctagggtttcttccttcgcttctcttctgtgtttcaggtatacaatctcgttttctcttttctcttatggatttttttattttgatggtcaactgttcaatgtggttcgtttttgggttgttttcagcttcgttttttctgtacttttttatacttgcctttctcaggtccagtgagaatagttttgttttctctgcaattgttctctttgattttttttttttttcagttttttggtagttggggttttgttcccttttggtttggattctattttatttattttttattattttgcttttgattgatggcacattgcttttgcgtttgacttttactggttttattttggggcattggctttgacggagcgtgttttctctgttgttcatcacgtttttgtgttttgtgattggtggttaccagaatcccagaactgttgctctccctcgttaagggtttttccctatttcgttaattttatattgtgggtttttttctgcgttatttatctgctttactctggtaactcacactttttggagagatttcttttggatttttttaaggtaaatatacttcgagcgtgtgtttgctactttgcatgtaaatattttcttcccgttttcatttatcattttgatatgttacttgggttttagtttctgttagatggctgtggttgttatgggtctgagatgagagtatttttcattacgtacttttcatcatcattttttctttaagggttttggtcttcgcatgcttattttggtgtaagtatattgtttcttttacttctgtagttgattttatgtggaagttttgtgtatatcattttgtaaattgcatgtgtagtgtagaatcgagtttacttctttcgtccgaaaatcctgcctcgtgctaggtagatttgtttcgagtgtttttgtccgtgctggttattttctacatgtatggtgtaccatatgtgattggtttggtgtgatttataattgttacttggtcataatttttggttattatttttccttgctgtcttggaattttgttcttcagtttttcattttgcatgtttgttggttcttagtttttttttcttcctttttgtcttcgttgaacttctgccttttttctgaatctggcttgcatgtttatttttgtgctttgtgcacaggaaatgggatcttccgatgatggaaacggaacagaggaggcattgcctcctccacctcctgttattccaccagacattgttccaatcaaggctgagtcagaacaggctattgagccagttaagaagaaacctgcccgtcttccaatggccagacgcaatcttggaactaaggggcaaaagataccgctgttaaccaatcatttcaaagtgaaagtcagtaatctgcaggatcaattttttcattatagtgtaagtttatctttctttcgtagatttgagccagtttgtttatcattctgtttatgtactgtagacaattttgactgatttatgaatggaatgagtaggttgccctgttttacgaagatggccgccctgttgacgctaagggtgttgggcggaaagtcatagacaggctccatgaaacctataagtctgatttaggtggaaagaactttgcttatgatggtgagaagagtctgttcactgttgggcctcttcctggaaataaacttgaattcactgttgtacttgatgatgtatcatccgacaggtagccttgctcttttcaacttatttggagcttattttcttctgtttattagttccttttataaaggattcatgtaaaaaatttatggttcagagtaaatggtagtcagagccctaatgctgagggtgacagaaagagattgaggcgccaattccattccaaaacatttaaagtggaaattagctttgctgctaaaattcccatgcaggctattgctagtgctctgcgtggtcaagaaactgaaaactctcaggaagctctaagggttctggatataattttaagacaacatgcatctaggcagtaagtgaaatatgttgtttttccattttgtaaggagctttctgtagtttggtgtgatatttgatccattaatttatgacatttaacataagtgagttgttccaggggatgtctacttgttcgccaatctttttttcataatgatccaaaaaatttcgttgatgttggtcaaggagttcttgggtgcagaggatttcattccagttttaggacagcccaggaaggattgtctttaaacataggttcatctttactttttcttttatgatctttgaaaagttgcttttctttttatggtttgctcacatttatctctcatctctatttagatgtgtctacaacgatgatcatacaacctgggccagttgtagattttttaatttctaatcaaaatgtgaatgatccttataggattgattgggccaaggtaatcaacatttgtatatttagtgtgtttgtattttttttttttgctcatcttgtctttgaaaacaggctaaacggacactcaaaaatttgaggatcaaagttgagccctctaatactgaatacaagattactggtctgagcgagaagccatgcagagaacaaacgtatgattttttgttttttaatcacgctttcatttgttttattgtgtctttctgcttttgtgcttcattttatcaagtttattgtcccctcttttatttttttttgttggatgtaattgacatgcttgattgttatcagattttcattgaagcagagaggagggggtgatgacagtgaaccagtagaaatgactgtctatgattattttgtaaatcaacgtaatataaatttgcagtactctggagatctgccttgcattaatgttgggaaacctaaacgtccaacatttttccctgttgaggttacttgagaatgctctagctgttgttaaatattgttttttttttcggtgttaacattattatatcattctaacagagtgtctgtttgtgtttgctagctctgcacgttggtttcattgcagcgttacacgaaatctttgtccacatttcaaagatcctcactggttgagaaatctagacagaagcctcatgagaggatgcaagtcttgtctagtgtaagtctattctataagtcttattttcaaaaagacatgcaagattttattctaagtttcttgtgtcaatcattattatcttcaagacatgctagatttgtctcaagttttttgtacttggttccaggctctcaagcgcagtgattatgatgctgaacctatgttgcgcacttgtggtgtttctattaatagtagtttcactcaggtggaaggccgtgttctgcctgctcccaaggtctatatacatatatatatttatattgatttcttggtcaagtaatctatagttgttagcatgagctcttgttactaatagctaattatgttgtgacttgtgcctttaatttgtattttctcctcacagttgaaagctggtaatggggaggacttctttccccgaaatggtaaatggaatttcaacaacaaggtgggctgttgaaatgaggaattttatgtttgttttatatttaaatttggtttatgtattacttctaacaaatgaggaattttatgtttgttttatatttaaatttgcagaaattagcacagccaacgaagatagacaagtgggctgttgttaacttcaatgcacgatgtgacattgataaccttgtgcaaacactgataaaatgtggagagatgaagggaattgtaagttggttttcttacagtgttttaagaatttctgagctggtggtggcaattaagtaattgattatcgttgttggatttatttttgacagttgatgaaacctccttttgaagtgtttcaagagggtggacagttcaggcgtgccccacctgtggttcgcgtggagaaaatgtttgatgagatacagtcaaaacttcctggggctccagattttctcctttgtttgcttccagagaggaaaaattgtgatctttatggttagattattgttctcttgagttctttattttatatttaatttgcaaggattattgttttccccattttgaatgttactgatgtttgttttttaatgaactcccaggcccatggaaaaagaagaacctttcagagtttggaattgtgactcaatgcattgctccccaaagggtcaatgatcaatacattacaaatgttctattaaagattaatgcaaaggtatttgttgattaacactattcattcctttaatatctttggttttggttatgatgcttttccatgctctcaatccttgcagctaggtgggttgaactcatttttagctgttgaacgtaattcaatgatcccagtggtctccaaaagtcccactctcatccttgggatggatgtttcacatggatctccagggcagtctgacataccatcaattgcagcggtaatgttgatttgattgtgtagtgcaactgttccattctgtagcttattaagacttgtcagagaaagtgctagttttcagatgctgatactttgatgacctctttattgacaggttgttagttctagaaattggccctcaatttcacgttacagggcttctgttcgtacccagtcacctaaggtggaaatgatcgattcattatttaagccagctggtaaagatgatgaaggcatcataaggtagtagcatgtctatatagatttacttcttgtgttatccccctctctgagagacattgcctatatgtataatctattcatttggtatgcaaacctaactgattaatgaatgaaagtctattaaatatgtttgaatgaaaattgactttttctttctttattgagcttcatgctggctctatctctttattttttgttatattatttaatactgtctttgtgatacactttccttcattttcagggagcttttagttgacttctttacgagttcagctaaacgaaagcctgatcagatcatcatttttaggtattgtatttattattatgaatagaattgtatcactacaatatacttgtaaattgaagcaatttccattgaacagaggttaattaatcttcattaaaattagctgaattaaggtatttatatattatgccaaatgataaaaatgataacttaaagatccaagcaggggtacagttcaattagctttattatcatttttaaattttggtctggaactggatccaagatttgcttttagttgatagtatgattttttgttttaagaaacttgttgtaaattcactattcattctcttatacagacttgtctacctatgtttactcatgtatgcagtccttctgaaatgatttgctaatggctttttgtgaattgaattagggatggggtcagtgaatcgcagttcaatcaagttttgaacatcgaactggatcaaatcattgaggtatctagttctgtgcctttttccagcaagttacgtgctcaactttgaaattatgttgacttctaatgctcttgcaggcgtgcaagtttcttgatgatacttggaatcccaagtttgtggttatcattgctcagaaaaatcatcatacaaagtttttccagcagtcgactccagacaatgttccacctggtaaaccatatctttttttttcaccttcatgatgctaataaaccatatcttctctttttattcaaataacaattcttctcacctttttttttttcttcaggtaccattattgacaacaagatttgtcatccaaaaaacaatgacttttacctctgtgctcatgctggcatgattgtaagtggattgtggataattttttttttcatgtttcgttgttgatattaagttccaacctgcttaatcataggatttattttatcaaaaggattcatatctaaaatggctttatatgtaataatatactaatcttcttgcttcgttgtcttgttagattgacttatttaattgtttttctgaaaagggtactacaaggcccactcattatcatgttctgttagatgaagtgggtttttcagctgatgatctacaagagctcgtacattctctatcatatgtgtaagtcaatattctccaggatagcttatcgttaactaatttggctggcattaaactcgatactgaattatatttctcattcttgcagttaccagaggagtacaactgccatttctgtaggtaaggtttttgaggtttttgtggtcctgtttataattactcaaaataggtgtagcttgctctgacgtttttgcttccacaaataatgtgaccatatgacaaggaccattacaccagatttgtctcccacctttctatccatttgaaaagtttaatttattttttccttttgcagttgcccctatttgttacgcacacttggcggctgcacaggttggtcagtttatgaagtttgaggacagttccgagacgtcatctagccacggtgggctgtcctcagctggagttccacctgttcctcaactccctaggttgaaggaaaatgtctccaattccatgttcttttgttgaagcttcgaaatcctaatcttttatgtaattagtttcgtttttttgttgtggtccttcctatgggaacctctgcatgtctgaacttgaagaccttacctttggtgttttgttaattttgtggttggtctcttgtttaggactagtgatatgcagactaggtaattactgtttggtgtgttaagtttagtgctttgatattttatctatgttaagcatgtagtagtgccaaccttggaattttaccgtggctctatatctgttaggtctgtttttaatatagcctgttttgatggctgtgctgtgttttgatggagcctggttttatggcagctgttgtgttggattttcatgaaacgtattttaatgactaagtttcttcatggaaaaaggatttaaagtattacattctattttctctattcttcttttataatgtaaattgaatgggttttgctgaaacatccagctgttaattctgcctaactaccgatccaacaattaattttccaaattacttcccagtagatactttttttgtttacaaggagaattttaaactattcatttagcgtaattgttctgattagtatcaaccagactgtacaaagcagtaaaagggaaacttgcagttaaaattacattttggggtaaaatctaacggtaatcagttttgggaatactctttctagtgtttgttgtgctttaatttagttacataatgtattgtagtttaggcaccattattactggattgtgttgaagtttatggtaaaataaatctccggttgtaagtacaatggtttggttatagactattactgcatgcatgcatccaaggacttgtttggtagactctgtggattgtattatttaatgtataacaaatgaaaatgattcatattagtttgtggcaagcgatcaatgctcaactgttaactcgggataaattcgctcaatttcaaatagcccttgaaagcattctttgtccagagtgtggtgcagcagctgagactaactatcacttattttctaactgctgcctttctcaacaagtccttgatcaggtatttaactggatggggacaggaagaaggccaactgattttcaaagatggaaaagttggcttttacagaaaggaaggaaaaaagacaaagagttcatacggcgattctggtagctatgatatacaacttatggatcaataggaacaactgcatcttcaacaactactcgagtacaacttccaaaattatacaggatattaaaatatagtgcattatagattacaaattgctaaaaaaagaacctaaaaaatcataagaagagatatatagagagaaaatatattgtagttagcttgtgtttgcccgagttgcctgttgtagttgttgtgtaattgcttgtgattaatgaagttccttcttgataaaaaaaaaattagaccttacaaagtctcttaattaataaaaaaaaagccctaaatcctcttttcttctcaattgtacccttctttggtaaaattcacaaacaagacacagtcttattcaaaattctaattaattaattaaaataaattaattgagactacaaaacaatattatcctagttagtgcggggaccataggcctatgtaaccaagctcccaataagtagatctaaaatttactaagtaaatttcctaacttattaattcctcatgactcaactaaagatttagaattgcactcctgattacatagaacactctatataccaaatatagatacgctatgaattatctattgtttcaatctaaataatcaaaaattctctatagacgatctacatcaagtagggacaaatttaccgttgtaccttcaatgtattttatccttannnnnnnnngctacttgtaaatgatatttcagtgaactaatataattactgaaatgagcactctatcatttatcgtgttaagccaagctcgaaggaagttatcatttcgcttctaatagttatggaagctatagatttcatatctatnnnnnnnnnnnnnnnnnnnntgcactaccatgttcccaagatgtaagtattgagttgatctattaggtcagctttgacgaacaagttaaagaacacaaataatatatttaagatagaacctaaccatctcagaattaagatctgttgacctaagatc

SEQ ID NO: 110720 - DNA, 3384 bp, Cannabis sativa
taaaatagccctaaaactagaaacaaagagtgaaaactaactgaaatatggcccgaaacttagactaattttagcctaacaacgattgattaaaaaatatctttaaggataatacaaagtcaagaattaaaaactttttccttaagtggaaagtaaattagcagttgtaagtgagattttttctcataaacaacaaaaagttataagcgatctgagtaaataacagctagcatgttatagcacgtattataaatgagataccaatatgtcttgagaaataatacataagttaaagtagaatagatgattaattattaatacaagaaatcaaaagatatttaaaatagttcttaagagaactgttcaaaatatttgaagtttgctctaaacatagcaaactattaactgctcacaaaagatgtaggagattactagctgctcgcaaaaaaagaagctgattactaaccgctcgcaaaaaacatgtaggatattaactacttgtatcaaataacaagatagtgataatggtacacatatgaccctaaaatatcttaagctaaatcaaagaaaatattttgttgtgaataaaaatacaatagacagacattaataactcgaaaaaagcatgttaaaagacataaaagtaaatatatgtataaattagcaatattggccatccaacaaactaaaattttgaataatattacaaaaataccataaggatcaaactattgtctcggcctaatggccatggttcagaaattaaagcaaaaataactaagtctatatagttggggacttagtgggttcttcttcttcttcttcctcggcctcctcctcaacatttactgcctcatcctcctagatctacttgcaaaagactcacatctcttcagtcttagctcccaaaaaactcatatccatcccaatatcggccaaccaagcttgataaatagatcgcttatcgatcatattaatcctaactttggcatcagttttggcatcttcaagttttttgtcaacttcaacctgggccttctggttcgcgccttcaagttctttgatcctttttgggaagcctcgagatctactttaagggtattctattgctcttcagcatccttcttgacttttgaaatcttcgactgtgagtcggttcattacatagcgaaaactttgagatgttccctagatttgcaaagctcgacattaagcatattaatgttttgaagagtccttttttgagccacaaaggataaaaaattaaatatgagcacttgtacaaaataaacaagaaaaatatggtgagatagtctcccactttagaaaattacatagtcatcaaacgaggaagaagaactataataattactaaactctctcaaactagtaatcatgaaaagatcaaaggggtttagagggaacatatcttaatccgaatggcttgccctatcgaagttagtgtcatattgtttggcagtcccgaggtaagaactattacaacttaattggacataatgctcgggataccaactgtcaaacctatgagcaatgcgatctacacagttctaaatgtaaaagactgactatccttaaatttaactaaagtagtacactcagctctaattacggtcggagaccagccacaagtaccaaagttattaccctgagagacatcatctttagcttcccgaggggtgatattttttaaataatgggtgcgagtcacatagtctctatctttctcgtcggcgagatcaggaacttgtttccagtctaaatattttgggaccttgaagtcttcaatagattgtttgctaccgaggagagcaaaagtcttaaaattcttcttgttcaacaagaagtctactactcgctatccaaaaggaaggtcaagaagaattttgtgcctcttttcaatctcagaagctgggacaggtctcctagtgatcgatgttcacatgacaaataaacaaattagtaaaatatggccaatgtgcgttagataaaaactcgaaaccaggttttcaagaaaagaaatactcatgtatgatttgaaatttggttgtattgatgggaaagacacctgaagtccaaaagaagtcatccttgaatttctttttgttgggtagccttacaatgatcctatgatcattggtatgggtcccaaggcagtaaaaaccacctactcctcgcttccttacatgataggccttcagagaataaaaatataatatttcaagtagggtcgggcactcccacttcaggatccatggtataatgactttagacaggccaacatcctgtatgagttgggcaccaattagagtggaacgatgccaaggtaaaatctttaaagtagtctctaagagggagaattactccaactctgatatgttcaaggctttaaatgccaattcgggagggctcactggtgctacagccttcttctcgagttacctgttttgggggataacaactaaattccccctcagcaacagacctaatgcggcatccttgttcatttttgatgccgcatgatcttaggacttccctaacatacgatcctatggatctaacttttgattcaatcaactcagcctcaaatgtaacaatgggatcttgaggagtctttgacttgtgagctttctgagccattatttcaaaatataagtgacctggttaaaagcaacagtgactggaggtaaaaaaatattagcctcgctaagagagctttaattaagtttggaggtttaggccaagctgcttctcgcaaatagtgacgcttaccctcaattatttcttgtaagaattttcatcctgactagacttaacgaggtaatttctaatcttctcatctcatcatttatttcaaacagtttgaggtctttgatttttgggctacaattttatggcaaaaatttaaggataaatagattctaaagattttgggattgtgatttctaatgtaaattggggcatagtcatgaatggtaatgtctcaatttatgataaaatagggcataaataaaacccaaaatccttcaaattgtataacctttaatttttctaaccctaaatttatccaaacaattaaaatcaaaatacccaaacagaaaagcaatgcagacaaaagaaaacactaactaagaaaaagaaattgtcagaatagaaggagaaatcagtaagaaaaagaaagtgtttcacttactgtcttgatgagaatttctgggcaaagaagaactttgcgattgaagtctcaaaggttgagaatgatttctagatctgaaaatgtgattagatgaaatacgccagaaaatgtgagggacaatgagggcaggcaagtttgaaagaagactgtaacgtccccgcttcaagcctcca

SEQ ID NO: 110721 - DNA, 2981 bp, Cannabis sativa
  modified_base (30)..(31): a, c, t, g, unknown or other
tactccactcattgccaattggttttgagnnggaaccccatgattctcaacatgggcaaggtatttagagagaggagtgactatatacgcgaaagttggttacaatttaggaaaatttcatttgctatcctttgtatggaatatccatgttccataactttgtatggaagataaaaaatatttgctatcctattcctataaataacagaacaaacactgtaaaatggacgactaaatttctaacttaaaaaaattctgctaaattgtaacctcattctacaaaacacagaaataatactagatcgttatgtatgtaaattttaattacaaaaccacataaaacttttgtctttcattattaattataattttaagtaagatataatattatttatttacataattaattttgggcattaattattaagcctcattttgtattaataaaattttaagttcacaaagcaaattatattttcgcaaagttttttaatttaaatttttcttcgagatttttttatttggtttgagtgaattatttaaattgggtggtttataaaaatttatgtataactttattatattagtgccaacaagaataatattttttggttagtgtgattaatgatcttggaatattttgggtgaagattttattgattaggcctataatatcttataataattagtcaggtaagcatcattatatttatttataagtctattattttagaacatgagaaacaaaacaaaacgtttacaaagttaatatatatatatatatatatatcttgttaaacacaattattaattaggggtgtcttaacaaattaacaaaattttatgatttttattttagttttttaaaaagaataattattttaagctatggtggtccaagttatacaaacaagttatatagaggcagatcccatcagctattatataacaatacatacaatcaataatatatataatatggagagcaagattaagattagcaacatggtggtggtcgtcatggcgacggctatggtggttctaatgcttgttccgttcgctattatataacaatacatacaaaatctgagaagttaatattgattatgctatagtgaaatggacaaagatttcaagataggacaagagtacttatatagtttgtgtaccatttaggatttttatgcttaatgcttcctatgtgtttaaatttttcacgagagtagaaaatttacatatatgttgagatttatatgtcctagtccgaatataagtttctttagtaaatccgtgtttggggggtaaaaaccgagcacaggaacaaaaggcccaatagattaaaataaaaacgtcaaaaggcccacacaggttgagtacataaagacccaagatcaaaatacgtcagagaaggcccaacacggtgcgggccaagcactgaacctcaagggagcgctacggacaaaaaaggaaagggagcgctaaacgacaaggaaaatgagtaagcaccaacggaaattgaaggaagacgggaacaaaagaattggtcgacagagtaaaaagtcgaatgtaggatgtattacaaatgagaacccaataaggacccctagatgacctgtcgacgagggatgtacctaaaatgcaataagaaaatgaacgccgggatgataccacgattaggacaaacacccccgacggaaggaaactcggatcatctcaaataggagttccgacggaagaaggagattctggatacaaaggaaaaaatcagtatttttgagggtatgataccgtcggatcgagagaaagcagcagcattatagctaccagttgaaacacggatacgtagcatagcagaaagaacagagaggaaaaacacgtgtcaacaacagaataggtatatgatagattacccatgcaatcaaaaagacgtaccaaataaatagagaaggatcgcgtaaagaaaagcagattaggaactggaaaagaaagaacccacaaaagaacaaatagtgactattcttcgaccaaaacagctatcacattaaaattagaatttgagaattaaattatgttaaaccagataaaatagattcaattaaaattaattaccctaagttttaatcattgttaatttcactttaactatttgtgttttttttttcaatagattttgaactcttttttctcaattattattgttgctaaatagaacttaagaatttaattgtttagtaattaactacagctcttgggggatccatctcactcttgtgagtctattacttactttgaccacatatacttgtgtgctggaaaatctataataagttttcggcgttgttgcagatgactgttttagttaatatcatgaaaatagttgaattctattctaatttagtttcttttaatttgattatttttgtgcttaactttggcacttgttggaaaagttgaatatgattggtaaatgtgactacttggacattgttatactaggattaatagaggattgataagttagattggatagaacttgcattaattggcctttgaggcgaaatccttgatgatgtgtgctttgtaaaatgatttagacatttgcgagttctatttttattttcaagtttgagtgataaaattagtattgggagcaattaaattgaaaatctgattttataacagttaatcttgtaaatagagatagtgtagtgtggtgtgaaatgaagtaacacttgcttcgtgttggattgcaaattaagaagcccatagttaactagaaataattagtagtgaagcataagcaccagagggcagttttgtgtggaccattttgaggtttggaaagcatcccaatatatgctagctagctggttcccactacatgttggattaaaattctatgtgggcacatatgtataatgtatatactattataaagtgtgatataaaattaagtgaccaattatgttatgagtatcaaa

SEQ ID NO: 110722 - DNA, 8729 bp, Cannabis sativa
tttttcataattaccaaaaaaaaaaaagataaatatttacaaaagtatggattttagttttagctcttttacatatatacggattttaagttttttttacaaaaatatggacgttatgttttacattattttcacaaaaatattatactatgtttacacgttattttcataatggctctacattacgatgttctcatgttttctataaaaaagtgaaaataaaaatccataaagaagtaaatcatcatccgtaaattttttaaaaaatctgtttctctaaaaaaaagagtacttttaagtgtattttataaatatccattttttttggcgaaactattcaaaatatggttccattttagtttttgaggtgtgattaacttaggtctattaactgccaacgtgtaatatccatatcacagatttttattggtccatataattttaattatttaaatattatgaaaagtatcttaaatttgaaaatagtaaaaatatattttttattttcttctcttaccttcgtaaccctaatccattgtactcctctggttctcttatcacactaccaccactacaacaaccaccaccaccatcgtcaccacaatgatctccacaacaccacttgtactgaatccaaaatcaccaccacaacaccagttgatcgaaacccataatcacacacaaaaaaaaatcaaattacaattcaatttaggagcggagaactcaaacttcaagactatgcattttagttaacaaaagtaggatttactaaaaaaatgttttggtgatttttccaaggcggtttagaaaccattccccataactaacttagccttgtaggccgagcgaactagaacatgtgcaccaactgccttgatctccaactcatggtggatctgaattccacttgctcttacctgcaccatagagcgcccttaaattagaatgacttagtaagaaaatccataaagtaccaaataatatcataaaagcaagccaatactcaactttgaaattgtctaactcgcatcctctggtcaatgtatgcgagccacttgcgtgataaaagctggtcgggtgttctcgtatgctttgtttggatgtccgaacttctgtttatgacttcaagtatcaaatctccctgcacgactcattataagtgggattgcccgtccagtttgtagaatctattacacgtatcgtccagatggatgtcgtgtcaccttgtgtagaaatttgaataacaagtaccacaaaacaaatagtcccaactcgagaaagagaaccaagaagcaaagccctgtggtcaccaaacccttggcggcagcaggccccatcgccaccaggtcctacgccaattgtgcatacaccacaaggggcttggtcactctagagtctttgcatcaacaggtcgtaccactcttgtttgttcgatttaattcacgaggcatgatatcatagtgattaatctccaaagtgaattgatatgaatcctaagggaacaaagactaccctcatttggaagaataagttcagacatttagcgcttggggaggaaatatgaatgactagagtaggacaagaaaactgtcacgggagatggtataggggaccaccatgtggagaccgatcctcgcgtgcctagccacaactcctgaaaagtcgtggagacaagaactgagaaaggagtgggatcaacaccaacctggagcccgaccaatggtatattgtagccaccaccctgcacctagtcctctaatttctgccattgacagatgtactgggtaccaagctatcctcttggggaccacatgtaatatgagccatcagagttcacctataaattggactcaaaccctcactcaaaggggttggaaactgagtaatcctagcttatgagttttcaagataacactcttattttaaccattgttgctttgcaacttttcttaagtttcaacaagtttacttattttcttatttttcatcattcacacataaggtttttgacaaataacattgttgatgagtttttactgtcaataatattttattaattattttaagttttaattttttttttatatgtaaatgtgtatacattaatattatatatttaaaatgacaaaaaatatattaaaatttgaaaagaaaaagtggtggtgttttagtaaattattttaaagaagtatctatggtatatggtaaaagtttgaaataaaaatgaagtaaaattaagttatgtatatgtattatctttattttttgtttttgttttctttttctagaaacaaaagttctattcaaactaccattttttcgcctcaataataatgatgaaagcattgccctaatcttggtagggactatggtgtgagactactttagcatccttattgttttcaatctcaacctatcacggtcaaaaagcatcatcactgatgataagatttgtattgtaatcattggcctgaagtctgaagcaccatctcacctggctaacggtccgagcgttgcaaacaactatttttgaagtatgataaaacccatatacactattgtgatttcggtatatccgactagtgttttctgattgaatctggttcttgtgctagtttaagtctcgttaggtcagtatggagtttcagttaggggaaaatacaaatatcgactcgacagggccagtaacgctcgaccacgaacaggatgaagaggccatgatcaacaaccaaatggaggggggagtggaaagcaatggggacgaagaaggcctttttgatgatgtgaggcaacaatttatggactccatgtctcttgaactcgaggctgatgtggagttaagtgatgaagtgacaaaaaaaggggtgttagctacaactttcggaagaaggagtgtcgccaggggtcgtgtaaaggagatattggggaaaatgtggaaacttgaaggtcactggagaatgaagactatgaagccagggctatggggaattttttttgactctgaaaatgataagaaggaggtgctcaagaaacgacattggttggtcaatggggcgctattgaacattagggaatggccagaagatgggatatgggcaaatttggatatgaacaaagctagatattgggttgaagcccatggtttgcctacgccatatttaacctgagaaaatacggacgtaatcacaagaaaggtgggggaatacattgattttgatagagcatcgagggctaccatcgctcgaagaggtttcttgaaatttcaagttgatattctccttaatcaaaggctggttgcaggcttttatttgaatatctctcgagacaggaaggaatgggtgcaatttaaatatcacaaacttccagccatttgctttaactgtggatgcttggctcattcctttgacaaatgtaaccggccccaggaatttgcgtatccccctgtggggaaggcggttcccctctatggagcttggattaaagttggagttctgattcgaagttgttttgatcctgtgattccgagaatgaagctgccggagaaatcctgtgaagcccatgatgttcggccggtggcaggaaaggataagggtaaattggtcataacagagaaggatagagatgtatcaaaacctgggaagtagtgtacacaggtgcagggagccgttggaatgagttcttctccgaaaaggggggtttctcaggggacaaagaaagcttgtcttggtcagagttggagggtaaccgaattgggaaatgccaaccaacataggctgagagcctctctaaagacaaagaagcatcctatgaatggtatagataataaaagaagagatgagggtattattgctagtctaatggctgatattgggccaacacgtgatcaaatggtggaaagaccacatgaggagatttgtaagtctaatgtcccacaccaatatcctgagcccacttatgtaacttggcccaatgacaaaagccttgaagaagtaatagaccaagtcatacaaccggcccaaagggaacatgggctatctcaaatagtggtatcacatgattgtgttgatttttccactacaggctctacattttctggtgcgaaaaaaaggaaagcaagtgtatcaattgttccagtcattgaccatggagacaatgtgaataatatgggggagaaaacgccggcaacaccgattaccatgctaccaactttggaagtcaacacttttgtacctggaagcagcagccgtggctcgacgggtagtaaaaaaagagcttactctcgaagccgtggtgggggaagttcaggaagagcacgaagaggatcaaaagttgggagtaagagaggtgagaagtataccagtggaagtggagggatctcaggtaactctggaactacaactcttaattttgacaacaatctagttgattcacctacaaacaaagctctcaatttgacaggcgaggaggcggccctaatcaagccccctccgtcgccatgaaaatcctatcttggaattgtcagggtattcatagaaccccggcatcccaagctttgttgacttgggttaagaggtttaaaccggactgtattttcttaatggaagcaaagtgtaaggctgatggtatggaagagattagtaaattattgggatttcaatattctgcaattatatcggtagagggattaagaggaggtttttctttgttatggaatgctagtgttaatttaaaggtgattgaagcttgtggggtgtgtttgaagcccgtataaaggactcgactgatcagtgggagtggatttgtttgcggtctatggtaggccgtatgacagtgagaaaaaagaattttgggattggatgaaatatagagttagcagatgccaaaggccgtggatgatggtcggagacttgaacttaattgcccatctttgggaaaagtgtggtgggaaaagagtctccggttatgatactgcgattctccaaaggctgctgctgaggacaaggggtatcgacctcggttataggggatgtaagttcacatggcaaaacaatagattttcgggaggaattacgagagaaagattggatcgtgccattgctttgggtgattggatcactagatttcctgcggcaaaggtgatcaatgcacctatcatggtctcggatcatggatatgtgttcattgatacgattggggggtagccaaagggtatgaagccttcaggttttttgaggcctgggctagagagcgttcgtgtggggacataatcaagcaggcttggggtttaagaggaagcaggaaagaggctatctgtggtaagttaagtgatactcgaagagcacttcagaaatggaaaaaggggacatttggtgattgtgatggtctgataaaagaagctgaggagagaattggatggattcaaaaacagcctctgtccgaagacttaatgcgagaggaatcctcccttcaagcaagaattgcagaattgtggattcgcaaagagtctatgtggagacaaaaatctaaggagctgtggttgaaagttggtgataggaactctaagttttttcatgcatccaccatcatcaggagacgaaggaatgagatatctgcaattaaaaatgatgtgggtggttgggaaacagaggctcgaagaattgggtatgtatttaatggtttctttcatgacttgtataactcggacggagtggatttagatgagtctttttttgaactcttctccctatccgtaacaagagaagagaacgataggataaaagccattcctgagaaagaagaaatatggaacgcagtggctgcgatgcatcctttgaaggcccctgggcctgatggcatgccaggatgtttttataggcgatattgggacgtagtgggaagtgaagtcactaccatggtccaattgtttttctctacgggatctttggagagacaattgaattacacttatatttgtttgatacccaaggaggagaatgcaagttcagtggatagattccgaccgattagtctgtgcaactttgcttacaaaattattttcaagattatagctacaaggctaagggaggccattgacaagctcatctctccattccaatcggcattcgtgccaggtagatggatcgctgagtgctctattttaacccaggagttggttcacacgatcaaaagaaagaaaggcaaagggggtctcatggcgctgaagcttgatatgctcaaggcatatgatagaattgagtggaatttcctccacgaagttctcaagggcaacaggtttgattcccgggtttgtgagcttataatggaatgtgtgagaacggtttcctattccgtgctaataaatggagtgccgcaaaagaaatttcagcctaggaggggcctccgacagggtgacccactatccccgtttctttttctcttgtgtcatgaggtactctccaaattgatcaccaagcagcaaactagaggccatcttaatggcataaaaatatcgagatcggccccggctattagccacttgatgtttgctgacgacactattttatttgttcgggctaacaaaagaatggcctcaaatctcttggaatgcatccataaatatgagtcgtggtcgggtcagaaatgtagtttgatgaagtctagtgttttgttctcggggaatgtgggaggggcgctcaagagcaacattctcaaatctttgaatgtgaaggaatgtaatggtgaagaaaaacatcttggaaatccctttgtgttcaagagaaggaagagagaagagtacatgtttttaaaagagaaggtcatgaagaggattgaagggtggaaagcaaaattgctttccttcgcagggcgtactactttggtgaaatctgttgcactttcgataccgctctatgtgatgtcgacaaacaagatcccagtttccacttgccgagacattgaaagagcaataaggaagtattggtggactgggaataaggagaaggatcggtttatggccttggtgggatgggacggactttgctctcccatggccgctaggggcttgggatttcggaagttggaggatatgaacaacgccttgatggccaaattggcttggcagtgtgcttcacagacagacagaccgtgggtaacctgtctaactgagaagtactgcaagaaggattctttctggggtactagtgtgagagcaactgactcgaccttttggaaaggtattttgcacactagagatgtaattaggaaaggctgcatgacgttggtgggaagaggggactcggtggacatatggaagcaaccatggataccatggctggagtatatggagtttattgagcttcttaatcaggtgagaccaagattccccaattttaaaactgtagaagacttaacaaatgagaatgggagttggaacattgagttgcttaaagaaatgtttggagaatccctcggtcaaagaattggagagataaagcgcctgcctccagaccaaaaggatactctggtttggaaggacgctgctgatggcacctttacagttaaaagggggtactttgcgatgctgcaaggtaattctggtgaagataaaacattttggagacaagtatggggaaagtacatacacccaagacactccatgatgatttgaagagtgatcatgggttgtgtacctactagagacaagctgggatttgtgggagatcaatcttgccccatctgtgatgactctctcgaaacggcctttcatcttttttgggagtgtccttgtgcgagagccttgtggttcagtggaccgtttcccatgtgctttggggaaggtaatggtgattctccaaaaggaagacttagttggattctatcctctatgcctccagaccttgttacccagattatcacattcataggttgtttgtttgaaggcatttggaacgccagaaatgaattcttaattaaagggaaaagtgtcgatattgaaggtgttagatgcttcatcttgaaaaggtacactgaatctctgcttactgccaatgaggactgcgattgggttcacatataaacaccagcagagttgcagagaagggggataggctcgaatgtcgaagccttttgtgtgactgatgcttcgtggaaggatggtgttgcggggctggcagttggtgttctggagagacggaccaacacgtcctggtggtttgcgagaaacacaacagcttcgtcggctgctgaagcagagctcctcactgtccagtgggcactgcaggtggcagatcaaaaaggtttcaaagttgtggcgtgcgcttcagatgcaaaggttctagtttcagctctcaataaccggaaatgcccgccgttgtggactctcaagccgttagctctagaagtcctaaatttatgtaattgttttgatagctgtaagttttattttatctctcgaaatgacaatgtcgattgtgatgccttagctagatgggcaagagtaaacaagctttgtaatggctgtattaatagggaggggtcccctgttgtgattcccactttcttactacaatgaactacactttcaaaaaaaaaaaaaactaccattttttcagttttcaacctacaaaatcattactttctttcctctaaattttactgtttgcccttaataatataccccatatcaaaatttataccctcccttaatttgtacaaatttagtccattgatta

SEQ ID NO: 110723 - DNA, 2348 bp, Cannabis sativa
  modified_base (40)..(44): a, c, t, g, unknown or other
ttaagtgatccaaatcactttgtcataataataataatannnnnaataataataataataatacaacttatttttatgcctgcttaaagaagagaaaggaagagaatagaatagcgagctatacggatagtcatggttctatgattgatgactaccccgatgtggttaaacactatcttaatcactttaagagctacatggaagctcaatttctaacaagctggacatgggatgtatagagaatggaaagaggttggatttagctcaacaattgaagttgattcaacctttctctagtaaagaaatcaaagaagatttatttagtattcctagctctaaaagcccgagtcctaatagttttaattcagagtttttcaaggtgatgtggaaggagatagggtctgaggtgagcaatgcagtcaaagatttttttcggacaggtaaaattctttttcagtttaataaaactgttatttctcttattcttaaagtggaaattcctgtgatggaaattgactatagacctattgcttgatgttctactatctacaagtgcatcactaagttgatttgtaagaggcttgctgaggttcttcctgacttggtgcatcaaaaccagggagcttttatcaaaaatagatccattgctcataacatcttaatgtttcaagatctgtttaagaactatggtagaaaactaatctctctaagatgtgctataaaaattgatcttagtaaagcctatgacatggtggattggggttttctagaagacttgcttgaagccctaaattttccctctaaatttgttatgtggatagtgacttgcttgaaaggaacttcttatacgcttatgatgaatggtagactccaaggcaatttcaaggggaagaaggcagttaggcaaggtgatccgatgtcaccattgttgtttgttctcataatggagtatcttactagaagattgaggatggagactactaagaaaactttcagattccatcccttatgcaagaatctgaatttggttagtcttttctttgcggatgaccttattctttttagcaaagatactctttcagctatgtaacatctaaaggctatcttacttcacttttcggaggtgacaaggttgtgtccaaatgattctaaatctcaggtttattttggcagagttgatcccaatacaaaagaagacattctaagggctcttcaatttgttgagggaacttttcctcttagatatcttggggttcccttgagacctaccaattggagaagggaggattgtgaagctattcttaataagatcaaaataaggtaactaacttgggctactagacatttgtcttttactggtcgtactcaactcattcatttggtgctcttggggcttagcaattattggatgaatatctttatacttcctcaaagcatcataaaggagacagaaaggctttgtctgggttttctttggggtgtgaaggctgatagaagtaagatccacttggcttctttggacaaagtttgtctcccaaacctttttggtggtctcgggttcaagaatggttctaattggaatagagctatccttagcaagtttgtttgggctatcatggataagcatgatatcctttgggttaaatggataaatgaaatttacttaaaaggagctaattttcagagttatgacttgaagacagactcaagttggtattggagaaagatttgtcatttgaggaagaaattcagtaaggctaatctaagtgatgcgacttgtagaggtaatttttctgcttccttattgtataacagccctattcagttggagacagataaatattatagagttgtttggaacaatctttccctccctaagcataggtttatattgtggcaattggtgcataaccagttgctcatgagagacaattttaacaaagtttcatattatgcttgatattgactgctgtcttgtgtattggggtgagaaagagagccatgaacacctcttttttgactgtgttgcttctaaggctgttattagaggagtctttgactggattgggtttgaagtttggcctaaaacctacaagagttgcctttgttggctgactttgaatgactcaaacaaggttaagaatgttgcaggaatgttgctgttggtttttgctgctatagtgcatttgatttggaaaaatagaaacaattgtgtacataagagttgctgtttttctattaatagaattgtaaatgacattaaagctatagtctgttagaattattttgccagggtctagatttactaacaagtatatttcattgacatcctaatatgaatttctaaa

SEQ ID NO: 110724 - DNA, 3291 bp, Cannabis sativa
aaaaaaaaaaaaacattatacagtatttgcaattgcatcacaataaatagtcaaccttgtttttcagccatatctataattttatatattgattgatatacaacactacaaacaaattaaacaacaagtcttcactttccattacaagtagtgtacccaggacagataagttgttctttggcatcttctcaacaccacatgatatgcaccttaaaagtgttaagtggttttcaatattaattattaaattaagacataaaagatttgatgttaaattgcatcaataatactcgtgtgttggcccttagcaaataagcagtactctgattttaaggcctgaaatttgctccattatcacgtcaaattcaaagttccgttcagttagaaaccatcagttgaatgttaaggattctgtgtttgacaaaggcactaacaaattcctcaacagaccacatcctcagtttgtgaggaaaaagaaagaagaagcatattttaactatatcaagacaacataaaatccgttttgccattttgcatatgaaaatcaatccctccacctatgaccacagttggggttgcagcaaacaaagaacaaagtcattccttcctcacctctagcagtagcctgcaaacataaatagcaaaaacaccccacaacattagacagcctagaaacactaatataagtatatcattcaccctatccacttagaggggaaatgttagtaaactttcagtactggtcttgtgattgcctgagcatgatagcacaaggtagacaatgcagaatctatcatctcttgatttccagttaaagctaaaggtaaaatgcttataccaatgattttcaattgaaaaaatacatttgttgcttttgttagggcagttcaacagaataaaactatcaacaagacatcaacacgaaatggattgtgtttttctgactaatttaatgttacccacatcaagagtaaagatttataattctttgtcaggatatcttagttctgagctgacttactcttttcccttaacagaaactcacaattataaagagcaactataaaataagttgatgataaatgaaaggctaggaatttgacctggaaaaagacagcttctccatggttgcattgagcacaacgaacagcttttgtccgaggaagagtgggatctgcagccacatcttgcaatacctgagtgcgttctccaacagagtgatgtatctcatttctatagacacagttgttatcagcaacttcctgaagttcaataagagactaataactaactgaaaacagagggggtaaagagtatagaagaagacaccatttgaatcagtaaaaagatcaccaaaatggaaagagaaaaaaaatacatttgagtacaaccaatatcaccttcaaaggcttgccagtttgtgatgtttggttcactgtaataataattgtaatggtaatgaataggtccattacatcgtttgtttttcaattttaacttttgtaatccattacaatgtaatgggtttcattgagtattgtaacgatgattacatgccaaaaccaatgtaatcttcattacaattacactccattacaaaagtaaaataagattttaataaaaatatagtaaaaaaagtcaatgttctatattaccttttcttttgaatattttataataataaaatgaaaacaatacggttattttggtccatacacattttattccattacattctcataccaatccaaacacaataattctgattacaatgttcattccacaattcctattaccattcttattccattacattaccaatgtcattactattaccattccattacaccaaatcaaacaccacctatgttcagaaatattaccataacataacagaactaaaccttactttgttcatgctttcaaacaaaaaaggaagaagctgactttgttcatattttcatctctatatataagattctctcatttaacagcaaattaaaatttaccaatataaactttaaaaagaaataaaaaactgaacaaagagttcatactcatgtgtagcaagaaaactacttttcaatctctagaggctttcaggatggttcacctccattttccaaaacgaactagtcgctcggttaaagcctaaggcttattttccaccattttgggtttacaaaataatttgaggaatatgtagtaataagtcaagaaaataaaaattctgacagatcaaataaaaacccagtaaaaaccccaccaatttcaaaagaaaaatgaaacaaaaatttgataataggtttaagtttaagaatgtcttgcagataaaaccaaatcacagaatggtcctgtgcagagagagagaggaagacctggtgatcgcagttgcggcatgcatagaggaggatcttctcatccctgtcttcctttgggtataggatgttgttactgcgaaattacaaccttcaattagcaaaaacaaaatccaatatttatgtatatagtgacaggtaaagaagaaggagaagaagtagtcgactgaccattcacggcaaaacttcatggtactcattttgagagaggtaggtttggagttcaaacagagggtttttgcttgggctctctatatcgctctgtgctcttcttcttcaatggtgtttgtcgtttcaaaattcagagctataacttgcacaaaaagttgagaaaaaatttgcttcgttagttgcccttaatataacaaattcttcacacagtcattttatcgaacactaaacacatcaactataacactatcacacaatatcaaaatacagctataaaatgaaatggaatttagccccaaaaaggagagcgagagagagaagatattcaccgagatagctgagagactatggaggtgtggactgcaatggtgaattggaagtggtagaccgatactgaagagggaagaggaaaatggggagagagagagagagagagagagagagagagattttgaattgtaaagttggattttaaaaaactgaaaacgctcaaacttatgccctaaattgagttttttcttataaattactaaaatctttgttttttttggcggtgcatatgtgcaatgtgcatttttgttttagaaatgctaaaaggcacactaaattaagtataagattattataaaatatcagtagaattttttttttgaaacaaagattgtaactttcattaaagcaaatcagctaacaaaatagcttccaaaccagaagggacagaccccctactggaaatacgatc

SEQ ID NO: 110725 - DNA, 2172 bp, Cannabis sativa
  modified_base (2133)..(2144): a, c, t, g, unknown or other
cctgatccatcaacatggtttatcaaattttcaacatagatcatcaaattatcaacttggtttgtcaacatagtttctataatttagagaaagatcggatacgatattgacaatacccttagcaatttagtactaatagataacattagtgtgccattagattcatcaattgtacttatatctgattaaaactacaccgaaaagactgcaactttactttttacttccatgatacaacagtacaatttatgtgtgacttcctcagcatgaatgagaatatgattttaacatttaactatatttatgtataaatcaactcttcccaaattcaaacctgtgcatcagtacttgacaccagttaaagataacgttagcatgagaggaagctgtcatattaatcggtggattcttactgttttttaccaactacattcaataacagaggctaagaaaaattctaaaaacatggatatgagaattgatcctagcagaaaattacaacactatggagatgaacaacaagataaccgatgaatcaataagtacattctgattctagcatactaacatcatataaaactttcgaaactacaaagttaaatgcaatactgtaaagggtgccaaatatattattgatctaaagttattttgttatgttaataaagcttccagaagaacacaaataagtctaatcaccttagcaaaggagaaacaatgactaaatcaatcttcttgtaaagcccagatgaatgaacatgcttacgcaaattgtctacctgtcaaaagcaagaatactaatgtatttttctcaagaacatggtaatgctaatattgctattcgctatcgaaaaatattagatggtggacactcctttccattattaactcaatgatgattttaaagaaataaccatatacaatgactagcttcttacttgctgccagcccagtggagtaagttgtgcatcgaaaaaatcgggattcaagtatgctttgtagttcttatctccttccacattgtggataccttgggcatgcctgacctggatgtatttttcattcaaattgcaaatttagtcttatcaaattcacaatgaacagtgtatctaattgatcatcaaaaggtttgaatcaacgattaacaaatgtatccgacttgagatgaaaggattacaaaccagatgaatagtcttgcaacggtgcaatggaaacaaactaggagttggagcagtactatccatatctgtgaatgtaatcaaagtgaataattcagctcatatcaaaagttataatgaatttcttgaatgaaaggtgacccccattcttcttcaatttgcacatttcaacaagacaaagggagaattacacaatggtcagaagaaagtaccaattaatttttacctccctaatttcattagatcaaaactaacataatcactagcccacattctcaaatccaagaaccacccccttctataaccaaaaaattccttcaaaaatcaaattttaaaccgaaacccaagactcttcttcagcttcaaaagacattaacttttcaactttattaacaactagaaaatcaataattggtatgtataattcaaccaagcaataaaatcccaattctcaaatcccagattagatatcagattaaatactagattcccatcaataccaataaaacttccataaattatgaaacaaaaacaaacccagatcaaatcaaagccaccaaaacagaaaagcaatctactttaccaattataacagaaaagaaaatagaaatttaaagatttaaagattcaaacttaaaaggtgttaccggatgaaatagagagagaggagaaacaaagagaagatagaggaggtggggttgctgagaaggacctcagtgcagaagaggaagaagaagagaagcaatgagagggaaagttgaaggaaatggtggtgatggacatgtcgattgggaccagtccaaacccattggcttttgtcttattccttttttgtttcaaatattaatattttaggcaactatccaatctccatccaattaaattgttttaggatcatttggtgggctccacactctttttttaaagagaaatagagagaaaataataataataatannnnnnnnnnnnataataataagggtaaatagcggcataa

SEQ ID NO: 110726 - DNA, 8353 bp, Cannabis sativa
  modified_base (131)..(139): a, c, t, g, unknown or other
  modified_base (221)..(239): a, c, t, g, unknown or other
  modified_base (748)..(766): a, c, t, g, unknown or other
ttttaacgtccccatttcaagcctttattgggcccttatactcacagaatgatgactcttatacacgagtacgtcactctggatgcttcatagactgatgactgggcctacaaaccaacacgagtgtttcnnnnnnnnnttgtcctcactcgcatgctttttgggaaaacttcccaggaggtcgctcatcctgaaattatcccaagtcaagcacgcttaannnnnnnnnnnnnnnnnnntgggctaccgaaaaacaagatgcaacttgttgatataggtagtaccaattaatctatttaagccctcttcaactgtgtagtcccatacctacatagtcttagaatcatcacatttgaccttccttaggcggtgtgggatttcacagcttacctagtatttccacttacggatcacgggactactaactgtcacaatcacccccttacggggtctgacgtcctcgtcgaccacacttctggctgggtcaaggctttgataccgtttgtaacgtccccacttcaagcctccattgagcccttacacccatggaatgatagctcttatacacgagtacgtcactgtgaatgcttcatggactgatgactggccctacagaccaacatgaatgtttccagcgtgctttgtcctcactcgcacgcttccttggaaaacttcccaggaggtcatccatcctaaaattaccccaagtcaagcatgctcaactgtggagttctttcatgatgggctnnnnnnnnnnnnnnnnnnncttattgatataggtagtaccaaataatctatttaagccatcttcaactgtgtagtcccatacttacacaatcttagaatcatcacacttgaccttccctaggcggtgtgagattttacaacttacccagtatttccccttacagatcacgggactacaggctgttacatcttaagactgaaagtgctttggggtttagatgcctttgtgattttaatcttgctattttagcaaaacaaggatggaggttcttaactaatcttcattcccttgttggaaagttctacaaagctcgttatttttcaagaggtgaccttctcactgctgagttggaagagaatcccagttttatttggagaagtatatggagtgctcaaagtcttgttcgggtgggtgttagaagaattgttggtaccggttgtaaggttagtattttagagcatccatggctccctaataatactaatccttatgtctcatcttctcattcaagcttggtcaatcaaaatatccaatctctgtttcatcctatctctaattgttgggatgttgatcttgtgcatgacctgtttaatttgcacgatgctgatcttatttctgttcatttgtgctcctctgcttcttgcgattattggtctgggttggtgaacattctgatggcttttctataaaaagtgcttacacattgttacaaaagcaaggtgattcaagagtaataattctggtttctggcacaaactctggcatctcaaaatacctcccaaagttaagaacctgcttttggttgtcttccaacaatcactcaactacatagaaagagtatcgaagtgtcttctatatgtcctgtgtgtaaaagtgatatttaatcgactttttatgtgctagtttcttgtccctttgcttgtgcttgctcaaataaagttggacttggctgaattctttttttaacaattcagacgaagatgagatttgcacggtcactatgttatgttgggctctttggaaatctagaaataaactagtttggaataatataaaatatctccctcaatttatgatgttatttaaagcccagtcaggtctgaccatgggtataggcaggctaggcctgtgtctagggcccacccaatccagagcccaaaatttttttttcctcttttaaaattatataatttgtttttactgattaaaaaatattacattttttttaacataaaggccgaattttttttttctatgacctactttgtttcagggccagcactgagcttagtgtaaattgtctttatcatcaaccttaataggatcaaatgatgatagtattgagtttcgggcttcacttgtttcaaacacaatcaaggtaaatataggagcaacaatatttgattcgaagaagaaatttggttttagaattgttgcaagagatgatactgagtctttaactgaggctaaaagtttatgctacagtgggcagtatactgccaaaatggtcaaaattatgggtgtgaatgaatctcttttttgagcattgtcttctaattagcaactggtcattaaaattgatagtcttgttcaaactatccgtagtaatgttcacatatttcggcttttagttaaaaactgagtatttttatctcttttatgtaatgttcaattcttatctctactatgttgctagaagctgttggttttttttagattgtagctttctagtacatactgctccaatagagcttcatactctttttgtactcctatgaaattttttattcaaaaaaaaaatctcaaaataacgatttcgataataattattattaaaatatacgatctaatataaaattatactatttaaaatggttaaaattatacaatatttttgcagcttttatttggagtaagatttattacggtccaatcacaaacttacaaagatttagtcatttttttatttcaacaaaattcaatgcagctcaaccagtcaagcttatctcttatactataagcttacttgattttagaagaaatggaggagagcccacgtgcaccgtggtctatcacgtggcatccatataatcctacgtgcacattcctaatcctccaccgaaataataataataaaaattagaaaaaaaaggaaaaaaacaaaaaaagagagcaataatcaaacatactcaagcttagataatcacacaacgtgtcaaaaccgcattggctcagaacacaagatagttgtaaaaggtttttgactttttgtgtaaattgaagaaactagaagcaagagatgatggggtttgactctacttaaacctgtcgtttactgagaaatttctcacaaaacgacaaaacgtttttacacagttccattctggtccgacccagctccgacacctcgcttgccatgtgccgaaaaccaatgccctcgacatttgttaagtttttttctttctttaattcactcttattaggaggctaatttaatcataaacttacagctcaagtcattactaatcctaattaattaactttcgtcattaaattaaaactaatctaattcattattaagaaagaaaaaagaaatatatatatatatatataaaagttggatagaaaagaacagagccatgacttttagttagtttttcctctctctctctctttctattaagaaagctcaaatacagagtttttgtcttctgtaactctctatctatatacttctttctctctttctttctggagatttatgtaataaagatcgaggaacaggaagaagttgggaaagttttcgttttattttgttaagctaaagctgaaatgttttatttttttttctggggggtttcaaatttggactgtttgatcggattttaagttttgggaatcgtagttaatacttttcagttcttcgtgggtttttgtgttcttctttttttttttttaaaaaaaaataatcgtggaactgaaaaaggttgtatttttatttttacagtcttgggtttaatcattgtgtttatggggtaatgtgaattttagtcagacccattttagagagctggtaggtctttccaaaaaaaaaaaaaagctgaattgactggtagataagagaaaaagactgagatagttggagttgggacggaaccctaaaaagaaaaagaaaaataataaaaatgaaagctttgctctcaaaaagcttctttggaatttttgagataaatgctctctggattttcttctattttgtctagtagtactcttcagtagattgtttcagaagaaaccctaaaaataaaggataagattaaaaaagaaaaaaagagtgtttttgttaaagaattggttatggcgaccgagttagaaaattcctctacggtttccggcgaagcaagtgtttcttcttctgggaatcatactgtggttcctcctcctgctcctcctaaatctactgctaagaaaaagcgaaacttaccgggaatgccaggtagttaaagatgagatttttattcatatatatgaatttgatttgagttttggagttttgggggtttttttattcatgggttttttttttttttttacattcagatccagatgcagaggtaattgctctgtctccgaagacccttatggctacaaatcgattcatttgtgaaatttgcaataaaggatttcagagagatcagaatctgcaactccatagaagaggtcataatcttccatggaagcttagacagaggactagtaaggaagtgaagaagagggtttacgtgtgccctgaagcttcttgtgtccaccatgatccgtctagagctttgggtgatcttaccggaatcaagaaacatttttgccggaaacacggcgagaagaagtggaaatgcgataagtgttcgaagaaatacgctgttcagtctgattggaaagcccattccaagatttgtggtaccagagagtacaaatgcgattgtggaaccttattttcaaggtaatttcttttcattttttttttcttcaaatttatttcatttttgggttttggggttctgaaattgtttgttgttttttgggttttggaaggagagatagctttattactcatagagcgttctgtgatgctttggctgaagaaagcgcaaaaacccatactccggctccagctcaggctccggctccggctccggctgcaaaggctcctcaaaagaaggatcaaactcaattagctgaaaatatgaatatggaatcggaatcgaaagctcagctggtgaagtcctcaccgccaccagcaccagcaccggctccggctctggcgccggctccagcaccatcggcggctcaagcttcggcttctgtcccatctggtcctcctcagtcaactggtgtaataccatcttccactaggccaattcaaacaccaagtgagtgattatgacccaaagtttggatttttattttttttggttcaatcttttcagttgcttatgtgtttatttttagtattatcattttttttttttgtctaaaatataaatatgctattttgtctctctctttatttgtttctccggctttggagtgttgttgtttttgtctgttactgatcttttattgaacatggatatatagttactattattgtttggctactaatctgggatttttttgtatgttttaagaaaactaataataattacataagtaaaaaaaacaaactttttactgaaaccgtgggattcagttttgtgatctctgtaaagaagtgaagttcatttagagagaaaggaaaggaaaccattattggttctcctccttttgcttcaaaaaataaaaagctctcataaaagtgaagtcttaaactttctatcctttttgagtgttttgagcaagacccttttagttttaacactttttcttggttttgtactaacagcagagttgccggaaaatcctccaccacgcactttggaagaagccaccgccacagccaccgccccatctgccggaacaggcttaaatgggagctcgagtagtagcgccactagttcaagcagcaatggcagtacaagtagtagtgtattcgcaagtttattcgcttcctcaactacttcagcgagcttacaagctactactcaatctcatggatttactgatctaatccgtggcatggggcgcccggattgccctgctgatctcgcaccaacttcctccatggaattaccgatttctcttggactctcaacgagccacggatcttccatatttggtacagccgggcaagagcgcaggcagtatgcaccaccaccacagcctgctatgtctgccactgcactccttcagaaagctgctcaaatgggcgctgcagcaacaaatgcctcattgcttcggggtttagggatcgtatcgtcttcatcatcatccgggcatcaagagaatttgcaatggcctcagaggcaagtggaacaagatagtaattcggttcccggacttggtcttggtcttccttgtgatggaaattcgggtttgaaggaactaatgatgggaactccttcaatgtttggtcctaagcaaacaacacttgattttctaggacttggaatggctgccgggggtacccaaaatggcggtttatcagcattgattacttcaattggcggcggtttagatgtagccactgctgcagcttcgtttggaggtggagaatatagtggcaaagacattggaaggagttcatgatgagaaaaaagaaaaaaaaaaagaaaagagaaggctttaaagggttctttctagttaatcaaaattagtaagatataattttacatgtaaaaagtaaaaagaaaggggaaaaattacccatgaatgatgaaggtccacaatcacttgaggtctttcttttctttgttctactcttgccttgtgatgacttggaccaagacttttggtggtggtggcttgactttttatgaaggaaagaaaaaagagctaaaaggaagaaacagagagactcccctgtgatttttttaggggctatttgttcctttagcttaaaaaaaatagaagacatagccacttggatatgtttttgttgtgaacttggtgaactaaatatgtaaacaagtttcaactactctgccttacattttttatggttcttttttctattgggtttattattttcattgtggcaaaaaaaaaaatgttgtagaggcaaaggaggtgaaggtggatgaatatgttggtaattttgtaaataactttaaatctctttgtaattatcataatgttttcatttgatcaaaaatcatggccaagacctattgaagataataacaagaagatttaattatcttgtttgattaatgtaacaatcaactctaattggaagacaatgacatcttatcaagcctaaatattaatcaattgccaactatatagttgcgtgaatggatctattcacttaaaaatcaaaatatttaaaataaaaataaataatttatagtaataaatttattataaaagatgtcaactataccttacacacaagaacctgtttttatgcagtaccaagaggtagcttgttcaccattatttgagagactagatcttttaagtattgtcttataagtcaaatatggctcattggatacttaaaataaaaatattcaactatacaatgtattacactcataattgagtacagtactatttaacaatagcagtctataatacaatactatctaacatcacttaaaaataaccttttaggattaattaatgatattttataaaatttattactttaaattatataagaaaaatactaaaaaagtattattggtgtctagtatcatcctcaatgttattgatataattaagtattgagtctcatataactttaaaaaataactttttggaatatatttaactaattgtagagcactgtctatagaaggtgttggttaccattagtgtataagtctaatatttttattataccaataacaatataatatatttaaggcaccgtttgtatctcttagcatttttaattaaatatatttttgacaaaataattaattttagatgggatttgatttgtaaatttaattaatttcccaaatttaatgtatggtgcatatttaattgtctagtatatttctgccttagatgacttagctctaatagttggacataacaaattagtttcgatatagtagtgacatgttgaggaaaaaaacttcaaagataagtaattttttcttaaaataataattgagttttatccttaatttaaaatttacaatattatcgtttcgttgtatagtgtgctaatccactttctatatctatttattttgtaggtagttttcgtacaatatgttgtttttttagatgcctctcttgaaggtagtctgtctaaatttctgagataacttggtcttatataagtcgctttgtttgttgtaactcatattttgaatttgtatatctttgactggaccagggacggagggactttagcccatgtgtgggctaaagccctcactcaaatatatacatcaaattttttatatgtagatatatacatatattaattca

SEQ ID NO: 110727 - DNA, 11406 bp, Cannabis sativa
tatttgttgtagtgtagagtgaacaaattaatcttatacataaataataaaggccatataactctattagaattacatctaaattcaatgtgttgggcatgcgaattcaaatggcacaaataatataagagaataagccataatgtaataattagcttcgtattagtttgtgttttatgagagaaaacaaataaatgagagagaattaaattaagggataacatagaaaatattagatcacgaaaaagttgaagaactagaaaatggtagatggagaaagtgaaagcgaggtgagtgagtaaaagtagaaatttaaaaaagattgaattgaaaaaaataaagtgaatagagatattaatgataagtgaattaattaggtactgaaagtaaaatgataagagtgaagtcaatttattttattgaaaagagacgtaaaatatgatatgtgagggaaaaaaataaggatcatttcataaatacaaaatgataatttatttttactttattagagatctacaatgtttttaaatttttttacggaaatttttttccaaaaatcggaacattgttttacgattgttataaaaaaacgttattttacattgatgttatattatattatgttacgtatctgcaacatgaaaataacgttgtttttaaaaaaaaatgtaagtaaaaaaaagtgaataaaatatcgtcttaggcacggaccccttttccaataattagttgcaataaaaaagtcaaaactatttgtaaaataaattagccaaaatatgagcttagaatggggtaggaaaaaaagtatatgagagaatgtgtccgttattttagttcatgagttttggtcttggaaatttgaagaaaataacaaccaacaacaacaatcgaatatccctaggaaaagcaacacattgctttctaaaacgttcctagcctagaatgctataaagcatatagcattgatgtatgatttgacattgttacaatggcgaaaacatgttcacaactaagcgaaaaaaatcactactttcttaaattttcatctactcaatgaagaaaataacatttgaactctacatgtggtgatcaaaatcctctacttttaggggtattttgttgccagaccatgcctggttgattaactatcccacgcccagtggccccatacatttgccctacatcaggctgacaacctatattacttggccgtatgccactgcccggagatggaggaacccaccaagtgccttgctgctgcggctgctgctgctgttgccacaaagccatattttctgaaccattcattggaggctgcattgcttgatgggcaggctgcagaggcactaacccaaaatgtggctgatttggaatgtgaggtcggagcattggctgttgaaagttttgcacttggtgggttggtccttgtggctgccattctgggatatcatcatcatcatcattccagtgctgaacgctaaccccacttacacctttctccttccaatttcctggtggaatcgctgaggcgctgttttttccatatttgtgtataagttctctcacttgctcaaccggacaagtattaagtggatgatatggcactggcaccaaccccctagagggattacgggcagaaatatttggccgtggttggtttgaaccaccagaaaaattgaattcaggaaggtcatcttcatcacccctggcagtcggaggaccaaacccaggaggaacatcatcctcgtcgtcgtcgttgtcgtccgtaggtaagcgcctagagttaggggtagctacgtcccgagacaaggcctgtttgtgtgtgaaattggaatttaaacttgaatcttgatgtctcctagatgtgagatgttgctttttggatgtatgtttgtggtgagacgatgatttgggagaagtggtacttaattttctccatacaatgacaccaattaagccattatctattgcattaagtgcttcaatgtgttccttctggacgattttgcccagcttttcaacagtcttattatgtggtggacaaaaataaagttctactcctgaagcaggctcggcaaaacccactctctcatcaacaatatatgaatctgccacctgtaaagattaaaacaacatcttcttaattttttttattacgaacagtgcagaaaattcagcattggaagatcaaacgttacctccttaactgctgcaatctcattttcagatgactggtccttgactaagaaatgaacgacctgcataaattggtatactatcaattacaatatgtataaaataaaacacaagacaaacactctaaatgtatttgcttaaattacaattaattatttatgacaggaacccgaatttattttcttcgttttttctaaagttcattttatacaaaatatactttcaatatacatacatccttaaatcccttcacaattaaatccctttctttttttcttttcttctactttttttttcttttcttttcttttctttctacggttgaaacgatttaaactatagccttgttacaattaacagtgcccttttaatattgtacagatttttaatgtggtttacattattcaggtttcccagaaaaattatatatgagttgcgaggaataaaaatcaagaaaccgtttacagtgttctccaaagagtacttaagtgaaagaaaagaaaatgtaaaatcttgttgagtgccatattcaatgatataattaactttaaatctttggaatcacttgagacaataacgctgtatacacatcctgctagaactggaattggttgattataaaatttgtatattgccaagctcaatgaatgtctcattagacaaagtccaaaaagaatcacttccaccatcggcaaacaagctttgggtatcaaagagaagttagtgaacatcaaagctgagataaaaaaactcactctaaccaacaaaatgacataatggtactcaaattttattgtacaacagaaataaactttcaataccatgacagcacgactacgggatagtggaagctcttgaagaaacttctcaaatgcatctagtcttactctccctttgatttcaagaaacccaggccactcagtagcagaggttttctcaccactgcaacagcaaagatcagatcagcaagaaggggaaaaaaaacaaaatattaagattcacgtttataccacgtatcaatcaccaacaatagtaatcactatgccacattcactttgttcccacaagttcggtccaatgcataacaaagtcgaattaaaatttatctactaatctctcctagttttatatcggaagatgattcacaaaaccctcgacatataatctctttttttttttaccagtcattaaatacaagtcaaattcatttacattaaacaatggaacctgttgggtgctggcgttatacaaaatcttcaattcaaaacaatgttaaacatggtgggaggggctgtgggtgtcgtgttaaagcagattcaaagagccatatggtaaaaattacatgttacacaggaggcaccagtcaaagtggtcaatgtaggaagtagatataaactacctggctaaatagtatcagcttcctcatatctgttaaagacaatgagagggacgatcacagcaccacaaaagagaaagatgcccataaagactacatactaataattaatatgtattttgaaaagacacgacatgcagtcacaaagtgcaagctcaaaagttaagtatgccgttgctaagtgaaaacataaatctaaagacaatcattagcgtcaagaaaatattttaaacattataactttgacatttagtgtattaagaaaatgtaccttttaaagagggcaataacaggtgctgttgttgagatgttcaactgaaccaaacctccccatacatgctcacccttgggtttgggtgacaatgatttttccgttttcacgagactgtcacgagatttcacactaacatgacattctttggatttagcatcaacaagactttctctggactctgcatcgacacgataaccactagattttaaatcaacttcactgtcaataggtttcgaaacatcatctgtgtttgtattgtcgcatttttcagaggaagcatcaacatctttgggacttaggtccaatgacttggatccagagccaacctcagagtcatccttctctgatacaggtgtcctctctgaatcatccaatggtaaattgtcgaatggtggctctgaatcaagggattccatgaactcatccaacgagacaattggaggaagaaactctgcatctttcaatccatcatcaaccatgagcccttcaattaaatcatttgcttcacaagaaggaataatagtaaatgtgcatgacgcactacgatcgctcaaagtattcagatcacctttatctccatcagcttttgaagtagagatttccttctccttcccttttggccaactttgagcaactgaacttgaaccaccagaaatatccataggaaggctatcgtcttgttcaacctcaacttgaaactcacccttgtgtgtctttctcactaaacgtctaatatcaacatccgaatctggcaaaacaaccatttgtgcaagctcttctgccttcgccatccgccactcagaaagctccttggaagcaagctcctctgcagtcattgaacagagccgctcgggcgatatttcccctctcataactctttctctcagctccgggttattgcgatcttttaagttgaatagaagagaccttcccttctctttgtactttttattcacgcctccaaataatttgaataattctgcttcaatttttaatgccaaattttcgggagattgaaatgtttgttccagcttatcagccacttcttcatggtttgactcctctttttcagtgttttgcattttctttctcccaaccatctctatatcagattccaatacccaggaaagcccatttccctgcaagagctcatctttgacaaagaaattctcactaaaagacacatcattatacgacataaggttacccgattggaattcgctgccatcaccaattgaggttagtgctgaatcaccattttctgcattagccagaatattgtgagagtcaccttgctcgtcctcatttttctgctcagacaatttattcccagcgtacataatttcatgagatgctttagtttcagggtcaacatgatcaccaggttgatcgtgactcgagcaatcatttagattatgtgaaggtttggtctcttgttgattaaccaaagagaatgcagcagctaactgttctctcatcttggatcttacagattcagacgattctattgaaacttttgatggtggttgtacccgtgcactttgacctttttgactcggtgttcgctgtgaaccagatttattggaaaaagaatccatctttaccattttcttgttaaaagtcggagaattaagtgagcctggagaatttggcatggtttccaattgcacagttctcttattcggtgcaggcatctgctgcaaccatggtctatgttggggttgtgccattcgcttatgtgacagctgctctgatgaagagttaatggaaataggttccataggtgccttgcgcttaaaggatgcagacatttgatccatattcagcatagatcccatatgtcctatttgattattggatgttaaaaattgatctgattgcagagtttcattagctctggtttcattctttcccatttgcatttctattgattctaatctctggggtatgggattatctgaaattagttggtgcgatacaggatgacttgatatatatcctacggagccaacaagtcccatttgcatttcagagacggatgactccatattattcgtaatgggttccagctgagtaccttggatcttggtcctgtaaactgctgtgcctgtgagacaagattgttgactagattcttaatttgttattgtaagaaaagatataaatatatttacatatataaaattgaagaaataaaaagtttcaactcccataacttatcatttctaagaaattctcatgacttaaaaaataatatattatcatgacccttcgaaataacaaatcttaaacagatctatcgttctcctaagcgaagtttttcaaattgcaaacaagcaaaaaaattacaaagtatttgagaaacataagaacaaatcagaactcgtcaacctatatcaaagagaggcaaaaatgcatccataaccatgagcacattaagagaagaccaatcactttcacgaaaagtataaagacaatttttatcaccaatcaaaaaccaaaaccctaaatcccataaacatcagatatgaaagcaacagctcaaagaacaaaatagcaaaacacgtaactaaaaaaaatataaacccaaatcaaaatcaaaatcattaagtctaagcatacttacaaatagaatcagtagaaacgacccagtaagggaagcggtggtggagagtagctgttatgttcggagatcagaggtaactgatccgaagacgagtcgtaaagtaagaggacacagaaaaggctagggttttgggactggaaaagtaaatcgatttggggattacaaagatcaagaatttggaagaaagggtgggtggatgaagatataaacctaatcttcttctaaacaatgaagaatgaaagaaagaaagaagtgataagtgcacacgtgttctatactcttcaattattatgttttttttcttgatgagatgatctggaccgttgattcccgttcgacattcagtgattttcttttacgaacactcttcagtgattttctttttttttttttttgaaatagatcaactttttctctgtttttttttttttttgaaaaaaataaccaaatagatacataaaaagttaattctgatttttttttgatagaaaacaaattctgaatttctagtagattctttttttagtagataatgtaaaaataaattataaaatttgtttagtagattatgtaataatacatttctgtaacttttctaggtatttaattgtaaattgttaagtaaattattaattgtattaggagttaaacataaatatttataatatatcataattttttttcaaatttaagctgtttttgagttttttttagttcctaaagagaacatttttgagttactaagcatttatgctttgagatgactcattaattaatttttcttctacattattttattattttaaaatttaatatgtaatatatttgtactacattgtttgattggttagcaaaaaatataattatattccaaattcacactaaaaaataattttagtcttcctttgtgtgcacatcctgtggctcacgccacatcactattttggcgccacgtcattgctgattggtaacaagtgtccagcggaaaatcgaaacatgactcattaatttatcaacaacatctcttctctttctctcatacaaaccatttctacactttctttgcatactttttttgattctctatctctacggaaaggagctgtacaagtaaaaactaaaaactatataattgttataattggataaatttatgtaaaaattttaaaacaaaatcatacaaatatatatatattgtgatatgatttttttcacgaaatgtattccgtggtacattagatgaatctcaagtacattaaatgagtgtcaaagtacgtttctactttttaactctaattacctctaaatcaatctcagccgtcagatcaaatgactccctcatctgacggctgtcgtacatcacagacaatccgtgaaagtacaataacaggacaaaatcatatccctatatatattttttttgacaaagaataatgatttctgtgtacataaattacagtttcgtcgtatatattcatagatcccatcttgataaaaatgacttagacaaatacatatcaaaatgaattaacacataaacgtgtaatttatatctccacgtactgttactccatttttaaaatattattccatgttggactaggaacatcaagtaatactaattatatgagaaaaaagatagacatcttatttctttacatttctgaattgtgtaaatactacatatcatttcaactcacgcttctaaaaacacacaaaaaataagaagaaagagctatacaatgccattttatgccactaaaaagcaattgcctactagtactacctaccctagctattgcctcaccccaagaggggaaaacagagaaaatgataagactaagatcgataaactcagaccaagatgagctaactttaacctgttttaatggaactctgcctggcattcctccctgaaagtactacttacttagacaacatagccccaaagccattgcccttccttagctatcactgtttgcatggcctacattccctcctgagatcgatgaccaaaacgggccatcaccaacagcattcttgcaaagagggcaagttgcattgatctttaaccacttatccaaacactccttgtggaaaaaatgggaacacggcaactctctcagctcatcattgttcgcatacttagccaagcaaatgcagcacacctgcagaagtaacaaatatatgaaacacaatgaaattcatatcacttctgtggagaatcagtaaagtttaagaataaatcaaaattgcgttgcagtctttaatcccaacaacttcaaaattgtagaaggatctcagcacacccagttatacttaccgcatcttctccagaaatcacacgctctttctctgttcctgcagcaatgattcccccttctgaaatacccgagttactgtctctataatttccgcttctatttttcttcaacttgaacttgtatgttggtagagcatcaattgatgcagaagtggctcctcggttatgtgtcaaatcctctctaaacccaagggcggatattatacaaggaagacagcaacagattgttgcacagagaatgaaaggcatggcatacccaatacaactaaaggtaaggaatactatacataacctgcaaagtaaaatatcctgatgagctactaactcccacagctgtagaaattgaagattagattcaagaaatgccagagagaaatcaatacctatacatgttcggagcaacattggcagaagaatgtcctccaaagatccaaacattaccgaccacaaaccaaatcgcaaagaagcagtccaatcccattttgaagtattccacaagggccttgatcctgatgagaaacaagtgaatccacatgtaattttcacacgatgtcaacaataaatatatggaggtaggtgacactagtttagacttttaactggtcaagatggttttgatttaaacaagaagtttgcagacgttactgatggaaggggtggcaacatatctatgggtttaacattgagtttccaaatgaatatggaaaagctattaccataaccaatccttattctttaaaaaaatttgaaggtcctcaaaacacttgagataaatttaataacacataagctcaaacaaaatgggctgtaaatacagaccaaacacagcagcggcaacaatgccaaaaccagaagaattttaaacaccacttattaatcttataatatgtctctttagcctctctagacatgattgaaatcttaagagcttccactaagctaaaattaaaaattcaaaaattgccaacaaactcaacaagtgaccatgaagaatacttattcggaaggagtccagtgcctccagaaacatgcaaggaaaaagggcatagtctaatgcaattcaggatcgtgtctgcaaaattgtatcttttttaaaaaaaagaagttgcatagccaaattttaaaggatcttttaggcctcagttcattgctaaagaacaataatagtttagcaaataaacaacaatcttgtgtcagcaactgaactatttgccaatgactgcgcatgcaaccttcctaagtgtgaagattaagaaaacatacaatacaagtgatgagtcctccaaacttatacaactctgatgtgccaaagacaaatgaacacataccttgcactcgttatttctgagcttcggagagatgaagcaccacctcgacgatcttctccttcaggtgacccaccaactgaaagtgaaaatggcatagcagatacggtaatctgagaattttgacgcgattgagctgcatcttgctcagagggcggattgttatgtcggtaacgccaataaagaagaggtacgatagcaacacatccagatgcataacctacaatccatgcaaataatggtgttctcggatgctcatcccttgacaaacataaaacaactatagaagcaataatttggccaactgtaagagccagttcaattgagatccataatccagaattcaatggacttctacgacggtgagtatcccctctccgatttctagagtttgatccatttgaggaagaaattggagcaagagtggcgagaattcgtgcagcactggcagttatgtctccttgttgtgataaatttaattcattggaaggtccatgagatgaggtagatggggacccttcaccattcccagctacatcaataacatgctcgttggcgttgatattttccagctgctccattaacaaaagcaaagagtctgtttgaatttcaaggtcaagtctcggtgtggtaatgtccatccaaatcaaccagcacaatagagatccgttaagctaaatgacatgtgtgttgtactgatggacataaatcatgtttcaccacaagcatggagatgagaaccttaacaaaactccactctgttctgttcagaagcaaatttattaaacaaaataaataagttcagaatgaaatggtgcggactgataaaaagaacacatgacgaaactaatagaactaaattcgtactgacagaagaggaattgcaagttttttatgcacttcctaaaaacgacaaaaaaattaaataaataagtaactgttaaagatgatacccttaagacccaaaaatgagttttctctcctcttcttctggattttctggacaactaactaagcaacaaatatacgcatgcccagttttcttcgcacacagataaatataaagtaaagtgaagataaagaatttccaactgcttaaataatgattcagccctccaaataaatcatcaaaagccaaaaaattaaaaattaattaaacatcaagatacaagtatcaaagaacgctttattcaaaaaaaaaaaaaaaaaaaaagaagtatcaaagaatgctgaaaatatcacactaaactctaccaaagattcagc

SEQ ID NO: 110728 - DNA, 3072 bp, Cannabis sativa
  modified_base (3018)..(3046): a, c, t, g, unknown or other
ttaaatttatatttttttttactaatagggtgtatttataattttatggggtgcaaatagaagtccccaaggaaaatgaaggaaaaaacacaaatcaaaatcatgtcaaacgtccgtatatccgcgtaagaaacacgcgcgtgcagactaacttcgctggcaattttcgttttgtcttttcctttcgcgatttgccgcgctctttctctactccgacacgtcaccgagatcatcgacgtggcaaatttcctttgcctcatcagcaacacatatttaattctcaccgtctgattgcctcgattcctatagcatcctaatctaacggttgagaatcccgaaagtgatgctaccgctagggacccaccaagtactgggtccagattcttcttttctcccctttgtccccacgacgaacctaaccaactgtaccgtaccaatccctgggtcaagcccctcctcaaaatagtcaatatatatataaacgtatacacgtatacacacacacacaacatattgtatacactctttctctctcatctttctcactccgaaacattgttactctcagagaaatggtggtcatcgaggtaagcgacggggcccaagattctgcggtggcgactgagaagaggaaacgagtcgaagcagacatggattatgtcatagacgacgacattcttgcatggctttctggtgaggatgattactcgagtgagacgatgagtgatcagctgatggagcttctggacgcgacggtgacggaggagagctctccctcaaaggtcaggttcatcgagaatccgtacaagccgccggggacttttcaaacgacgccgtcatcttacgtaaccataaatgggaacgaggaaagctgcgggtcttcgttctccgaccgggactcgtcggtcatggtgagcgtttacacaagcggaggtttcattggttcgcaaatgacggggttcggtagcttggaagaagtggttgggttggatctggaatcgagcatgaagcggtggttggaagatggattggaggcggagatggagggtgcgtggggttccagtgatgaagggttgatgatcgactgtgatggtgatggcgatggcgatggtgattcactggcgaagttttggactgagatcttttcagagaaagaggtagcttaaacaaggacagtagtcacagtagacagtacccttttgggtttttttttttggaagaaaaaaaatggaagataatgggattttcttttttcttttttttggggggtttttgggaaaaaagaaaaaaatatatgttgttttgaactgtgaatagaaaaaggaatatacagtgagagtgaaagtgggaaatgaaattaggtgccttgtcttttttggtaatacaatttttattttactttttaaaatgtgctttcttttctataatcccgttatttatttattaatttttttgaacgaaagaaagaaacgcaaactaaacttttacttatcataaccgtaaatgcagtcttaagttaactgtgatattttggtttatctttacaaaactttgaacaaacatgggtaatgtgttctttttttcttcttttgttattaatattttcttgttaacaagtgaagaaagaattcatttttgttgtttattttaattattgtagataaatagattttgtgtggagttagtggtggaatcttctgaggacccattttaccacgtgttacatacaaaaatgaaaagtcatgtagttatgggggtggtgaggaagaaaccaatacgttgagagatggggccagccccagtgacgactgacttgtgccgagcgagtctcgactcccgagtctgttatgatttatatgctatctttttcgtatatttacaaatatcagctctaacatcgtgaaatataataataataataataataatttaagtgttatgtttataagtgaacttttcgtatacatataatattgggattttacactatctgtattggtttatttttatacgtttcaacattttgaagattttttatttaatttttttttttataatggtctactttaattatttaagatattttgtaaaatttttaaaaatttaaaataatttatgaggagtgttaattataatattttactcaacattcacgtttaaaattacgtgtcggaacttttttttttttaattttttcatagcggtattcgttatagttatagtgtcatttttgtaattttttgaaatttttttaaatagtttacagtaccgaaaatagagttcctaatattttaattcaccacgcgtgttcaaaaaacttcaagcatgttcaaaatgttacaatttgcaagcctaacaaacactactataaaaaaatgaagaaaatattttggcatatgttttcacgtacgtatgttgattaagaggttgtaataggttgacggtagcaatcttcatttataatatagaaacaatgtccaaagtccaaatagtctatttcacacacataaaataagaaaagtcacgtgtgtaacaaattatttaaatcctatttttggcgtgaagtttttttcgaattttttaaaattttgcatgatatcttaaataactacataaacacgaccatgaaaaaaaaggactaaattattatttgctaaatattaaaatagataaagatacataagtgcatcttttattttttttatagaaggtggattatagatttcttatattatttgtgtttatttataatttaataaaaaatataatttaagtctaattttaatgattttgattggaatagaaaacaaattaaaattaaaattttaaaattttgaattttatttttaagattataaattatttataattttgtaatatatttttaagtagaataataatgtttacttattatggaaaataattagacaattactctctaaaataccaaaacacataagcagatatactaaaacattctattagaggaatattaatttttcccccgaactttgacannnnnnnnnnnnnnnnnnnnnnnnnnnnntggccgttaaaaattcctcctgaact

SEQ ID NO: 110729 - DNA, 3352 bp, Cannabis sativa
tttttttttttgaatacaagaaagaaattcttctcaaactacaataattccattatcaatttatcttttacgttattataaatcacaaattagagcacgtgattttcacgtgcacgatttacctagtgttattcgaaataggatagtcgagactagagaggatatctttttgtagcggggggccttgcctttccattgcaaaactcaaataaaatactttgaatcgttgttgctcagattgaattgaggagaatcgtccgtaccgacccagccgccgctgtcttcaacctctcattcaaaaccttttctcaggttagcttatttctttttgctcctttctttcttacgtttcctgatctagggtttcttttaacttcttaacaaatgctcgcttggaatttttctgtttgctttacgatttgattttaattttgggttcttcatagctgtttaagatttgatttaggttttatctttcgattttttcttattagttcatgattaccagaagttgcttgtactgtatatatatatatatttttggggttggggggtgtttgagactgagtacgttgcgagcgagaactttccctagggaatctttactttgtcgaattaaagctcacagctttgtcctgatttgttattctttattttcaggtttgtagggagtgagtttatcaaataattagaatggccggtttgaaggaagttcttcctgtgccgaaagcaaccactattacccattatgatcactctaatgatccatggtttaagaagcgttatagctcatctgaagctgaaagggctgaagctgtaatcaaacccaatccagttcctccttacttaaatcgtgcaggctttgttcctcgtaaagtagaggattttggtgatgggggtgcgttcccggagattcacatagctcagtaccctcttggcatgggtagggataaatcagggaagcctagtgagtcgaaaattctgccacttacggttgacgcccatggaaacattgcttatgatgccattgtgaagcagaacgagaattcaaggaagattgtttactcacaacataaagatcttataccaaagatcttgaaaaatgaagtcgacactgctgacgatgaagatgaggagatggaaaaagtaattgaagaaacgacacaagaaacaaaggctgcccttgaaaagattgtgaatgtgagattaagtgcagcacagccgaaaaatgttcctaaacagtcatcagactctaaatttatcaagtataagccatcccagcaatctgcagcattcaattcaggtgcaaaggagagggttatcaggatggtagagatgccagtagacccacttgagcctcctaagttcaagcataagcgagttcccaaggcttctggctccccacctgtgccagttatgcattctccaccacgtcctgtgactgttaaagatcagcaggactggaagataccgccatgtatttcaaactggaagaatccgaaggggtatactattccccttgataaacgtcttgcagctgatgggagagggctgcaagatgttcaaattaatgataattttgcaaagctttctgaagcgctgtatgttgctgaacacaaggcaagagaagcagttgctatgagatcaaaagttcaaaaggagatgctcatgaaggaaaaggaaaggaaagagcaggaattgcgaatgttagctcaaaaagcacgttccgagagaactggtacagctgccccagcagctattcctatgccttccgagaaaagctcaatggatgcagctgacacacgaggggattatgatcgtccaagggagcgagagcgagaaagagaacgggaaagagagatggattatccaaaggagacaagagaggaaagggaagagcggttacagcgggagaaaattcgtgaagagcggcgcagagaaagggaaagagagagaagattggaagccaaagatgtagcaatgggcaagaaaagtaaaattactagagatagagatcgtgatatcagtgagaaggtcgctcttggcatggcttctacaggaactggaaggggagaggttatgtatgaccagaggttattcaatcaagacaaaggaatggaatctggttttgccacggatgaccagtacaatgtgtatgacaagggcttgtttacagcccagcctactctttcaaccctctacagacctaagaaagatattgatgctgagatgtatggaggtgctgatgagcaattggacaagatcatgaagactgaacgattcaaacccgacaaggcatttgctggtacttccgagagggcaggtccaagagataggccagttgagtttgagaaggatgctgaagaggctgatccttttggactagaccagttcttgacagaggtgaagaaagggaagaaagctatggacaaggttggttctggagggacaatgaaagcaactgcaggctctgcaatgcgagatggctacgagggtggaggttcaggcagaagtcgcattgggtttgagaggggtcgttaaagagccactccatactggttcagacatattatttgcagaattgaatatataacaactgttttcccctatgagaggggactgagtccaactgctcctccctatattgacttgctgattaagcctctggcaggccatgcttggtatgtggaaatacgaagttgaaaagaaatcattgttctgtggaggaggatatgtgctttatgttaactttcgtttgtcgagatgctttaattaaatgcagaagttgcgaagttaagctcccatgctaagttgtaactgtttcaaattgctttctacttgcttaactttgttagtacatctagaacagagaaccggtgtaaacaacttaaggttgatatttttaggtttatattttaccgtaatgactattttatctgtcaaatgccctggaatatggggggtgcttgttagaggtactgtttagttggttgacctatttgttcactgtactttgtgactcttaatagaattctcatatttcaaaaatgctgggttcaacttttttttttaatgaatcagaatatgtattggcaaaaacaaattgcttacatcctaatagcaactaagaagggcctaaaataatcatctatacatataatactgggttcaacttaatatcatatgttcaaaaaaaaaaaaaaaaaaaaaaaaaacttcatattatgttcttaggatccttataaattaggaataattacataatgcactattttttgtaaaatatttatatttttacattcaaagaatgtttttttacatttttacggttttttaaaaaataatacgaaaa

SEQ ID NO: 110730 - DNA, 8904 bp, Cannabis sativa
taggtgggccctaggcacaggcctaacccgcctattcccagggtcgggcctgcctagtgctcgactcatggagtgacacttcaacttgtcatcaaacactaaacttcaagcttgattataagcataaatgggccagatttatttcttcagaacttttttgtgctgccctaacacgaaaaaggtgttaaaattaaaggaaaagggtagttatttttacttgcacaaatactccatttttttatcactttctacatatgaaaaacgaaaaaaaaaaaaacatatttttattttgtatgtcttgcaacttagaaccgaccgtgactaacatacgcataaattataattttttggtatttttgaaaattttctagttcatggtcaaaatatttggataattagaatttcaaatcttttcaactacgtaacacaaattatgacacaatttcattcagctaaaaaataataataatagatttttttttattattattatatatataattctcaaatagcatatcaatataaagttgaaataatgtcttgtttaaaaacaataattgggttcttcaaaccgttaccaaccaggccaggcctatatatgttaaacttatcaatttggacacaaagttgaaaacagaaaaacgacacaacagcctaacaaccactttgaaaattatcaaaaatattgaaaaacgacaacaacaaaactcgacattcaacatcacggacggactgctttaatttcaccaaagaaaacgacaaaaacatgtagaaacgacaatgacaaaagttgtggtgtgagcataaacgacaacatggtagtgcaatcccttttggtagctttgcatttttattgggctcaatcaatgatccttccaaaaggattatgaagaagatcaataccacaattgcttcattcacatgtttatttatatgattataaatttaatttcataaatatataattattcatataattatactgacgtcattgctatgaaaattaattgtgattatgtactttaaacttatttagtctcgaaatttatcagtgcaccaaatttacagtgacgtgataatcaacgatgtgatttacttatagtatggcaagtgatatgtctttttcagaatattggtaaagtagacttgtatcaaatatatagatttacattggactagaccgatattaacagtagaaaagatattataaacttatcattatacctattctaaataccacttagtttatcatagatcaatttaatctgaaacctaagaagattatttgtgttataataattaaattaactcttcaaattttaatttgttaggattttaaagactaattatgcatttggagtcatttggaagggttttaatatatttggtgaaaaagtgaaagttgaatagctcggtttgataaatttaaattgaatttttacaactttaaaagaagaattagatttggtgttgaacataaaatttttagatctcgttctctgctttccaaaacaactatggttttgaaggtcttgaaaactggtcgaatatgtgcatttactgcgaagataggtcgactcgtggtatagtacgtgttttgtatttttttgttatttactcacctgtctatttttaatgaagcatgctagaaaagtaacattgcaattattgtgatatgattatatgtgtggaatatacttattaacattgatatctggttgagttttaagtgattagaaattatggattgcaagtgcattagattatgcaaccacaacgatcgtgccgattgaactgcaaacttgggctcgtgatgggtggcgaggaagagaaccctccattgcctcaaaactgggaacaagtgtttgttggcatgcaaaatataattaggcaggggagcatattcgggacctaagaaagcaacatgcttgtcttgcccctgttttggcactttttttggcacctcaggtagcacaacaaaatatgctaatatgctatcttttttggcaatgtggagttgcacaacttatctgatattttttcttatgaatcacgatactgactatcacaataattttagagtgactaatatgctaggtaaactaattgatacgtgtatgaatatatacataaatagaaaataacaattgttgatgaaatttgatctcattcttatatgttatagtctctaccctattcacttcattggttgatgttgttctcctcagaaaggaaaaatatatttgtattaagatgactcaattacaatcattagatctttcaatgaaactaaaaagcttcttattgaataattttctatgttgatttctcaagtatttggttgtactttatacatataatttaaaggctaattaaaatttttatcttctgaactttgacatgtattaaattatgcttcttaaatttttcttgacgttaaaaaattttcctaaactattgagattgttggatttaaatatttttgtcttatttcattcaattttactaatttagtgattatcaatatactaaattatattttacagactttgatatctatcaaattatgcctttcaaattctaatatgtaccaaatcatatcccttaaactttaatttatgttagattttttttactaaaatttgacaaaagtcctaaatccaacaatctgaataatttagggaaaaattttaacgaccttaaacattcaaaagacatgatttggtacatgtcaaagttcgggagtcgaaaattctaattagtctaatttaattgacttttctaataattttgagtgatcaggttaatttgaatgaactaacatgtctacaaaaataaaaataaaaataaaataagatttgaagtccattacttggtgaatatttaaccttttgcaaaacttaaaatctcacaccattaaccattcttttttaactaacaatgtaggagctcgtgcagaacacgtgctctactactagattcataagatacactatcaaataaatataaatatttatcacaaattaaatacactacaatttgataagaaacgacaaacaacttgaaaaacgacaataatattttagtacttgccagttgatgggtttgctttgcttttgaacttcatcataacatgcaaacccattaaaccagcatgcttaatattctaatatttataactaacacataattttaaattaattaattgaagaattaagtagtcaaaactttatttaatgacaagacaatatagctctcttaaatattatttttttgtaactaattatagacaacaaatccagtaatttcagtttttggctttgttgtctggtcatggtctccattatatattacacaattaactaattaattacattatttattcagtattatttggatattttgtatcaaataatacactttttatttttttgctttatgaagacacttttttttattttttatttttttacgtcgtttctttttcgcacgctagctttaatttaaacaaaattctcataattaattaatttaagtggcatatctcctttttattactatggatagctaggtatgtaatagccattatgggcgcctaaagccataaaaaaatatacattataatatatacccataattaaatagcctaatttatccatagttacatttattttgtatatattgagctaataaaaaaaaaatcaaattccatcatagtcttaaaggttatacactacttcatattataatgttataagtgtataaatttgtgtgtaccaatatttttttgtgctttctaaaattagtcatgtcgtattgtgctctaaaaaatatagatcgtatcgtacctatggacaaagccacattgagcctaaatagggccgtcacctcacctgaaatttgactcaattctaagtaatttgaaacttgtacctaaataaattgttttgggcatatatacaaatactagtctagttaaacattattaatagtattatttggtgtagtgataaaaatatttttaaaatttaaggaggtcacaagttttgtatacctttaggtcctttatttttttctatgattattgggatttaaaccgagcaattaatgtaagatatgattatattaaatttattttaacataattatattattttatattttattatactcaattctataatctttattaaaatgttgaagtccacctaatatgaaaatgagcattgttataagctccatgatatttagcattactatgaagtagtgctctataaatagttaacaattttttataatcattataattaagagtaaaataagtggaattcgatattgaattacactaatagtggtataacacctcataatggtgctaggcaccacaagtgccttttatcatttcactataaaaatatataatcaattaatcaccccacctgaattttatttctagcttctcccctgaccatgtcgtgccaatatttttaaagaataggcctgagatagcccgtagaccgatattttcgtgttgtacttggattcatgtcatgctttgctcgcgctaacccatttttttatcaggctaacctgttttcataatcaggctcaaatttgtactttattttttcttaattactaagctataggtatatttgaacaatatttcatacagtaatataaaaaatttattaaaatttaaatatttccttataaataataaaaattttatatccaactctataaataaattaatatatagctttagttttatattttttaatagaattaattataatattgagtgatattttatatattgagtgaaatatttaagttttattattattttaaattacttataattgacacatatatatatatattattgttattattattaaattataagattttttaatatttttttttgtgctttccgagattgtcgtgtattgtgctttttgggcttatcgcgtactgtgactttcaggctagtcgtatgtcgtgcctttcgaactagtctatctgtacttacatgtcgtgtcactatcatgcttaatcatatattttttttgtcgtgtcgtgtcaatttttagtatcgtattatgtcgtgtccaaatttatatttttttcgtatctgatctggcttatgccgatttcgtatcgtgtcaaaaattttaatctgtatttacagtagtacttgacgccacaaactattgatgaaggcttatttttagggattggaatttttgaggtacatttgttgataagaaattgtcaaaggccaaagaggtgagattaagatatgcaccacatgatctcttttagtacttacaatagatagagactataatgatgcatagtgaatttgatatttcaattgagtttgcaaaagtttacaatttcatagacactaaataaaattgttatactataattttgctttgacaatcttaagcatgtatgttattgttataatattttctcactttatttagtatttattaatattttaaattcctataaaattttattaatataactaaattgtcatcagttataggaaattaagtaataaaattttaattttaatttacctaattaatagtttcctactcttattttgctaaaagaaatgttgttttaaacctctggcgccttttgtctgttttaggtttaatcttttccactttttaaacttcatttatcaactctttgttttaaagtattcagcaaaaagaatcttaaaaaaaaaaaaacttattgcttgtaaataaaatattacccttgttataaacatatatcagagaatgtagattaagaaagtgaaaaaagctagcatattttatctcatatattttagggagaaaaaaaaaaaagagttttgcattatatgtgttgctatattatcaatattgcatgtatagctaaaaataccatttgtttatttattttttacaaaaagaggtaccaacttaattattttgtttgttgaagtctttcccaaaacaaaactataaattgaatgcatggcctaccttactaaaaaatattctcattcatgtgacacattgtgatcaaatacttatgctcataattgaaatggccccatatgaagccgccctctctatatcatcttccactctacaatttccttttagttttaatttctcaaaataaatgaataaaaactttcttttttgatattccaatatattactatataattcaaattatatagttagtattttttataataattattatattaaatatgtcggactcataatttaacttgtagtagatgccctttagcattacaaaagaaaattcttattagtttttctttaattaattatttatttatttgacaaaagttttttctttattactttttttatcttttctttgtgtatttgtttatgaatgagatatacatatttagatagagtttcctaagaaaaacaaaaactcatggagagagtaataattatttaaatagacatttgataaactttatataaagggaaaatagaaagaagacaagatctccataagatgtggtatagcataagggtagtctttctataaagtatatataaagctaatttatatatgtaatatttaaatatttaataataataataataagcaaagtagtattatttttataattattgaagtaaatggtcggtccagctagctactaacttgcgtgacaaactaccatatacttcgatgatgattatataaatatatttatattggtgtttggcatgaaaattattatagtttaaaatatatacgtaaaaaatatatatataaattatttataaatatttgacattattttttcattttttgcacagctggctgttttttttgttcgtaaatatatacccaattgtgtcttatgtatactcctcatgagtatggatatatcgaaattatttttcgaaaattaatcattgtatatctaataaataatctgtaattataagctagaaagaaagaacaactggggcggctatttatataaatggaacactttcattactatttataatatcttgatataataatttcagtagggttgacattaattattaaattgtaaataaatattaattaattcatgacataattgactgcatggatgtaaattagtgtaaatagcattattatgcatgtcaacgtcattagtatcaactaataatttatgttcgtggaaaataaaactggattactattattattatttagtcattaaattcaaaattaatattataacattgcgtggagacatagtttcaattttttcttttcatatttgattttttttcttatatattttatatataactattttggtgtctttatcaaaaatatattttttttttggtgcattcgaatcactcgtcaaagtaatattacaatattatagatcaaatttatttactcggagcaatgttttgtctcatttaaaaaaaatgtagtatatttaaaataaaaaaaatgtgtacttttaaaatggattttttctatgcccggcacaattaatgtattatttgacaaatagttagtcattacataaaaaaataataaattttagtacttaatatttaaaatgaaaagtttttacactcaatttttattaggatcttaattatctttaattatataattatagtgtaattatgtagttaaataaatgtccaaactttcagttacacccatttccaattccattttgattttccaaatgcccccttaatatcggtaatacccttataattgaaagaagaaaaataacaccaaagttaaagtggtcctttcaaaaaaaaaaaaaaaaaacataagtggcaaaaatttgagtttgaatttcgtaataaataatatatatagtttagtatctgtgtctgcatttaattattttagcaataaataattaaatatattccaactctctctctctctctctctcttattcatatatatttatacatatagtgcatggaaattcgtgttaaaatttcataattttgtagtaattaagtagaagaactactactataaatacatacaataaattaaaattatcacttgggaaaacttcacagagatcagatctcatcactcactctcacttcatcatctgaaatcatcttcacccccgagcaagcaatatgatcagatcactactaaccaggttatttaattacttaattactagctattattttcttctatatataatgattgagatctattttattctctcttatataataataatataaatatatagcttaaattgttgaatttgatgaagatttctagctttatataactaagggtttttttttcatcatatttttcagagagttgaagttagtttccaagggtttgctttataaggacacaagattaatttcaacgacagtctcgcccggaaggtaattaatttaatataataacttaattatatatatatcatatatataataaaagactggtttggttcttccttgtatgactggaaaacatcatacattattttcaatccctttgaaaagttggttggtataattataattatatatatgtatatatataggctgaaacctatataaggttttgatctccaactcaattgaaaattttctgtttttgattctttctttccaactctctcaaaaaaaaaaaaaacttaattatgaattttgagctctattattatatatatttatatttttttttttgaatatatttatatatattaattgtgttatttttgtcctatatatttattgagtctcagattcaaaagttatgaagtattaatatataaatgagtcaacttattcttaccatcgtttttgatcataatattattcgatt

SEQ ID NO: 110731 - DNA, 8619 bp, Cannabis sativa
gtagtgttaaagttgacagatattaaaagttggcaatggcacctcacagaaaaaggatcgtcacttgcaagaattttaacggcaatttttactttgaatcttagacctccgtcgatattatgcttggatttctgttgatgattactgttaccttgagatgcccattcatggttggtaatttttccgttgtttgtatgttctaaactatctcttatttggtgaacagaagaaagaaactagcatgccataccttctgaacaagttcagccactttatctggagtagcgaaagcctgatcctttagtggtttggccatagatgactctttttggttctgactgcctgatgacaaagcaactttaacagctgtaacctacaaaacatatggaaaatattttagacccaattgaaactattcaattgcaggtgccggtagctacaaaatttggaaaacaaacaatcctgtggcaaaagaataatttcagatatatatactatcagcatttgttttgaatgatgtcgtctttgatgataaatactgtcaaataagaaaggaagaaaagagattccattattctattctcacacgtcttgcttttaaaacctaggtggtataagcagagttctaaaaacatgtatgttctattcaatttgtatattttttttaaattgcaaataattggtctttcattctgctggttgtgaaaattttgtacccaagttaagaaagccatatgatgaaagagaaggacaaaccttggtgacaaatgaaagcatagggtctacaactagcttagtgacagacattatgaattcctcacaagtggccttaagacttttctccagttcctgcaagaaaaagagttactgaaaacatgttgcataaaaagtgtctactggaactcttccaacctctcccaaatatcctatcaatcacttatcagagaaaagaaagcacatcaattaagtgctgcaaagaatagtagaagaaactttaaactgaagaaagactacagcccacgatcatcttcataaagttctcatttattgagcatagcaaaaaatattacggagcttgccgaactaataactaaaagaagagaataacaaaaagaagagttcaagagaactttaaggaaaaaaaagagtatattctagctgcaagtgaatcacaaaccttcttagcatctatttgactctccaaaactctgggtgataaggtcctcgccagggaagaagatctagaccagtcaaatagagaagcttgacctctaagtagccgtcttaaatgatcctggaaatatagttcaacaacaattgagaccttccttccattataaaaaaattaaactataattatcagcaaaaggtttagctctggagcaactaaccagcaaatgagagaaatcaagttctttatgtgtcactgaaaactcaatatcgaaaggtgcaatctggaaaaggaaaaaaatatttgaagaatgagcttaggtaattagtttagttgaacatccaccacaaacagggtaaacatggatcacctgctccctcaagataagaagatgctttatgagaaacaattggccatccatcggggaagatctctttgttatgagcttgcttgctttctacacaagtaaagaatggttaaaaacagacttaaaaatgcaagtaacatacagaatttgtcacaacgtagaaatttgatcataaaggttactcacttggatggattctgagcaaaattctacagcttcctgatagaaataaaccaaaaattgttcaaaaaaagtcaataataagctcatactgagtttatgaagtgaatatgctacatacctgcgctaaaccagtgaaaactgctggttctaaacagcgatataactttgaaagacaagatagtgttttctctagtgggggataccaagacttgaatacatcttggttttcatcagcctgcagttcaataagaaatgaaagaaattcgtgagatgtacagtaacaattataagtagcatttgagtctagcgttgttaactcaaccgagattattacagagatacaatacaaagttgaacatgtgacagaaatttgtcctttggaagtgagcgtgctaaaagaagttacaagcaaatatacctctggcatttaatttgcagtcacatcaatatttcattaaggaacaagtctcgcatgccataccatgttccatctcagtatatattatttggcaaatataggtatagaaaattgaaaatgctgagccacatcctaaaagttctgcaatcttctaaagtccttgacaagactaagttgacccctaaatacaacatcctactttcatgtgaaacattcagatccatcgaccacagaatgaaagttataccattaattaattgcatataacacatttccatttaggaatttagcttaagcagtaaacactgccttgaatgaaattataaataaatattcaaatgaaacataggaaatattttacagacaagaacataaaggaagattgagaggccttacagaagctgtttcaggttttttctcagcagactgctccagcttagcagggtaatccaagtcttcgtttaaaggcagataattagctatctggaaaataacataaaactaatcaaatttcttccacaatatgttacacattcaacttgattgagcagttatgtatctaatgaattttattactgcaatgtagaactcgaagagaaaaaaacagaaacttacattaattatgaagtaatagtaatacagcaagtcaaaaacaaataattccgacaataatttgcataagaaagctcctatctctagaaagatcagaaaacaaaagcccttttatctctttatactaaacaaccagatagctactacttaatatctaattcaatcccacaaattatctaccttatccttttttctttcaaagctaggattcctggctacccctacaatatttggaggccgggaaattatggcaatttctatataagtgctcaagaggaactcaacttcatactttgtgagagagcaaatcacatgcctcaccatttgtactacccttttaacatccttaaaatgacaccacaaattcctgatttttctaattttgaatgtgccatattaatggttttccaaaaagctaatatttcaaatgaatattgatatgggacaccacttgatgcgcattttctaattgaataaatttaatattgtgtcctacatattttattaagataaacttaatccattaaatgtaaccatttacattttatttagtcatatgtaagacccaatattatatttaattaattagaaaatgccgcaatcaagtggtgttggtcaccattatggtgcccacatagcaatacacctttcaaatgcttcttagaatttgcaaactcccttccgataaaaacattcaagtgaacattaaaatataaaaaccccaatgaaaatacaaaaagttattggaacataaagttaagttagtaatagtattataaatttattaaactaaaaatcacctcatcacgaatatgtgttcgggctcggaaagtcagcctttcatgaacatctgcaagaatcctctgtaatgtaggacgtagtccagacaaagattcactccgtctgctttgttgctcccccaagacttcgactttaagaatatcaacaagctcacaaagaaaatcaatatttgtttcgtgaattagttttggccgcaatgtatcatataagtatgtagacctgcaatatacaacatcaattaataaagagctgtatatagttacactgataattgtaggaacttgctagtgtcttgttttagtgagttttaattttctttgcataccgagtcaaggcattttcgtgaaaaatgataactataggacctcatgttttgctagtgtcatgtttcatataattttgactttcaggtaaaaattgcacatatttttacaatgtcaaatgtaattcttaaataattagaacttagagagaactatttttgatcatttttgttcattatcttcccttgggagttttcatttactgatttaaaagaaacccttctctttgatacagtttctccaaacacattgaaaataaaattccaacctctagttaccagtaactaatatgagaaattgcctcaacaacattatcaagaaactcaatacttacaaaggatctatcaatggagccaaacttgacacgtcctctgaagaggttgggaaaaaatgatcaaagagttgctgctcaagctgacaaacctacaaaagtaacgaagtcaaatggatgagaaactaaaaattgatctagtaattgtatattttttttactagatctaaatcgcacataaaaaaggaaagataaaataaaaggacacagaaagagtataaattaataaataacaaccaaaggacccatacagtctgcatcactacaagtctaacccttctaaataaggacccaattactaagtaaatggaatcacggattttttaagtataaatctaatatcaaagtaaatcatacatcgtcaatgtcattccttttgaaataaacattttttgtcctatgccttcctagtaggtaaaggaattaacatgtttacaactaagacaaaagatataatatcatacctgcattaaatatgcgcatccagatctagtcaaagatggcaaggactccttctttgcaaactcagatattcgttggtaaactatgcctttaatctgttaaataaaacaaatacaagttagcaacagtaaactaagagaatcaatgaacctttgtcatatactaaaaaaccaatgatgagctcaccaaggaaagcctctgctcacaataaagtttgtgacattctgcaagtagctgaatatactcttttcttgatgatctactttcaatttccttcagcactggcttaagctgcaaaacttcgtatgttagacatggcaaaacaaaatatctcaaattgagaaatccactccacccaatgtatcccacaagaaaggattttgatttgcttcctatagcacctacttattcaatgacatcattcggccaaaaatgaaacagtacctcacttgctgctgccttgaaacggacatatataacagatgcctcaacaccctctgcaagggatgtcttgctgctactattgctccggattgctgactgaacctgatgaagagacacaataccaatatagtaccagaacattttcttttttaggtaacaaatagagcacttgatttaagaccaaaaggaaacagagaaatcaacccaacaaaacagtacaaaacaatggaggccaataattcaacccctgcattattttacctgtgaagacgcacttttgagtacagacagtacatgagaacgaatcatacccaacgctcgagactgtcataacaaaaaaatattactcaattattgaaaatggaaaccaatttcagtggtggaacaaaaagcaaaaatataatgttatctgatcaataatctgcataaatttgtttctacctgcagttgtcgaaatttgagtaagtaaacgccagattcagcatactgtggattgttttctacatacctaaaataaagtagataatgtataaggtcataaagttgattaagaaaataagtgtctcgctctcaatataatatgctagtagttccctaattaacaaatagaataatgatactacacaagtaataaatgatgaatgcaactaaagcagcaagaaaaaaaaggtgatgtaaatagcatccacttacgctatgcagtcatcaaggcgtttgagcagagggaggaaattctcattaacaacattcatatttggagaataaaaattggtagaaatctgcaccaggatagacaacaacaattaaattatttcgtaataataagaactgaatagttaagtttaatacactggaagttttgaatctaacaatttgcagttcagtatatatttcaataatcagctccccccattaaacttgacagtacactaggactaatctaaaaaattcaacttttgaactaaaaaatacaagcaaataaaaatgtcagataattcaaatgcattattaatttatattgatatttcattgcaaagaaaaaattacaagcagtatcattaatcaagcctacaaacctgttaaaatgtgcttaacttataaagtttttaaaaatggtgccccaacctctctttttcccaacccaacaaccaaaaaacaatatggggagaaaaaaaatgctagagatgaacctatatgaaagaaatattatttgaacaaaagttcaaactctaggtaagatagcattcgaaccttacattctccaattcatcaaaatagttgagcttactgcgaagtgcttctgaaaattcaatcagcctttgcttctcaattacctgaaaagaaaggagagacgtgagatatgatgaaatgtcaaaatcaaaagcagcaaccaacacaataggatagaaaaaaaaaaaaaaaaaactccatgctgcatccgggatcaaatattctcatcttactagagaaaaaactaaaatggcaactaacaaatttccttgagacctaagagttgcatacccatttcttaaaatgctaaaaaaaaatttcttttaataataataataatagacaacaaagatccttcatacagaaaatatatatgtatatatgattcaggtattcactttaaaggccaaggtaagtaaagataagggataaatgaaagaaaccataccaatcgatcgcatgcatcatgaagagtttttgtctttgttgctactgcttgatgttgcagctgtaactcattaaataaatctaaagtgtcatccacctgcacataagggaactcagcgttttaaacaaaaatgcaaatgtctttaatggatcatcagcattgtattcatgtacaataacatatgatcacctgatgaagtatgccgtcacatgtctgtatgcgctctgttaatgtgttcacatactgccgatacttctcctctgtctaaagaaataaaatgaggcacactgattaaatactgataattaagcttataaagaaagagaaaaataaacaaaaaaaaaagatccagtgcactctgagtaagatatacatttaaaatatactaaatacaccatactgatgaaaagtacaagcttccatttcaaataataataatacaaactaacctcagacttcatggctgtttcaagatccgtgaaccacttataaaactgcagcaaaacaaaaattattaaaatcaaaacctaacttcagaaaaaagagttgtagaaacacaaatagcttacccaagtccattttctctaaactataatatgacggacaaattcaaagtgtccaaacagtactattaattaaggaaaatatgctccattgataaagtagcatggagtatgaccgaattccaatacattaataatatatatccaggcagaaaatgcccaagtacttcaccaatcccaaaatttaagttctatgtattctctccgacagtgctaaaccatatccaaatgccaaaaaaaaaaaatcttacatggcctaaaggttatcatactaacataccattatgcatagcaatgcaaaatactctatccttgacatagagtgatgaaagatcggcaattcataagaaaatggcgataaaattaacaaactcaaagactaacctgatttgtattgacgagaacagcttctatagctccagagtgctcaaatcccaacgagttttccttcgtggagacggacaagccattatcttttccagagattcgatcttgagcctacaatttcccagaagccctagttactctacatatcaaatgaattaacataaaagaatttaaaaagtaactaccatctcaccaaattgggaggaaacgggcgatcagcgacggcatgagaaagagtaacaatggctgcttgctgctgctctgtcaaaggagcattctgccaaacaaataaataaactccatgaaatcaccaaaatacaaaatgccgcgtgagcagatctaatgttatctgatccaagcctctcaattacaattaccagaacacaaaattcaagacgaaatctaaagctactgcaatgaaaaattcagctctgagatctgcttattactagatctgaaataaaaattctccaccatgattgaagtaaacccggtacagcaaatataattaaagaaatagagaaataggattgaaaaatgagacctgttcccagtgagaagcgaaattgtagcccttggaaatggctcctccagatttagagtgagcggtggaagaaggacttgatttggtcgccatagttggttcagtttcacagcattctcattcctcagtcagtcttctcctctgctctttctttctttctttctatgttatctctctcgcctcgcctagttaaagacgaaatggccttcaacagtaggaaagaaaaaacagcaatgaaacggtgcgtatcaaggttttagaggagtttttatttattatttatttattttttttgcagcaaacatgttcatttcatttctttctctttttttttt

SEQ ID NO: 110732 - DNA, 5327 bp, Cannabis sativa
aattttttattattgaatcttttgttcccatcacaaaatattggttgttttgtttagtgtcgtcacatgttacccttttcagaacccagtcgaaaagtgacaaaggcattttcttttttagcttttataaaggttttgtttttcacttgcattaattaatgaagaaaaagaaaataggtttttgagtttttgacagtatttttagtaaacaaagccaaatgatttattattattattaccattacctctctcttttcttttttttttctttctctaaaagggcttatggtgaaaaaatcttctgggtcccttctctttaatgccatctggttgttaatttgcaaacccacttcctgtttattcatgggttttcttgaagatgaaagctgagttctttgggacaatgtgcaactggtatggtgctacaacttcattgtaatctctctatctatttcagattgttgcaagcttttgtctttatatactatcaagtatctttttactaagatagtaagttagtattgggtttctcattgttcttaaaaatgggatcttggtaaagaaagtttgcatctttaatgcttttagatctctggagttggttaagtttctgtgctgtttaatttatttcttacatttattgttctgtgtcagttcttcagtctgaagctgtacttcatcagcaaaaatagttctttggggaggagagaagaacagttccttgaagctctgcaactcaaagactgagttttcttcgtttagggaaagtggtggctttttgttaactcatagtggagttcattagttgtttatatgtgtttcagaaatcattgtgttgctttctaaggtttctatcacctttctattctgcacaaaatgtcatcattatgtctgttgttttactgtatataagtgtaggagtgagttgtgttttgtattagctcgtagatttggagcacgctttgctagattatgttttttgttaagtggtattggacttgagaattagaagcttgaaagtcccactttttctcctagctgagctatctttttctcttctttctttttttcttcaactgggtgaatttgtttgtaggagtagaatgaagtttggtgggctttttgtattattcctactttttgtatctgccatgggacaacttccttcccaggacattttggctttacttgaattcagaaagggtatcaagcgtgatcccactggttatgtcctaaattcttggaatgatgagtctatagactttaatggctgtccttcctcttggaatggaattgtctgcaatggtgggaatgttgctggtgttgttcttgacaacttaagtctttctgctgaggcagatttgagtgtatttgcaaatcttacaaagcttgtcaagctttccatggccaacaactcaatcagtggcaaaattccagacaatatagctgactttcgcagcctccaatatcttgatatctccaataatctattctcttctcccttaccagtggggattggtagattacagagcttacaaaacctttcattagctgggaacaacttttcgggttctatccctgaatcaatttcggggctttcctccctccagtccttggacatggctagaaactccttttcagggtcactaccaacatcactgacaaagttagacaagctggtgtttctaaatatgtctttgaacagctttgacaagaaaattccaaaagggcttgagctgatttcgggtcttgatgtaattgacttgcacgggaatatgctggagggtcatcttgatgttgagttttttctcttcacaactgccactcatgtagattttagcagcaatatgctaactagttcacagcaagagaagtttatatcaaggatttctgacactatcaaattcctgaatcttagccataaccaacttactggatcactggtaagtggcggtgagctccaaatattcgaaaacttgaaggtgttggatttaagctacaatcagctttctggtgaactccctggatttagttttgtctatgatctccaagtcctcaagctgagtaacaacaggttttctggagagattcccaacaacctattaaaaggagattctctggtcttaactgaactagatttgagtggcaacaatctctcaggtaattcaactaccaacaactataggtcctcttgttgtaacaattagtttgttatgtgatctgtttatctgaccttcattacacaataatttatgtttttttttgtatgatctactaaacatcttacatttactcaatgttcaggaccaattagcatgatttcgtccacgaatttgcgtgtcctcaacctttcctccaatgtgcttattggcgacttaccaatgctgactggaagctgttctgttcttgatctttcacacaaccagtttgaaggaaatctaaccaggatggcgaaatggggaaacattgaattccttgatttgagtcggaatcgtttgacaggaatcattcctgaggtaaccccacaatttttgcgcttaaattatctcaacctctccgggaattcactcagtagctctcttccgcgtgtaataactcggtatccaaagcttagagttgttgatctcagttccaaccgatttgatggatcagttaatgacttgttaacaatgtcaaccttgcaagaagctcatcttgatcataatctattttcgggttctgttaaattgtcacctgtgtctcccagtaactctaatcttcaaattcttgatctttctcataaccagttcagtggctattttcctgatcaattgggttcaactccaattcaagtactcaatattgcaggaaacaacttttctggttcactacctacttcgattactgacttgagctcactaagctcattagacatatcacagaatcattttacaggccctctgccaaataacttccctgattcccttcaaggctttaatgcttcctacaatgatcttactggtgttgtgccagagaacctaagaaggtttccaagatcatctttctttcctggaaacaatcgtttgagtcttccaagtggttctcctgattcaagcaattcaccagctgaaaacttgaagaaaaagtcactcaagacagtggtcaaagtaataataatagcatcttgtattgttgctttgctcattattcttctgctggcaatcttctttcattacattcgtgttgcaagaagaataccccccgagcacaccatcaaaaaggatgccagtaggcatgctcaaccgaacccctctagaattcgtggaacagacactgttggtgctttgactgtttcagctgaggatcttgtagcatcgaaaaaaggatcatcgtctgaaattatcagctctgatgagaaggctgttgcttttgctggcttttcttctcctttgaaggacagtcatttgtcttggtcaccagagtctggagatttgcttgccacagaaagccttgcaaaattggatgtgaggtcgccagatagattggtcggcgagctttattttcttgatgatactgtcacattgtcgcctgaagaattgtctagggcccctgctgaagtgttggggagaagcagccacgggacgtcatacagggcaactttggacaatgggctgttcttgacagtgaaatggttgagagaaggtgtggcaaaacagaaaaaagagtttgccaaggaagctaaaaaatttgcaaatatcaggcatcctaatgtggttggtctaaaagggtactactgggggccaacacagcatgagaagcttattctttcagattacatctcacctggaagtcttgcaagctatctatatggtaactcatttatctttcaattgtttctacatataaaaccttttattttattgtccaaaatgaaactgtgaagagtacttgcaagagagaaagatcccattttcaatatagtttgcctctattttattgctatgtatggtgtgttaggaactatagaaaaccatgttatagattacctttcacataatatcttttgtgtttttgattgttaaagtgcttaactttatctgtttgcctttaatatcttaattgtcttgtctaatgaactttaagtacatttctttagatcgtccgggaaggaaaggccccccattaacatgggcacaaaggctcaaaattgcagttgatgtttcccgcggtctaaactatcttcattttgaccgagctgttccacacggtaacctcaaggcaacaaacatactcctagatggtcctgatctcaatgctcgtgtagccgactactgcctccaccgtctgatgactcaagctggcactatggaacaaattcttgatgctggtgtcttaggctatcgtgcaccagagttagctactatgaagaagccattgccttccttcaagtccgatgtgtatgcctttggtgttataatgttggaactcttaactggaaggtctgctggtgatgtggtttcgggtgaggaaggaggaggtgttgatttgacagattgggtacgcgtgagagtatctgaaggccgtggttctgagtgttttgatgctgttttgacacccgaaatggggaatccatcagtagagaagggaatgaaggaagtgcttggaataggtttgagatgtataagatcagtttcagaaaggcctggtatcaaaactatatatgaagatctttcatcaatataaggttgttagtttgaatctaacttattgatttttcagggggacttaatatctcattggcttccctattttttgtgtcctttttggtataatgtaatgatgagttaagtttgttaatcttttgttgtaaaaatggatcatatttgaaaaggatgcaaatgtttatttcaactgttactgtcattatgattttttttttcacttccatgatgattaatgatagttggtcatttgatattgtttgttacctctttgaaaatggctttgggaaaaaagatgttaaatatgagtttggtgtccattgcatctgcattgaagacttgtaatgattgatgggtttcttgagttgagttaatgaacttttgttgaccactcaattttaataaataagaacacatgcgtggatgggagaatttaatatttggtaagaacatgactattaagcaccagtgatactattggaataaaaagaaatggtacatctaattactattggaatggttagtaatttttttaataagagtaatggtacgcacatacatactttacacaaaaatttaacacgggataaataattttgggaaattctataatataccttcttaaaa

SEQ ID NO: 110733 - DNA, 4253 bp, Cannabis sativa
tttctttagtctgattttactagtaaatatataaatgtgtaagagtgtatacataagcagtcctcattcacagtttactgagattaataaatgatactttaaatttgcttacggttaggagtttggattgtttgaccacgaaaatttgcccttaaaaagtaaaatgctagtgaaatgataactggaagggtttggctgccaaaactctaaattgtaaagcataaaaaaactctaaattgtaaggcataaagaaaaacaaagtgtgacttctttttgttccttatctttctctattgttcacttactgatcattttatcttgcagccagaccatggattcatcatcatcagcactgctatacagccatctcaaggttttcttatcttccgcttactgttctaagcttcacactgcttgctttagtggcttcccagtgtgatcactctcttgtctatgttgattttcttaggctgcagacccctttttcttaatggctggtccaaatgtaattgaatctgaagatcatattatgcgaatggctgctcacataaaggcggtcgcctcaaagtatgccctgccctcatacatatgtaattatattataaaaatataggtgttgtaggcataatacattttgaaaagggcattcacgcaattttcattttttacttttgctgctgaaaaattgtagatattgatcgaacatattattgtatgtattcattgtagagtagatctaggttagttgctccactttcgaccattctattttgtacgaactttactgaagaaggtcaatttttttggatgttttccacataattgcagtggtaagaatgctaagtaagctttatcgtgattgggggtagtggctttttggtgggtcttatgtcttgaaatcaaaggaagaagaggtttttttttttgaaggggttgaagaaaatgcagattttttatgggaatgtgttggatactgggtggcaatctgactatttgagagtaaacaatttacaaatgttcctttctttctctgacacatatagagactggcattttttcatgtaatctttgttttgaaacaaaacaacagtacttgaagtagagggaacataatacaaggagtagattggagtatagaaatcttactacccgaactcacaaaaacaggagattagaaacaaagtttttcctggaaaggaaagttgccactctgtattcagagaaggaacatttgtgaaagtgcaaaaacaggctacaaaatacagtcccaattccgaacaagatcggaaagaaagatgtttttgaactctttgactttgaagagccacacagtcacccagatcttgatcttttcctattaaatctccacggattcctctttatcatcaaatattctcttatttttctccagcacaaagcccaccatgtagccatggtcaccaccttccaaagcagctgcttcctttcatcaccttctatatacagacaaaatatatctattcatgtagtctttcttgttttatacatttcttctatcttttcttaggaggttttcctaatttttcttgtaataattttgtattaacactagctgtggttctgttgaagaaagaaaagttgtgtttgcatttgtagcttaaggattttgtttcttattgcttttttgtaagtgtaagtgtaaaagttgcctagttttgttcttgtagagttgggttgcccctggtctttaagtcaagctttgataaagctaatcgaacatcatcaaaatcgtttcgaggtccaggcttgaatgaaggtttaaaggtgtgtttagttctcacttttatatctcttgctgcattgtctcgttctttttaaggctttgagtcctaataacttctccattgccatgttttatccttggtaaatgatgtattaaaaacaatgggaattttaatatgttcatttcaaattattatgaaattactattctttcagtttggaatactctcataagaatatttgctagttagaaaattgacattacaatttgaaatttgatgaaaggtgggttttattaagcagtgggtctttggttagactgatgtgtccgtgttcttaatttctttttggtgtaaaagggttcaacatgcaaaattcttcttcttcttctagcaaaaagggtaaaatgtaacgggtaaaggaatatttatcaaatttttgtgtggacaaaccaaaatatcattcattcctcatgattttttttgatggcagatcttggagaaggttaaattagcatatgacttacctataattactgatgttcatgaagcttctcaggtgagttctcttaattctttttctctaaactaccttgattcatacactcttgtgcgtatttgtaatttcaaaattgttacttttttcttcacatggaaaagaatacaaaatacctactcataaaatatttacaatgaaagtaaaaagaagaattagtaatctaatttctaggctaacaaaatcttgtaaagttgaatacaaaagggaaatcctatatcgacataagattacaagaggacagctagtattacgaccatataaatatgctaatttaatttgcaacttttccacacaacccacctgtcaagcttgcttgaaaatattttccatagctagcctacttggaagtccctttgtaagttattctaccactcgttcattatcaatccactcttgcttttatttgataaaatgtctgtctatcaacatgtttggttttgtcatgaatgtgtgccatagagattgcttcctttttaatatacatacattgttgggaattattaatcttcaattcttctaacaatcttttactccataagacctgacaaattccatgagccatgatcctaagttgagcttttgagcatctccttactagtgctgtgccaacactttgatttttttttctttttacattgtcatgtaaccaagttacctatagcaaaactgcaatgtcaataaccggaagtcgattatctatttgtcacatcatttgcccaatctacattagtttatatttctactttcaattttccattattttcgaacaacaagcctcttctaggggtaatccttagttatctcaaaattctaagaacatcaaatgttcttgtctaggagattgcatatatttacttatcgtactacaaaacctatatctagacgtgtgtgagagagatatacaagtgttctcactagtagttgatatttgacttttttattacttttggtttagcaggttgtacctttatcctaggatttataggtgtctttgtagctttgcaacctaatagacctattttcctaagtcaatgtagattttctttgtgaaatagagattcctttttgatctcgcaaatttcatactgagaaagtacttcaatggctctaaatctttaatcccaaacttcttcaatttctctagctcaagattttcattatttgtcaagattatatcattaacatacactaatagaataacaatcttgccttcatgagtgtttgtggtgcacggtatggtttgccttgcccttgattgtaaccatagctctttaaaacctttcccacgcttaccataactcttcacaacctttccaaagcactcaaaccaagctttgggagattgttcgagtccatataaagacttttccattatatgtattttacttgtatatagttaaatagtttttttaatcttgggaggtaactccataaaaactattcttttttattttttcaaggtctcaatttaagaaagcattatttacgtctaattggtgcaatgaccaagtaagatgaaatataggtaaattacaattcaaattgagttcatcttggctattggtacaaaagtctcttggttatcaatcccataggtttgtgtaaacccttttgctacaatccttgctttgtatctttctacattgctatcagctttgcatttgatggtaattacccgattgcagcccatagttttcttctccttaggtaaatcaactacttcccagatgccattgtttcttagagctttcatctcttctagaatggctaattggttctttttgaatgttttgtgtcacaaatacaaatttttgatgtaaatgacttataatacaactagagaacggaaccgcgcttcgcgcggtttttaaacttatatatatatgatgattcatgttattatagaaaccgctaattaaaatgatatttatatt

SEQ ID NO: 110734 - DNA, 5265 bp, Cannabis sativa
  modified_base (4126)..(4132): a, c, t, g, unknown or other
  modified_base (4385)..(4392): a, c, t, g, unknown or other
  modified_base (5191)..(5211): a, c, t, g, unknown or other
ctctctctctctctctttgtttctggtttcttcttcatagaaagttgatcaaaggggacagtgacctcaggttctttcctcttggttcttttcttcttcaaagaaatcttatcaaattaacctggaggtttgcctgaagaagaatagaggccatacttgatgaagttttctctcgttgccaacttacaaatatttttccttgagtttggcaaagagagaatatggttagctttatccctaacctataaggtaggtattggccagtcaaaagtggggacccttcgaaaggcatgatgcacaccctatgcaccatataccatgaaataatatctagcatagctgccaatcttagacatggcaagatcattcatcccacccaaccatatgtagcccagctggctgaagtagaagtaccatgaacgaccctgacaagggttggatttcaggtgaaatactaactcatctcaaaaggcaaaggctatggcaagcccatttatgcatataaaacaaagatgtcagataggtacttgatctcctttggagtcaaccatgctgggcaggtcttataatagttggctatgcctcaaaagtacgagtgaaggggcaagatagccttctattcatcgtggggactagaccatactatccagttattaagaggggcatgtgctaggtattcttcacctggcaggtcagtgtcaacagccccgaccaactttttggcctcaaggttcttgaacctttcgaagtgagcttagatggggaggcacccaagcagcctctgaatcccctctttcgggtagaggctccggagctgctagctcttccttagcatggttgatcctcgcacgggatggctacccaatttaatttaaggactccttagccttattatatcccccctaaggggccttctgtgagcatgtcataatctctgactgtcctttgggtaggtcatgccctttcctcaggctcagcaggcctctctgcttggtcaacctacacagccggtccccttgtcatcagttcagtaatgtgggggtaagtttaagggtctgcatggtaggtcttctttgtcttggccaagtttggatcctgatcggattactacgtaactttaatcacaacctcatcctcagagggttttttcacaaatgacgatatacatccctctagaatggtgttcggaacacatggctagacaatatatgtcaaagaagttggaagaaatttcctcaaactctggttcagttcccaaatgaacttactatagttttctcctccaatccatttagagtagtttgtgtgttgtatttttggttcaggggaaccactattgatttgcaagtcaaagtaactacttgaagagttggctggagaattaccaaacagagaaccacttgcttggtgcggtttgattcaacattttttagctaaaattcttacatttatctatcctagcacacccatgcaactagtgaggatgtgtttccctaaattcacgacatggaggtttttaaacctctaccaatgacgctaaaacaaaaattgaaattgcataaacatttttaataagagaaaaaggaaacgatgaaggaacttactcactagatagatcatgggtgaggtctagatggtgatgaagagataacttgtttttttctacacgatagaaagttgacggaagaacacaagaaaaagctctgagttttattgagcttttctttatgtttctctctaagagcttttttttgtaaataaaaattaaaatgagaaaatctaagaaaaataaagggcttgatataggcctctcttatttcatttccccctaaaaacataaatgggaaatttattccctataaaatcatcatagggaagtggaagagcaaaaaatactattaaaggggagttcacccgtcaacatgatctcccataaagcatgatttgtaactgccataatgagaactgacagataatggtcagttgaagagactgaaatgtgatcatttacttttacaaggaacagtcgttagagtaccatcaggtggagctcacatgcctaccagcatccgtacaagtattgaaagtccccattcagatagatgtttgtacggggacttagggaaaaaatttcatcctaaagtttacacatttggcgtgacacttacacgtggcataattcaaccaactcttaaacatgacaaggatcttgtggaaaaaagtgtgtcagacaggtcccatatgtcggtggaatccataagctttggattgccttccatgaagcatctggccgggccatcaacatactggcaagggaagttaagagtaacaccttgcaatagtgattccacaagtattctcacaaggaagacaagtctcgaggaaggcccggtcgggtgatcaacatgccgaccagaagaaataatgccagaagtaccagacaaggctacaagcatgacccttgatttctttttcaaaaagtttccacaaatatctcaaactgaatcctacaaactgtgatccagcaaatctatgctagaataaaggagcttcaacaaattgtaactacatcatagaatatagggatatttactctttaatcactcctttaaatgagccaattgtaacaaccttccccttataaatagtgaataaatttacaagaagaaggggcctggaatcatactcacgcatctatgagcactttgttgaaagatattctctataaacactttgagagtcgtagctagaaattactttgtctttcttagtgatctacatggtattatcacacaatccatacatttaaaaggggagtaagtcattgcccatatataaagggatcgaaccttattaattgttgtgtgttcttatttactttttatttctaacttcttattggtgattaatcattaattatttgattccaagccagttagctatttttctagtgaacaacaagtcttttttttgtaaataaaaattttgagttgtaaaactgtaaataaacttacaaaaaaaagttgtttataaaaatttccccctttttttgtctttgttatacaaatacttttcttctcaagataagttatgttgtttagtctagtaataaagatcttcacaagtttattacttcacactgttatttattattattttagaaagaactacaatattattaatgagacttgaaccataaaataattatgtataaggtaaaaatgtaaaatgtcatccataaaggttattttaataaaattatattattttgcattttagtttattatatctaattttataattattattaaaaattttaaatctccatgtaatataaaaatatgtaactatcttatttaaattttatttttctttgttcttacatattattattaatataattaagtatcagatttaatataatttaatgtaataattttataaaatattaataattaatcgcaagatacttgtatattactaaatatggtatatatgagtaaatctatatatatataaatatctataaatgagaagtatgaggcggtgacatgtcattctaaaatcactccaaaactatttttctcttctctccttaattctctccattttaatgttttattaaagcataaatttacaaattgatattttattattattttaatttttaataaaaatataaaatattttaaaaaatatataaatttacaaattaatattttactattattttaattttctatgaaaatataatatatctaaaaaaaaaatttagaaaataagaaataaattctaaaaaaatattaatacttaaatcaaatataattttctcataactaaaatatcacaattttttgtattttttctttcttttaattaagatattttaaaaaataataatcaattttttaaaaaatattaattaataataactgaacatactaatgatttttttttctaatgtcataaaaatgttaaaaaaatatttaaaattcaagatgaaatttaagattaagatatagatttgggatatacaatagtaacaactagaagtgaactacggtaatgacaatggatgtgatacaatgatgacaacgagtgagatacggtgatgaaaataagtgannnnnnntgagacaacaaatgagatataatagtaacaatagtttttaatgatcgagctatgaaaataatgtattatggaaaacaccttgatttttttctacaccaccttacttgttcatttttataaaaataattttttttaacaaagcaatttaaaatactatatataataaatttaaacttcttaataaataataattaataaaattgtgaatttagtttttaataaataattattaataataatatgaaataagatnnnnnnnntataattttactatatattaaaattatatttttaaacaattatttattataatactaaaaaaaattaacgcgggtatattacctagtttaattatattcaacaagtaaactactactagttaacctagtgcttttggccgtatttattaaaagtctttatcttcgactggggtgcatgtattagactttctgtatcagcttaaattgaaaccattcatatttcggagttgagaactttttagaatatttttctttggctaaatagacagatcagaaagccatttggaatattttatgttggacatatattcaatgaagaactggtcaattattccatttacagtattatatacaaatataaatatatatatttatttatcttactacatattttttgcgatactagttagtattatatacaagtattcttatttgacacaatttaatgtgtcacacccaatacaagatgtgtctcctattattagttagcatttttaatattgtttgtcaaattaaaataagtaaatacactactaataataatatagtagttttttttggtgcttcacaactttttagaagactctcagttgttgtttctgaaccctattttttaaaatactatattaaattctaattttttttatttgacatcaaaattttgcccatactatacaacattctctatttttttttttttctaaatcatttattttaatattaaattttttcaattaaaataataaaaataatttataaaaagggaaaagcaattaaaaaataggctaattagtaattnnnnnnnnnnnnnnnnnnnnngtactaaattatgccccctgaactattttagccattaaaaattccccctgaact

SEQ ID NO: 110735 - DNA, 4651 bp, Cannabis sativa
gttgctgcctctgccactccttcccacgcgccaccataaatcaccccaagcacacttattgcgtattccttttccctagctgaactccgccccatcatagtcaccatcactggcactgcaagcgcgtgtgcccttaccgccgcagctccctcgcccacagtgcacatgagctccaatgccgccattgctctctccgccgctgctccctccaactcgggcgctgactcgatcaccgccgctacagctcccgcctccacggcaactctccggtttcgctccgccaagcagagagccagcaaaatcttcgacgcaggtttcgccccaacctgagaaattaaactccccactacaccgcgcatcaaatccggcgggcattcaggatcggtcggcgggttgggaaccagagatctctctagaagttgtagggcagataactgatccgaatccgacccgacgcttagttggagctcagctgcgtggaacacttcttggaggttcgtgggagaaataggtggcgggccgtaatggtgaccagtctgatcactttcctccggtgttaaatcggattcggatcgtatattgatattacgaactggacagtttggtagtgggaaacgccattgtgtgaagctctgagacgttgaggaagaagaggattcggattcgggttgaaggttaggttgggtcggaggaaacgttgatggcggcggcggtggaggtagttcggcagaggagagagggagagaaggaggatgaggtgtagcactggtggggctgagaactgtttgagtacaatggccgaaaaagccacaagagaagagttgggttttgagctttggttgatgagatttcatgatgagagagaaggtgaagatgtgttaatggcggaaatgggctgagattgaagttgatcagggtgagggaatggtggggtgtgtgtacagtgtactactgcagaagtaaactgtatagccgtccctagtgtcagtgtctcacttttgaaaatttggaaaaaataatattaaaaacaaacaaatgtcacgtggcagcttctggtgcttccacatcttcttcctaatatatttcccgcgcgttgtacacaacacaacacgagtttgttagtatattagtaaaacgtacacattattcgtgttttattacattatattattttagtattatttaaagtaatattattttgttattgatttatgtaagtactgaaaaattatattatttttaccaaaaatttaactttagcctaattttgtacttagaatctggagttagggtagggaaccaggcattcgagagaaagggcattcaatactggcattcgtatgtgggactagatcaaatttatttgggatcttaataaaaggggcattcctgaggggatgtcttcctttatgcttagattgttgttgacaccatctagagagttcgcattgaaaaagtacacaatagtagtccagttgatgtgaagaaatgtattgacattatttgttctttttatgcagatttacatactactattttcccttccgccgcttcgtgctcaaaggaggcttgtaagccactcccacaggattagatcaagttgaattgcaatgttcgagtagggcttgatatttaaatttttctgatgttttatgtggggaggcggcggcttgctgcttggctcttttggtggcgaagggattgaaatttatcattgtggagagcgactctagagtagttatcaatgctcttaaagggaatgtttctctttgggcaattgaaaactgtctcactttgtaatagctcttctcactcgtttattagttgtaatttttttaatatcagtagatcttgtaactatgtagcctataatgtggtaaaatgggcctttgcccaccaaaaatttggttttattccactttcaaccattcttacaaacttattctgtaatgaccacgaggtctaattttctatctattataagtacgctttttttttaagaaaaaaggtcagggacccaagtccatctccaatattataatgtataaaataatacaattatcacattgtattaaaatttataattataataattaatacattacaatattacttattatttattataattaatcttgctaatattatattataattaatcttgtaaaggtaatcatatccagattcaagaccagtgagagtagactaagactagtatatagtaatagtaattagtatggttgtaatataactcaatactattttacagcttttacttttcttacagcttagggttcaggtaaaggaagaaaaaagagaaaaaagggtctgaaatgagagtgggatgggcatggccatactcatactcgtactcaggtatggcctacctaacatggttagtgtcagagagacagtcaataatttggagtgcagaaagttttgtttctgggcctctgggctaacacaaacaatgtcatgtcaggatgggccggccggccttggattcaaagggacccaaagaagtagatactataacataaacggaggagttgatttgatctgacttggtcatctcatcgagtgtgtgttctggtacaaccacatacatattcattggtttggtttggttctacctattttatgacaaaataagatacaattagaatcattcgacacacacatccatgagaataaatacacggtttactttgtaaaaatatttgacaagtccttttcatctttatttaaataattaaatgtacatttaatataacaatacccaactaaattataatagcaagtcacgttcagccactaagccaaatataactaactatttgacatatatattactccaaggtggacatgattagtcaaaaagaggttcacttctctcatcacaacaactcacaacgatgctttacgatgccctattagaggttacgaccattcgtatggatttacaataaactttttacactcacagtagtagctagggacctattcatccccaagaagcgtacgcccagctatatcctatatatggctaaattctttgtggtggacctggatgggatggcccctgtactatatgccttcaaaattcaacttagtgcttaattactgagacatactgtggttgtttgtactactcatggaaacgtcacaatctatcgttcgtcttggaagtgaaaatttcaaagtgaagagctaaacggacaacatcaaccctcaagtgatggacatcaggctcactactaccgctaggatcaagttccaatgatcaacccatctttttttctccatttttattatttaccgtgtacaaggatattatgctttatttaacccaaaatcaagtgggcaagattgaaatttatccacaaaaaaaaaaaaaaaaaaaacttgtgtatatttcgtcccatatcatttatgtgtgagtgaattgtaagatttaaattacacttattgtccctttcaaaaaaaaaaaaataaataaagtacacttattggcattaaaccttaataattggattgctacttgtgaaaaaaaaaaaaaaaaaaaaaacttgtctgttttgtcctacattactattacaagatccaaaaaaaaaaaaattataaaattcatatcatattttaccaatattatttatttgtataagtctcaagggacgtaaaaaatattatttagccaatacaacttcaattacctcaaattaaacaaatacatcaaatttagcaattaacaatgattatacccaatatatatataaaaaaaaaagttgcttcaaaagccaccctaaattttctttgcagagaataaaatcacttatcttcattaacaatcacccatgtcaaatattaaaagagtttatgcataatttatattgtagcttggagttatacaacctggtaatcaaaatctaacccttatgaaagtgtaaaattttacaacaaaaatagccaccgatggactaaatctaaatattcagagattcatgattttaattttaataagtttactaaaatcaaacgcagcctaaaggaaaaaggaagaagaaaaaagttagaatacaggagtgggaaaaatcacctccacttatcttgtagatctttcttctcagacaagatccatgtaacgaagatcgccgctactagtacgacgatggtgatgaggagcaaagcataactaaaatcttcagtgagtgaatcataggtcttcgaaggagcgattcgcgtgtaaaagagatcaactccgtatgcaaaaacaagtgttgttgactccaacctggcagggatagtaactatgcctcgaagtccttctactttaagggcatgcgttacgtaagactgcaaaattggagcctatgttaataccaactatttacataaagttatattagttttaagagaacaaatctgactgcaaagaaagatgtggtatagatggtgaacatggtttattttatttgtatacggttaatagatagtatgataaaacttcgaggtcaggttcttatttatttatcgaggactaggcagatatattaatgcaccaagcttgaagaaaaatcacactgaaaacagagtataatggaaaaaagacaatatgtacctggggaatgataggcaaagaatctgttaaagg

SEQ ID NO: 110736 - DNA, 8166 bp, Cannabis sativa
tttatttccttaaatagaaaataatttccttaaatagaaaattatttccataaatagaaaattcatttccataattaaaatattcttatagatctttcccggtacaaatggatctgggagacaacctcttccaccaatctttggcagactttgataaagttaatgtaaaatagagacactttgcatcttctcctgccttcactacttgcatcatacaagtgtatttagacaggtgggccctgggtccctcctacctttcatacaactccatttgaggcattctaaaatatttcaacaagggtgcctctattattctttttacacatggtttcaaatcatcctctttaaaatcacatacggccccacttcacttccggtaagacacttcgtgaacttggtcaattcagactatttgatcttccaaattctttgtattttcatcctagaactcacgcccatgaattttaccattgatatgatttatgaggtcgtttccaagagggcttacgttctcaccttttggctcattcttttgttgtgtctaaatgtgcttggaggtcagattttaacaaactgccctttgaaactttgtgaatatcctctaatccatcactctggttaatagaatttctaggacaatttttccttcccagagcagtaggcctttgtacatgagtacttggcttatccccaatgcaactctaccttgtggattaatcattcggtgttgctctagagcattagccattttctttttttgtaaaggttagttggtagtgttcatgttattttatggaacaattagagtagtcttttttgtgagctctcccacaaaactttttcttttgtcccttgtaggatcagaagttccatggtcttttgggtttgttttcttcgtagcattgtttttatgaggtgcagggtcattaagaatattttcatcatgagccactcctcttgattaaatttaggcttctaatcctgctagagtttctcacatttgatgggagattttctcctaatccgacaatttcttcttagtttcagcgagttcttcaaccattcaagtgacttcggaatctagctcatagtaatactcatcttccttttattttccaattagcactttcaggatcttcgtgctcaggatcatcctttaaatcttctaggtcatcatcaatgattggattttcatcaacatgtttttcaatatgttgagtcttcttagcaggacggttggtcgcttctgtcaggtctccatcgactcctacattcgcctcagtagtatgattcacgttgtccatgtgagtatccatcatggacaccgaatttgtcgacggtaatttggggtggctaccatggttgcaagataaacttttgttggtatcacttattttttcaactcttaatgaaagcaccaaaatatttaccgatatttttggaaaccaataaaatatgataaagctaaagaaagaaaaataaaaaatgaaatcaaagttttatggggttggagcgttaaagagccttagtccacgattcaatattattattttaaagccggaaaagctttaagatttagacaagtatttgaacctacatttttcctgagcactaggaatgagattccaaccatttgcatggatgacttttcttatatttatagcgttagggtttttgtccactgatgggataaatacaaataatataatgacattcgggtcgatttggtgaggccaggcccgtgaggcttggatcttctgctcgcatggacgccacatcacgttggtagttgtcaaaccgtatcctacttttgtgaataataaagataaattaatgcttgatcgacaattactttatttcctcatttgaaaggtacgaatcctggtcacaatactggaaataaaccctaatattgtggggtttggcaataaattgctatgatacaaagctggataatcagatgcccattatttactcatttggaagatctattcgatgccatctggatatacactatgctagaggtatatcttatttagacgagtcatctgtccaatacctagaaggcttgacttagctaatgaatccaatccattttcttgattagacctgcgattggacctagagcatctgaactgaaattttcttaaaattacacgtgtcctccgtccattaaaaacacgaataacaaaaataataaacattttaactttttctctcactataaaaagaaaaaaattacatttacgaaacatgatttaaaagtgcagcttagaattaattttaatttgaaaatgtataacctattataatatatttgattcactatatatataataagctcattattttgtcaaaaaagaaaaaaagctcattattatatacataaattataattaatttacaactatgattatatttgtcacataaattacatttatatgtaaatgtatttgtatgtataatgccaaaggggtttataaagataattttctgggactgggtcctaaaccaaaatatatattaaaaccaagctaagtagttgggctatactatatacatccttaattaatcaacatttatatatacatggagatcgaaaaagatatttataaagtatgcatagaattaatcaattgagactagctcacgtgatcataagagagtgtgtgttggaagtcctgagttcgaattctaaattatgtaatgtaatatataaacgtttaaatcaaaaaaattattataatagtaataataataaaaagattaaagagaggcggaggggttgaaattcgcaggaggagatgagatgattgttagagatggggcatgatgatcgaatatgggaagcaaaatcattaagcatgagcatgacatgtaattatgtgccatgagagtgtgtgtttcactttttattagtttcatatcccattgctatcattatcttcaatctattaataaattatcactacacatttctctagtaattaattaaccaattcttttattatataccatgacccatatagacggcattaaaagttttgtatcttggcccttcaggccaactaataattaatatttctaccaaaagaaaaaattaataattaatattcttttcattctctacccgtaatttattaagtcccaaacgacactcatatagacctacaagctaaaactacaaaaagtatttttctttgtactaaataataaaacgacaacattttcaaaaaaaaaaaaataataataataaaacgacaacattttcttttctaacaaatagaagcaattattaattccaagccaagataaacaatggtaatatatataatgggacacgattttgtctcgttattatactttcacagaatgtatttcgtgatgtacggaataaattagatggatctcagggtacgtaataattggtctcaggtacgttacgattttttaaccctaattacccctagattaacggctgtcgtacatcacggaatacattttgaatccgtgaaagtacaataacaggacaaaatcgtgtcccataatataattaatgaattatattcgaacattcttaaaagaaaaaatctctaaatttttattttttttttttttttgaaaaaacttgttcttcttatttattcttaaaaaaaatatactacttacaacatatgaatatgcattttaattataatcactgaatcaaattttcttttctttttccattgaatgagaagttctagtatttttttcctcattttatatttaagttgtatctaattaataatatgtcaaaaaaaaaaaaaaacttattaatatctatattattgtaatttgcgatcttgattcctcatcactattatagcgaaaaaataattttatattaaaaagtttacccaaagtaggactggataatgcaattttgagatctctttctggttatctcttgattctgttatcaaaaagagagaaatgggagatgatctgcaaattacggaaagatttaggggttaaaaagtgaaatgtaaaaaaaaaaaagaaaagcaagcaagcaaccaacaaccggttcttgtttgtggtcctaacaaataaattgtggtgtctttctcttttatcatgtgcgggaaccaagatgcggtgaaatccaagcaatccaattgggtccctttcacttttcatacaccaccaccaccatcagaccagtaaccactccactccatctcatctcatctcatctcatctcatcaatttctcttatctcatcttcacacgtactcattacaatttattaaatcctacattcattcatttcattccactccttcatcaatataaccagatctaagttttatttttgtatatatataatgtgaattattattattattattacctacaaaaataggaatgaaaattacaataattattaaactaaattatacttctcaactcctggcccctcctctccaaattcattgatgagaatagagaatccaaagccctaattgcaatcttctactcctcggtactactctatataatatatttatattatatgtaattaaatatatgtgatatatatataaatcatataaatttgaggtgaaaagaaaatgtatatatatgacaactgagcagattaagggctaggacccatgtgagaggaccggtgatataatggagccaaggcagccttctagtacaatataatggatgtctctatatatagagtactactaattaatatacattactagtacgggccactgcaatctttggatctttaatttcatatcatctatttcttggtagataacaatgagggaacacttgttgtttttagtctaattttttttatccgcatttaagagagttaataatctatttttttttttttttttatgatttgttacattataattatttgaaattatttataaatttcaaataattttaaataatttatagtgttaaacatatagtttaaatattttattgtacacatatgaagctgaatggttgcgttggctctgggtgtagctccaggtgatctagatttaaacatatatttatgttagagagttttatattgataatatgtggacactaaataccatacatgagatgcataagctactcttgtcattgtcaattagttttgagatggaaccccatgcacattgccataaactcacttattcctatttcaaccatacacttttacattctaacatggtatcatagtcatactaaactctaacgagtaatcgatctaaatccaaaaaccagtccaaaaaaatacaagccaaaagagtctcttgtaattcgaggatagtgagccaaaaagagccactgtgagccaaaagagccattgtgagtcaaaagagtcacttttgatggattcgtgcaagattggtgagcaaaattacccaccattttgagatggatgttaaagagtctcacattgataatatttggaaactaaataccatacatgagatgcatggactactcctcttattgccaattaattttgaaataaaaccccatacacctttccatacactcacttaatcttactttctaaaccacacacttccatattctaacaatttatatgcactatttataatgtcaatttacattttgtagtgtttttttttcttttgataaatattagtgtggtggctctcctgcatcaagtaaaaatcaatttaaaaaattcataagaacaatttatttattttaagtatgatggtattgttttttatttatttatttatttttgaagaaaaggtctcaacaaccaaacactaagagcaacaagcactcgataaaagtggggctaaggatttattcaaatatagcttctgctattattaagttctgaatacaaataggattttttgaccaccaaattgtacttttttctattgtcaaagcaagtttggccaatgaatgggaaacgccattacaaaatctgttacaatacacaaagctaacatctctgagcctattacaaagactaaaaatatcatctaaaactagacccaaagaaataatagtaggaacattgtttataagtttaagcacaatattcaagcagtcagattcaataataaagttaccatactcaaaggaagtgcattgaatcaacgtgttgcgtatagccaaagcttcaattactttaggaataaaacaaccatctaaatgccaactggcgaatctatgataatttccaaattatcacgaatcgccatacccaagctactacaattgctcaaagcagtattaatggcatctgtattgacttttagaaagccaagtgatggaggtttctattttagcacggcctgtagagggggttgtcctaggtatcgacctgcgagaagggacgtccactgccaattgacagataatgagagccaccgccaaaacttatttgttgtgaaacattccaaggtaattgcatgcccaacgaacaataagtacatgagacaattcaacgttgatatggataattttattatgtttgaaccaaatcctccaaagaatcaccataacccctttgaaaggatatcaacaaacctatgaatgaaatcaaaaaaatccacataatgaacaagaagatctcccaacacaaattcacagaatttcctacaatgagacaacaaagaacaccctcaaagagcatgatgactagtttttcttctttcaatctacacaaaggacataatccatcgatcaacaaaccacgactagttagattaatgttagagggaagccaactatagaacgcttgctaagcaaaaagtctaacaacatttggtgatttttttttttttggtctttatttatttatacatgtttcatgttatagcaattgttaacgcagattttcattaaccaaatttgagccttacgataatgattcaacacagaaaatataaaaagctatagaaaaagaaaatatgaacactggggttttttacgtggttttgtatttaaaattctacatagtccacgagtcaatcttattcagatttctgagtatttcagggcctcttaagtaagagctttttcgtcccctttttgagattgtttgccactatttataattgcatagttccagttaattacaaagttgaccaaaacatgattacagtcattatcccttaaatcgtgggatcttattacatatcataaaatataaatgcggtgtatgattttaaaaatcatttagctgtgattttcccgcttttactgggtcagaaatatcgtgtatgaaacacatctttaatttttgaatctggagatgtctcgacagaaactagactgaagtgattccaatggcgagctggaacgattcttcttttcgaggtcgacaagatatattttacgtcgattgcgggtatatagaaatcttctgacttgctagggttatgagcctcgctcctgttagttggatgaaactataggaagtttcctcgtagcgagatggtcatctcgcattcttgttcttcgagtcgatctgacttttacacttggttttcttattgtaagctaaggtatgtgttactcttccctggtgcctcactattctcctttagcggcatatggtttctcgttaatatacgaagcatcagttcgcacattgattcctcgcctaagaccttacagtcagcgggttacaaacagactctgatacttacgaaattaatgagttattccataaaaagatatggcaccgattcacattccctttaccatgacacatgtcatccagctgaattttgggtataacaattgtcccttaaaattttattttttagtaaaaagagctttttaataattacggagcgcatttttgccaaaatcctttcttggaaaggacgcctccattgattctggcagttgtatggtttcaaagatcattatgaatcgcctattcatattctgcacgatccccggccgttagatttctcaatctttggctttcttgtcactgaacttcgtgtataaaaggacggctcatgtttctcatttttcacaacccttctagctttttagtgaaatccattttcagaatggattacttccttcctgccaaaatatctcttctaagttcagaagtttattctcccagactcataatacccagat

SEQ ID NO: 110737 - DNA, 5422 bp, Cannabis sativa
tatactagtttagaagtgagtgtccagcacctatcacctgtttctctttattgtaatatattttaattagaatgtattaatttacgaacaaaaaaaaaacaatatcacctgtttctctttatagtaatatattttaattcgaatgtattaaccaacaaagaaaaaaagaaacaattataaaaattttaagaaaaatattttaaaaaaaaaacaacaacaaaaagatataactaatttaacatgcaattatttaattgatgaataaagcaaaacacatatctacaaatagggcaaacaaacaaaaatacaaatagtttaaatgagcttacctgcccttaattttgctatgtggcagttattccttttttattttgtttaactgttttgctcaattttttttttttttttttgaattccattacataatgtctcccgctttttctttttacagtttttcttccatttgttttgagtttccttccttctgaaattcaatgatctttgtattttctatagattcctttcaccctgatattcttactgcatgcacaagagaaagagaagtgtttaacatatctaatgtcgctactccaactccaccacttgcaattcatcgacttttttgcaaaatattctcaaaaaaagttacaacccaaaacaactaaaaaccttcattgctaagcactagcagggtagatttgctattgatatgtccgattatgagtgtgattctcttaggattacatttagatgtgaaggtgacttgagaagagttctttctaaagaaccttggcactttcattcatatggttttgtgcttaccaagttccctagaaaacgcttcaattgaatcgatgacaactacttctttttggattcaagttttttgactgccattcctgagtaagtctgaagctctagctaaagtaattggtaacctcattggtaattatattgaagttcattaagattctttaaatgagggatggggtctttttttgagaattcaggtgaaaattgatatttcaaagcctttgcttcgaggccagttagttacactcccatggttggctaatgaattatggctagactttcgttatgaacgtctacctaatttttgttatgactgtggcattatcggtcatgtctttaacaaatgccctcaattcgtggagaaattagacaatggtcttgatccagatctaccctatggaccttggttggaaggggctgctctcctaagaaacatatatgatcgatataggcaagatttttcaaaagctgggccatggcccttcattactcgattggctagcaacaccattgcacccattatatcacacccacgacaactccctacccttccatcacatatcactccccaagaaaaaggaaaattacttattgtctcaactgatcattttgcattccctactgacataccaccaaagcaaagcaccaacagaaactcttcttctttcaataaacccgctatgcaattgaatcaatccttaacacacactgctgaactcaccaaaattcatattggctatctttctagcgctaatcctgaacatctaaaacatggtgcttcttctagcaacattatttctacggatgggatacgaagtctttccaacatcaattctaaagtttctactgatcacacttctattaacaaaaataaagactcagcatcaatgacctcgggacctccgggtttcactcttccaaagtctgtggctcttccagtagacactccaccgacttatatgcatctcgccaataacacaagcatcagttcctccatgttacctgcaaccacagtagactttaccactactgctgactcagcccccaataatgccactgcatttgaggtttgttcaattaatctcttcaatttggatccaatgacggttaatgagaagagaatggcttcatttttttttccaaaagacaaatggtgtcttctagtgggaatgttagacaagtattgaagagatgccgcaccagaaactctcctctcgtttgcaacaacctccagtttatcctacctttgagttttctaacctctcattgaaggataacactaacgatgcacaattggcgtaggctaaattacaacctcgccaatcgccatgaatatcatcaattagaatgcacaaggtttgagcagtccccgtgcttttcgtcagctaaaactgcttatttcattaaattcacctgatgtattcttccttatggaaaccaagttaaaagctagttctctttttaaattttgtaatgttttacattttccaaatgggattgaagttcctagggttggactaggggtggtttaatattattgtggaaatcccatgttattgtaactattctcaattatgcaataaactttgttgactgttatatgtcgtgtaacaatggcccacagtagcatttttcttgcttctatggttctcccatcacttcttcaagacattatcctggaaacttcttcaacgacttcatgactctgcccctcttttaccatggttgataatgggtgactttaatgagatactttctattaatgataaaattggaggtcctcctcgacctgccaagcaaattgaagatttacgtgatgtaaatgactactgtagactctctccactcaactttgtacgtgaaatcttcacgtggcataataatgttagctttgctgccaatgtcaaggagcatcttgattatgctttctcgaatatcccttggattgatcaccttcaactgacatcactaaaatgcttggatttttacaactcaaaccaaagagctcttcaagtcacgatttttctcaacgatcaggaacaacccaaatggtttaaatctcattttcaatttgaaaaactatggcttaaacaacatgaatgtgaagagctaatatccaatcattggacacttggaacagcacactcaactgacctattactgcagaatattgaagccatttcatctgagcttcaatcctggcaccatcaaaaaattggacaattgcctaggaagatcaaattggctaaaagtgtgagtgaaaatttacgagactcatatgattacttcacaatcacacttctataatcttcacaaatctgagaatatattagataatttactagcccaagaagaagaatactggcaacaaagaagtcgaattgattggttgaaagttggagactccaacaccaaatattttcatcaacgtgcgaatactcaaaaaaacaataataagatcacaagcttgattgatgatggtggaatagaacattcttcaaaggctgaaatttcaagcatcatcgagcaacattaccatggtacatatttcactgatggagttgatcatatcgccattaatcatgttctcaactcagttccatttgtcatttagaggaagataacctatcccttaccagaaattacactactacagaagtgtatgctactctacaaataaagaagtctaacagcagccctggaattgatggttttttagtcatgttatattgccaatactggcatattgttggagaaatggtcacaaactaagttctcaatgtcctgaatcatggagcagacccttcactactcaacaaaaacaattattactctcatcccaaaagtcaaaaaaccaacactgatttcacaatacagatcaatcagcatgtgcaatgtcttatacaaattaatctcaaaaatgagtgctatgagattaaaaccactgttgtctcgtctcatatctaactcccaaagtgcttttcttcctcaacgacttataacagatagtgtgttggttgcgtttgagcttttgcactcttttaaaaatagaagaagaggtcgtgtgggttatgcgacgatgaaactcgacatgagcaaagcttttgaccgtgttgaatggatcttccttgaaaaaatgatgcttgctatgggcttgtctcctatgcttattgaactgataataagatgcattaatctatgtcttattcctttttggctaatggagaaattcaaggcaacattgttcctggaagtggaagagggatttgacaaggagaccctttaccaccttaccttttcattatttgtttaggagttttatctcgtttgttatattacgaagaataaaatctaggttaaatgaattataaacttcattgattttttacggagattaacttgtcttcatagaatttaattttttttcctaggttaaatagattgcatgcttcgtggatctattgcttagcaaaaagatttaattatttagtgcttcgtcgtaattaattataatacggagactatgataagtgattatcatcagggttaatagttcaaattaagaataaaaagtaatatttatcatcattgttcttaattgattgttgaaggtggagaataattcttaactgcttttaaaattgtaatcgtaattatcattcgttattttttttttttaattgtaaactcacatttcctcttttactttctatttcatattgaataataaattaatcataattctcatgggtttgacatttatttttcgttatactgaagtaattggtaaatctgaaagaaaaaaaattattaaatttattgtggcttacgacacgtatcgatggtatatattttttgatgtatggtatataaattttattgtatataatatattatttattttagatcatatttagtttctattttattatatataaatgtagtatataattttgtgtgtggtacttattttaattgtggtatataattttgttagtatggtatatatatttttttaataatattattttgttataaaatacataagaagaaaagaagaataagatgaagagagaaaaagaaactgaatgaaattccttagttgtttatttcaatggggagaacccctatttatacaaaaatttgactaaaagaatgggaaactaaatcaatgtaataaagaaaaatacaactaagcattaatggtgataattaatttggtaatttaaacatccataaataatatttcctaacactcctccttgggtgtccataaaatctgtctcattaaaaaccttgttgaaaacttggtcaaaaaaaatagtgcagtgtaaactaactctccctcatttaggtattcgtagagatcttctaatcgatgaattccaatcttgtatgtcatcttctcaaatgttgatgctggtgataacttgtgagtaaatctgcaagattgacacttgattgaatttgttgaacaccattatacattctcttaaaataaagaaaaatatggtgaaatgtattttaattctatctccttcaatgtaccttgcttttagttgagcgatgcaagtaatattatcttcatagagtactgcttatgttgata

SEQ ID NO: 110738 - DNA, 8663 bp, Cannabis sativa
  modified_base (2448)..(2455): a, c, t, g, unknown or other
gacataatataaaagttgtcatatataggcaattttatagtgtttatgtttagaaaaataattttaaggttaattaagtatagattgtcaaatttcccttttataatagtgctccaatatatttaggataaaattaaacccttttttgatagaaaaatgtaaaaaagtcaagatatataaaatattaaatttttattaaaagtatataaaaattttattaaatgtataaataaattataaaaagttattaataatattaataaatagcaaaagaataaatcaaaaagtaatatttttttattgtagtgtaaaatttagcctatgctatattttgtactaaatttgtcacaacttttagtatctgctaaatttgaaccactttatacttactattggacttcagttttatatatgaggataagctaacatattcatatacactacacttttagctttctattagtgatgctcttaatatgtgcatatccttattcactttaattagaatttaaacattttttcaattacacataactttgtatagttttttttaacttgttgtacacttcttcggtgatgttttcctatagtccctgctcttttgtattttcttaccttatcatcttagtaatttgtgtttttcttttttatatttttcatgtttggagttgtgtatgtttttttttcatctttctccataatatattacctacaaatatgtactatttatatatttgtagataaacctatttacctacattccattgatctttacctacagttacagtttgtaggtaaacagtgcattgtcttatattgtgcgacgcgagaataaggttgctgatttgaagaaagctagtgagagtgctaccaaggaggctggagagccaaaaaccaaacctaccaaatagtcaaggatttggaaaaatcctttgaaagtaaaaaagtaaagatggtcgataacactcaagctcgggtcgactgcattagtaagatggccgtgtacgatctggaaattaaacatggcaagtgatttctcgttgcttggttctatatatgtacgcatcccttctccacctaggtatggggttatgtgtatcgccctagaggtgccccttttctgtctaggtagtcagaaaacccccaaacaaaaaataaagcatgcttaggcgccaagatgggagcgcctaggcactatagagtaccaaggggccaaaaactcccatgaatttttccctaattactcttatttcaatcaatctttttggtacctaaatgtcattctacatgttggtttctaagcccaattttagtattaaaccttaccctatacaaccagaaagatcaaaaaacaataacaacaacaaataatatttcatgcatatcttttgccagggtctgtgcatgcgtgcaaggtcccaacttgccaatcgcatgtgcggacactcttgaaggctaggccttaagtgtatatggaaaccctgcagtagcatttttttagtattttggacatatttcactactcaaaatttcaattggcgcgatctgggtggaactggaaagcttattaaaatttatacaaaattgtgtttcacgaaaaaatccaaattcaaagtccttatagcctaaatttgagttgcaaggagaactacttcaatttacccttttaatgattatgaacaactacgaactaaaataaaacaacatttggagggggggaagatgaaacttttgtcctatgtagaaagaacaactctggtgaaaatggtggcatctgccttacccgtttatgctatgtctaaaaataaaatttccctcacaacttgccgatcacttaatgctttggttagaatatattggtgacagggaaataatgaaaaggacaaatttatggctctcaaattgtgggataacatatgtcaacctaaactttcgaaaggtcttggatttagaagattctaagacatgaatcgtgtgcttcttacaaaactcgcttggagtttggcaaaacttgaagactaaccttgggtggactaccttctgcagaaatattgcaaaaacttttgggaagtgttaacttgggaacttttcctggtgacatggacaaaaccttgagtggacatcaataaaagcttttgagtagacccgagtcatagcagtcgacctcggaggggaccctaaccctgcacccaacttgacttggggatcttcaagacagaagtttggacttcaataacttgaatccaacctactctctttcaatatatttaccaggaagacttgtagtatcctaatcgaagcctcgggagctaaaattacacgaacctacaatgagaagccaacttgggcacctagggtttcactcagcgcataggttgacatcttttactagggtttcagtttatggccatcttagtgcaaaagggtcaaaacttgcattgggacatnnnnnnnncataccacaaacatatttgagacatcagagttagaattgaaacaagttgatttttgagcacccgggacctcgagcacctatcgcctaggttgacaatctgtcaatctgggcaccttccaagtatctgatcagagatctggcttttgtatcttcttggtcttcattaaaaacaaagaaaaatttccttttagaggaaaaagaactattcctaggtacaaataacagggcccactgccaaggttgacacttggggctggtcctgcgtccaggttgacattttgttaacctaggccatttaaaatggaatttttcaagaattattttggcaacttctctattttcagaaaatattaagattcaactatttttgaggaacaacagaatttttgaaggggcaaaagggggacccagcgcctaggttaacacttggggctaggctgttttcgatcaagtttagcaaaaagtattccaagaatttttttttttctttcattagaaataattaagattcaagcaaactacaagagaaaactacagtctcgagaccctggaaatagcgcccagtgcctaagttcacctaaggttgggcccagcgcccaagttgacaataaacctgggatgctgccttcaattgctcaaatgcgaaatctaatgctaccatcgaatctggaatggtataaaatgggggttggagacctcgtcctcaagtttagaagccttggaagtatcagaaacaaaatcctgagaactcgggactaagtaccgagggcctaggttaacaaaagccttgtgtgttgggttctgcttattcgaatctgatgctgtttcgaacgtctgtctagtttttcaaaatgacaatgacctaatgaagttagagaaatcaaattcacaaatttgcatttctcatttccagctcacttggaaataaagattttctagtctctcatttcttcaaaacagcaacatctccgagaatctgtgactagcttcgcaagaacacattactagactaagtgatgtcaaaatattacttacgcattttaaagtacatctcttggaattttttagacttacccaatttttaggttgatgtcatatgtcaacttgggcgttgggatgtcaacttaagcattgggtcatgaactgtctttagtaaaatagtcataactcaatcaattttgatcttattgacgcgattcagcttgtgtttagacgttaatttaatgctatatcaagttatgtatcacaatctagacatagttttgaagctataatcatcaaaatttaccccaagggatatacgaaaataagctccaagttacctgcagcgggacccgccaggctccaaaaaatagctatccccaccaagagctaattttcaccgttagatcatcatcaacggtcaaaaacttcttatttatatttttccctatttttgtgggtctccttcccctataaaaggagagctccataagctcatttttcacattcgaaaaactacccacaaggttagagcttctcaatctaagctttctctctccaaaatttggaacttctgacacttagtctattgctgtaattaccatctcgtgagaaataaaaactcaaagtagacatagtcacattactatcgcaatatagggggtgaactactataaatttgttgtgtctctcttataattacttaactacatattaattcttgccaatctagcgatcgggtgtggcttaaaagtttagtccaaattttttagtcaacattttggttctttcattgagagccatagctcaagaaagttactgaacaagatggttgcaacacgatctacaagtgttgacaaatagactccaacaactggccgaacaactagaggctcgccagttgatggagttggaatcatgactacttttgtggcttaagcgctaggagcaaacattggaactgtctcctcaactctttctccaaggccaccatcagccactatcgggactggcaccaatgaccagatcccacctggagagcctcacgtggagatagacaaccttgaggagttcgatccttaggttgctcagctcagccaaactatggttgacttgcaacaatagctgcgagtctctttcgataagcaacatgaacagtttcaacactggttcgtggaaaactagaagaacattgaaagccaacgcgttgagtaggaacagtggatagctaacgtgcctcaacaaattagagaaggctatttctctaatcggtgaactacttcccatagaggtttttcagagttggtgagagagactgtccatcgaccaacttgtcacgtgggaactaatgtccaaggagaaacccttaacactcggaatgccactactacacctagtaactaagcaggcactaagaaaacaccagacctggagacctcccgaagtgtaggtaccttcaagcaagagcccgagaggactcaagctcaagggtagaatgtccctggtaacacagatgttgcatcaaaaattgatgcttatgttgttaaactttcaacttggggaaaagaggtcacatggaactttaagaaaagaattcagtgttgttgaaatgaattaaagctattgaaaaaaaaaaaaaagagattctgtgtcaattcaacgacatgtagaggttaagaaacaattgtttttaatcctagacctgaaggagattttttgtaagccaatggcaaaacaattttggttaaaggaaggagataataacaataaattttttcatcgtgctgccaacaatagacagagtgtaaagcaaatttcaaagttagaagaacattggtaattgccaagattgggatactgatttggaaagaatagtcgtttattatttctcaaacctttttttaccttcgatatcgaattgtgaagatgtctttaattttattcagagttaagtgttgcatcagcttaatacagagttgctacaaccagttcttgaagaagaagttaagtgtgttgtctttgatatgcatcccaataaaagccctagttcggacaaaatttctctgactttctttcaaaaatgttggagtattgttaacaaagatgtggtgagttttgtccagtgatttttcagtactggagagtttgaacctagttgtagtaatgtcaatgttgttttaattcctaagaagaaattgcttgaaagtatggggtatatgcgacctatagctttatgtaatgtcttgtacaaagttattactaaagttatggcgaatcgaatgaaaccttatatggacaagattgcttacgaaatacaaagtgcttttatttctgataggcttatctccgacaacattttggtctcatatgaaattttgcactatcttaagagaaacagcaaagtaaaagaaggttacatggtgctaaaattagacatgagcaaggcatataaccgaattgaatgagattttttgaaatcaatgttattcaaacttggattcagggaaggctggattccattggttatgagatgtgtttcttctgctaattagatggtgacccatggcggtagagaaatgggaccgatggtgccttctcaaggtatcaaagaaggtgatcaactatcactttatactgtatattcattttatgtgcagaaggactatcgtctttaatcaaaagccatgacgagaaggttttaatccatgggtgcaaagtggcaaatggtgctctaatagtgtcccacatgatttttacagatgatagttaatagtattacaaagccactattcaagaggcacgcaaaatttgtgagcttcttcataaatttgaaagcgcatttggtcgaaaaattaatttgggtaaatcttcaattttttatagctttaatactgatgtcaattgtagaacaagtattaatcacctgctacaaatgttccaagctgataatagaagtatgtacttaggtctacctagcactatggggggaaataaattagttgttctaagttacttaagggatcgtgctcgtaagaagcttcaaggttgggaatcaaagattttatcaagagttgataaagaaattctgattaagtctgtggctcaatctcttcctagttatgctatgagtatcttcttactcccttgggatatcagcagagatatagagagtttattggccaaattctggtgaaaaaagctcaaatggtgatacaaaaggaatatcttggatgtctttggagcgcatgtgtcatcataaaagtaatggtggtatgtggtttcataactttcatgattttaacctggctctctttggaaaacaagattggaaatttattactaggcctgattctcttgcgtctcgcatttttaaagctcattatttccttggggggaattatctttctgcttatcttgggaacaatctaactttgtgtggcacagcgtttgggaggctcaatctctggttcgtgctagagtgcagtggtgtgtgggagacaattctgagacaaaaattttggggtgagtagtggctccctgaccttatttaacctatggtgatctcggatcaccctgctatgcaacatgccttgttataatttgatcgggtcaatggatatactaaatgatgttttttgtggaaagagataagaacttgattttaaaaattcctctaagattcgctcaatcacaggaccatctatgcttgtttaaagaaggcacgggtttgtattatgcgaggagtgcatattagctcctccaatctttgaatacaacaaatatagttattaggggcggaacagtcctctggtaaaagttattaccggcggagcccgctggtaataaagggtcgctattaaccattatcagcggcagaaaatgtctctgccgctaataatattattagcagcggagtccgccactaataaatttgtcaaatttacttttttataagtattaccagcggataaaaataatgagtccaccgctgatattttattttttaatataatttaatgttataagtactaataaatattaatagttttttaaaaaataatatcagttcatacttaaagtatttcatattatcttggggaaaaactgagaatggtgaacaaaatataaatataacagtgagctccatttgtttcaattcatattttttccatgctttatgaaagaacaagttgctaataccaagtatttcataatattttctattttcattagtgaagcaaaatgataagtgaaccttttttctttaacaaaaggttgagtcgtccaaatagaggaaaaggacaatcatccaaatctcatcatccacaagcattttacctcttaaaaaagttaagaaaaggtaaccaatatatgtgtatatacatataccgtactcaagaaagaaaataagaaaaaatagagcatgagcaactttcttatatacataaatattcaaacaacgtgtatataatctcctctctaaattatgaacctggtataaaaataacaacagatttataatatatcttacaaaattattagagtattagtaaactacaagaatgtacacatataataaaataaagtatatatatgcttcaaaatacaaatgcaactggagcagagccggtggggacgattgctagagtcgaagatgattatcgaaggcccagagccgaggaaagactaccgattcaaattgttgatcctggaagaccaaaaaaacaaagaacttgagacaaatctaagtgcacataatattttttaagaaaaattaatagcgaaaattctagttagatacatttaaacgcaataataagatctatgagaggagagatcttagaggttaagagaaaatataaatatatatatacttacagtgagagaaatagacgcgacaaagaactattgaggagagagaatgagtcggcgggggttctacgttagaaatttaggagttttacacagttttatacaatttaaaatttttgggtttagagagaaatgaagaagatgaacggatgaagaaaactactatgtatatagctattaatccaaaaaaatatgcgggaagtattcgtttcccgctcgtgcaaaaattttatctaccgctaataactaaattttttgatttgtataatactattagccgtgggatccgcgcctaataataaatacatttattgctaatagttttttaaaatattttattattagtggcggattg

SEQ ID NO: 110739 - DNA, 2110 bp, Cannabis sativa
  modified_base (28)..(63): a, c, t, g, unknown or other
atttcataatcgttttagaaagttcatnnnnnnnnnnnnnnnnnnnnnnnnnnnnnnnnnnnntaagatcctggtaaaataaattcttacagataacaacctggattccacgtgtccactattggaaacgcggataacatttacccacaagcttccaggattatacgtctggtggaatcttgcttcactccttcagtatggacatgtggagaatgagggataatatcatgactttctaagggttactcgatcaagaaaggtgacttccgtctttgattgtggtacatccacgtgtcaatccaatgatggtggaaggacacaatcgtggaggagtcgctttccacaaacggctatattttgacagttgttcacttttttggcacaaaaattgaaaaatggcatcttcatcattgattgtgcctcgattttagagagcattaattgtgaagatgtgtgtggatcgttgaactccctagtcgttttatgaagcttgtgttttgggagggtggatcgtggactgttcatccttttttcacgtagattgctttttgaatataaataccttttacaaattttagataccactttcctctcatttctaaatttttaaacccttcaaaacatataactttctctatacccttttgagactaagaatcaaattcagagccagatttcttcaccttggaatgtgctatcaatttctgcattcaccttttattgaggattcgagcacgagagtttccacatcatcaactccagtaatcgtgagtcttacacgagaagaagacacggacctagatttgatgcaaaagttgactctttgattgccctagcatctcttcttcatgaaaatatgtgattaacttcccaagccaaacctagcgatgattagcttgacatcaccgctttcgatatcatgtttcttcttcatttctagattgtattttctgggtttgttgttataagttatgcttgcatgttctattctaagatatgattacaaatttttgtttgtgcgattgtcttcgtaaataaatttaggcaccacaaacgatacttttttttatgaattccttgttagaaatccttagaatcaagctttttgcagtagatatgctaccaaaattttccaacacctaaattccttttggttttgggttcttcattgatattttaactgctcgtcctctccatcattcctaacttcctatctggaacaaataaatcatgggtgtttaaccccatttctagacctggccaattataaatttgcctttgggttactggttcccggagcccttgggacaggacttcatcctgttggttggccagaggtgttccaccaaggggctggctggctaaaggttgactaattaggggtgttgttaagcctaagatccctgtcggccctcagaccattggttgtcaagatctaactgttctcgccacttgatctttatggcaagacttgtttcgggtaggggatggtttgtcttggttctagaggaacctagttagatagtttgtcagtagaccctccctaatctattaaatagtctcccttggagaagatctatgatgagatcctgacctattctagtagttctctcattaaacttccttattaagtcggtagcgtctctattatggcagtccatctccgcctggtgagatcgaaggatgtactcttggtcatccatccatcttaaaaatttgtgtctctgttgtgcgaatacatcgccaccaacaatgcatggttcttcagtttcgccgacttgatatacaacctctctatgtctggccaactcgagatcttttcccaagtctacatggggctcgtcaattcttggccacgcctctccactataatactggggaccagatccagctgtggtgcctgggggttgctccacgtggaccatccctttagtacgaggcactgctggagggtcctccctgggtggcataggtcgatcattgagaccaactagatttgttgtattgacctggccagttatggtggccaagttcgttgtgcctaccgaggtggtaggggtggccactgttgggttttgtgccctaaataaaagtcatttcaatataatca

SEQ ID NO: 110740 - DNA, 4719 bp, Cannabis sativa
  modified_base (4667)..(4688): a, c, t, g, unknown or other
tatatatatatatatatatataatattggataggagcccgtaagaattctccctttcaatatgggatgggaaagttttctttcatccggctcaaataattacactaactaaagttaaaaagaaaactcaatcatcgttagtatttagaggtctatcaattaataaaaaaacttggtatttttttttattcgtcaagaataggaaaatcttgttggttctccactccattttgttaactaacttaaggtaaatttgatgcagcattggagctatgaaggtcaagaatgaatgcaatcaatttaaagaattttgtttggcaggaaacgctgaagggtatataattgttatacaaatatttataatctaattaacgataaaccatacttaattatttgcatattgtacttttgtagatgcataagggcttttcaaagagtgaaacaagagcatgagactctaaggatgcagctcgaaacttattttaaggtactaattatttataatttttagatgttatataagaattccatgtaatctgtttttttttttatatatgtgtctattaatatatatatttgtgcataactatacaatttttatttttaatatatatttttatgcataacaatataattttttttatatacatattttttattttttatttttatttatagtgtttatccaatctaatcaatttttgctcagtggattaagtgggacttttatatttttgatccaatttaatcgacacaatagtttaaattcaatctttttcataaaacgcagattggatcaattattttacattaattatatttattattaaattatttaatatttactaaaaatatattttttttacatgactagcaataaaataaaatatttttttttttgtgtttccaacaacaaattaaaataagtaaaataaaaaataactaatccaaaagaaaattggaaaaaattatatgtaaaaaaatatttaattttatcttatattatattttctttatacattgaatttattatgttttgaaatatatttgtggatatgtattagatttttaaattattatatttttatattaaaatgtaaattgtatatataaaatttttaatatatatataaatgtgtatattagattaaattagttatttttacacgccaatcaacgtttattttacacaagtgtaaattttttattttttaatttaatctatttttttttttatatatctgcactttacggaataaattagattagatgatacagattagattaaattatgtattttatgaataacggtacatatacactatggctaaggcagcatatagccatatacgctttcatacagaacattcgtctaatatttagatctatttccaaccgtgtcctttcaatttttcttttatctatcgtattttttattctttttgtcttttagctttatgaatataatgcataccctaaatatatattatttattttaattataataaaaacaattgatgaaaataattctataaacaattattcatgaatctatatacatttacattattacaaatagattaatatataatattaaaattcatagtgatttcttttaaaaaaaataaaaaaaataaaataaaattgatatagtgactaaaattaatattatattaagtatatagtacactctttaaagggtactttcaatcaatcctttatctaattgaatctataatgaatataatcctttatttcaaattaaaatttctaataaatagtgtttgactatttattggaaattttaattaatttttttttcataatcacatatattgtagctatttagaagcacctgtaaatttttaaaaaattctgaataatttgcaatactaaaaaacattaattaatttactaattgaatatataattaatactatttatttcaaattatattaaaaataattttatttattattgaaattagaaaagaaaaattagggacaatcatgtatatacataattactaattactttgtttgtacatatgtaaactatagttgagaaggcaagctggactggcgcagactgtttaataatttataatatataacattacttataaattatgatgcaaaggaagcaacaacgaagattttggttacgaagaacgccatcatcatatgccatactcttatactataatatacctatatatatagatattttgtcgtagttgccaagtgatgttgagattatcttaactgttttatgttatttcaaaataatgtgaatgttataaatctctttttctctttttgatctttatctttgttaaggattcataatattcatatcacgtcttatataataagattacagtggttttttcccactcttttgtccttttgcaatatctttttcttctttttccctttacagtcttttttctgaggattttgcagcttgttgtttactttcagtctttcccacccactcatcaactttttaggcccaaatcgaaacccaattagttccaaattatatagctaccgacttgagcacacttaacaaattataggaaatttatgtactacatcccttaaatcatgagtattctagtacacttctcaatttgttttggcattccgaaatagtatgttaattaaagttttttttttcataatcacatatattgtagctatttagaagcacctgtaaatttttaaaaaattctgaatagtttgcaatactaaaaatatagtttaaatagttatttatcacgcgtataagaaaaagatattgagtgtgcaataaaatatttaaactttattttcgatattgtaatctattccaatttcttttaaaatttacatgatcctaaacaattataacgtacataaccataaaaaaataaactatttttttaaatatcaaaacagataaaaattctaccaaaacatccttttaaaaatgtgcactatagaaaaccttatgaatgctaatactctcgatgttcgaatggatgaggtgaaagctctagaaattaaattgaatgaccttatgaatagggaggaactttattggaagcagagattgagagcgggatgatggcgggtgatagaaacacgaaatactttcataacaaagcatcgttgaggaagaagaaaaatgcaattactaagattatgacgaaatctagccaaaagttgtgtgttgaggaagagattgttggtgaagtggagcggtattttacagatatttttcaaataaccaatccaacaaatgagcaaattcagcgtggtacggaggtggttaattcgcgtatttcagtggctgatatgagcgtctaatggaaccatttactgaggaggatattcactaggttgttaaggccattggagccactaaagctttgggaccagacatatatcatgctttatttttttagagattttggaatattatgggggaaagggttagccaagtatgccttgcaatattaaatgacggtgtttcggtgcgacagtttaataagtcaaatgtagtattgataccaagagtacaaaggttaaagagtatcaccctatttctttgtgtaatataatgtataaaattattgccaaagctttatcaatgaggatgaaaagtatccttggacccctcatctcatctttccaaagtgcatttatcccagggcggtcgatacatgacaacattatgattagttttgagctacttcattcactgtttaagagaaataacggtacaaggggatttatggcactcaagcttgatatgagtaaagcatatgactcggtggaatggagattcttagccagtatgatgtgaaagtttggctctgttgagggctgggttagggttatcatggactctgtgatgacccgtgagtatacttttttaattaatgggcgccctaaaggtcgagtggttccaacaagaggattacgataggggtcctttatctccttatttatttctcttctgtgcaaaatcattatcttcgttgttctctcatgcagaagccaaatctgaactgatggggtttaggtgttcgagagcgggacctcgtgttactcacttgttctttgtagatgatagtcttatgtttgctagggctaatgggagtgatactgaaactataaagcatatccttctaacttatgaggctccctctagtcagaagattaactttgagaagtcagttatcacttttagtctgaatgtgcaacaggtggataaagatggagttctgagggtattggggttaacatcagtggctagtcatgataagtacctgggggattacctacagtgattagtcgaaacaaaaagagggcgtttgaggggatctgtgagaaggttaggaagcatgtgatttctttttcagctggtgggagagaagtacttatcaaatctattcttcaagctatttcaacttatatgatgagtgtctttaaactcccgacaaaaacttgtgaattctgtcaccacatatgcgcaacaagtctggccaccacagctggacaacttgacatgagcaccccagtggatccaagtggcaggcccatgcctccagcagcaaatctaccattggcgcctcacactgaaggaaggacctcttggatatattttaccaggatctannnnnnnnnnnnnnnnnnnnnnattaacatcctaatatgaatactaaaacaat

SEQ ID NO: 110741 - DNA, 4478 bp, Cannabis sativa
  modified_base (512)..(522): a, c, t, g, unknown or other
agagagagagagagagaggttgatcagggataacatgatgcgtgtctggtgggttccatcggcgacgacatttggttgtagagctcaccgaggcaaaaagagagggaggcatagagatgaaatcgttttagggttttttaggaagaaagagaaggtatttttttttatgggaaatataagtttttttagtttttatttattatatttataaattcttaaataaattttataatatttaaataactaaattattaaattttatgtggatcaataaaattgtgtcatgtatacactacatgtgtacaatctaacattatacataacaactaaatttagatgaaaattaaaagggcattttttcatttttacacttcaaaacagtttttttttttttcgaaattttacatagaaaccccaattgcaactagcgctgcaacttaaattgcaataaaaaatcgtataaaaacccctattgcaactagcgctgtaaccactttagaaacccaaaccgnnnnnnnnnnnaaaaaaattaaaaaaaataacatatgggataattccccaaattaaaattgctaacaatatcgtaattttaggggttttgctgcaaaaattgagtcataaggattaagtacaaataaagtgaaagtattagtagttttgccacaattaactttttttttttaatataattatatgttatgttttaaagggtagaagatatattttgtttaatttttttgtttatctttttcttagaatcactctctccttcttttctcccccttctcctctccttccattgttctctcctttctaccaaacatatagtaaattttgctctcattttactttcttccctaaaatttatttttattgttacctctaccaacataggagtagggctacaacctacaatcatccttacatatttttgtgtctatggggtagttaaagaaagttaaaaataattgtaccatcttttcaaaatattacaacttatatttaatttgcacctctcctattaacaaaaaaactcattaaataataacaaaaaaaattatttttcttgaaaaaaaagaaaaaaaaaatatttaacacacaaaaaaaaaataaaaaaataaaaagaattatttccttcctctctctcgttcgtacacaaaattgattcgtttgttcccatcttggggagtgatgaaggcactttaccagaccgtttcatttcgatatttccatttataccctccattcaaaaccaacattcattccaaaaaagagtctggtcaatgagggtaatctagtaatttcgctaatctggttcactctcccctagtgaccagtgctgcgattactctaaggctgctcatgcaaaataaaccatttccctctctttctcttctctctctctctctctctagaaatatacagagaaaaaacggcacctgaaactacgaacagcgcggtcattttcgtctcacggtacgccaatttcatctcaaagttggagaaaaaggatttttgtttcgtttagcttagctcgctcaaatccattttgttcttcatttttttggggttttattagggtttaagaatcatgtgtttggacggctcggggagtggaaattttcgtctgtaatgctttttgtgtttttgcattttctttcttggtgatttgttgtcgaggaaatgaaactgaaacaacattgatagcgaaaccagtggtaaaatggctttttgtttttgtttttgtttatttggatggagccttttagtttaattttgcgattctgaggttaaggattttttcactgatcttgcatttttcagtttcattttctctttaaccaaacagagatgttgtttctttcttttcacgctaaatgtctttttgtttgcagggatttgaagttggggtagtgcatttgctcctagttaacttttgaggtaaatgtcgaataagaactctgatgattttgctccttttttttcacctttccctctttgcatgtttatttttaggctttgtttagaattctgattgattttttttttttgtgagagaaaatatacaggaaagttgttttgccaaaattatatgataagactttatttttattttttatatttttaagaaaatatctgttctcttttttcatatatttatagttgctcctattgaaaaagaagaaaaagaaaaagaaatatatgtttataattgttataaattttataaaattatatttgatttctctgtatttttttttttacctaagcgctttctcagttgagaaagatgaaaggaaatttagttttttctcttcttctttattgttttattagtttttatattttggggctatataacacatcttattagaaaatacgattatgtattatggagttatgaaccaaatacattgtactatcttgccttgcagtaaatgtttttcttttgttaatatgttttctttgaattgattttactttgtgttattagatatggaggaagccgccgagttctcagatatttctgatggagagattattggtatcaaatttagtttggcaagtcacaaggaaattgtgagtcaagagcagttcactagttttttatttccattttttacatttgattggtttataatagaactttctttgttctaatattaaatattgattaccatttttttgggtgtagtgtacagcatctgttagtgggtcctctattactcatgccagtcagcttacaaatccctaccttggtcttcctcttgaatttggaagatgtgagtcgtgtggcacttctgaagctggaagttgtgaaggtgtgtaatgatttattctcattcttgtctttctgaccttctgttaacagaaaaggtttcaaaagaataaaatgatgcagttgataagtttagtttgacatgtttaccatgtcttagaagagaaagttcgtgcacaagtgacagatgataattttatagcatattttgcaaaagtatcttagtacattatgtattgttcaggtcattttggatatatcgagttaccagtagcgatatatcatcccagccatgttagcgaattgaggcgtatgttgaatttattgtgcttgaagtgcttaaaactgaaaaagaacaaggtaatacacaaatttgttttttttttttcctgttatttgcatgtttcttgtatgttgattgtaagattttatttttattattacatgattaaactgttgagtaaaaaagtaattttgtgaaatagcctcttttttttttgttattgcttcgttttgataccgaaaaatcaaaatacacagaaggttaagtggcaaaaactgtagtagaattttgttaggttcataagtcttacaagtgcatattttgctgtacttttggtactccagtcatgagcagttgtcctgggctctttcatcttatatatacatgtaattttttgcaaaattaattgtttctgtgattatattgtacatgctttaatcttactggattgatgctttacagtctcctgcgaagaatgttggtattgccgagcagctattgggttcgtgttgtccggtgcgtacaagtggttgaatttacttttctacttgttttgataaaaaaatgctataattgcctgttctaaacaggtttcaagattcaatttactttactactttgggagatacaaatgctatagatacatgtcataaactgtttttaagaggttcttggttattggagtaaattagtttcaatttaagaagtgtattaacttactactctttcttcacctttcataacttttatctttttctgtctttttttttttaaacaatgttggagacaaatcatctacaaatttgtattgcggatgtcttacttgagacgttcagatgtgtctgatcttaggggtgtcttactatcagtaactcatcgatactttcttcaaatgttttttaactgcgttttcatcttgagcaggaagccacacaagtctcagtcaatgacatatataaagatggatattggtacttacaattgaaggtaccatctaagaaaagagttcccgatgggttttggaaatttttagaaagatatggttatcggtatgggggttctcttactgaggatcttccaaaacgcactttgctccctgacgaggtttgttcctgttctaatattatgtgttctttgcttctgttatttaggtctagtttttgcttgtgtatgtaaagggttcacctttcatgttccattaagtttttttgagataatgtcgggtccgtgagggccttcctcagtgattctgctaatcctatgcatttttctgcagcaatgatgttattgcattgaagagccttattagaagtattatttcatttgtaccttaagaacagcttgtatatatttataagtaacgaagttgtattgttttttttaacaccatcttttgtattctctctctctctctct

SEQ ID NO: 110742 - DNA, 6459 bp, Cannabis sativa
  modified_base (6428)..(6430): a, c, t, g, unknown or other
aaataatttccaacaaaaacatcctaccaaacaccaacggtcgttaatttcagagagatcctctaggacctctactgattcgtcaagcaacatataaccatttgcatcgccatcaattgtaaccgagacttgatgattttttatatttaccttaagaaagtgttacgaagccatactagcaaagccaaaagaaacataaaaaaaaaatgctcacaaacaactcaaatcaaactacacatattatgtcaaaagacaagacacatccaaaaattacgttgttcaatactctagttgacaatctttactaaatttaattggtaacaaaataaagagaaagagaaagataaaaaaaaataaccttaatggtagtaagaaccagggtatttaattgacatagtttaatttttttatttttaaaaaataactatattgatttggtttggttttatttcaaaaaaaaaaaaaaaatctttataagataattttttttttttttttttgaaattagcgtgatgtcattaaaacaaaatagaactagacctcatggtcattacataaaaggttctccggtaacatagagaccgggatagatccaaacatttgatgagcaaaagcccatctagccacattgtgagcggcaaaattacaagttcgatcaataaaagaaaaattacagctaataaaggagtgaaaagacttagtacaaaatgaaacgtaattttcaagcgccttaaactaatgtataagataattttgtttgaataattaaatataaatatttgaaatagaaaaccttccttgtattaagaagaaagaaaaaaccttgctatataagtatttaatagttcagtgtacctgtgcatataattattgctcatcttgaaaatattaaaacaaaaaaaatataaagaaattaattaaattggatgacacctcacaaaaaattgagagggagaaaagaagcggtaaagatagagatgaaaaaaattgaaaaatgaaattatgccgccgaagacaaaaaaaaacagcattaaaagctgaccaaatattaaccgttggattagacactcacccaaccattgatttacacgaacattcttggatttttactaaaatacccctctcatagcatgcctatcttctagcatagctgacgaaatcgtaaggacagaattggaagctgatgatactactaacgcagacaaaaagtttcacttaacagatattattcacctgaaattactaaaataccctcaccacatatttaaactcaatctgacctagtttacgaatcgtaggggtattatcgtcatttacgaagtttccagatcctgttgagtggaaaaagccttttaccttgttcgaggtctcgcttatggtctcgtctctctcactctctcactctctctcacttcaaaattttatttatttatttattttctctgaaaattgcatccatggatgttgccttctactactactgagaagtaaagcttagggcttttggtttttcaccatctccagaggtataatttctctttaattttcgaaatgagaagaaaataaaattaaaaaaccctaattttctaaaaataaattctatatataataagctcttgttcttgtgctgaaagattttatttttccattttcttttttattattaattttatttttttcttaaatgagttattttctcgttctcggtgtgtttgttctagcttgctagtctatgagggaattttaggttttttcttggttgctgagaaaatggaggtgaaaattagtactacttatatgctaattgattaggggcaaaacttttccacggaaggtgaccgttgggttgactgtttttatgtgcttaggtcattttctttatttattttttcaaaaacgagttctaaaatcttaattcttaaaattcgagaatctttttctttttctgattttttttcctgcctgaagatagattgtattaggttttgtttggtttgttggaaaatgtttaggggaaaggcattagtcttagacaattgttatactttactcgattttgtttaattaatgcagccgggttttattgttatatttttttgtagatttcttttatatctggttttattatgcattttcaggtacatgctttatttttttcttgaatattaataatatatatttttttaattatggaatttgtcataaagccattgtaaaagatcttgattggaaaaatgcttcaggtaatgatttttatatttatataaggtggttttactaaaatggcgtcacaagaaagcccatatttaactgttgcatttaaatttcaatgtttgcctctatttaaaaagaaaaagaaaaatgtttggcggccttacaatattctgatgaattactattttcattctcttcttaatatttgttttatatttttattgtcactcttcttagatttatcacattttatggcctataatttttagtttttgtatttttacttttgttctagcgtatttattgaggttttgttctgcaggacttcatttacagagaactaccgagctttgtcttgtattttattattaggatcccttggcataaatatctagttaggaatccagctctcttctttttgacaatctccctttgcctatatttcccttcctttcagcattgtcgaatttaattttgttgtcacattgaataaatggacacatttccacaaccagcagcaccgccaccgccaccatcacaatcactgctcactggcgctgctgctacaggcatcgctgctcccatcatcactggccatgcagctcccatccctttcactgcccctggttttacagttaacagtactgtgaataccattcctttcagtggttatgcagaagctcaaagtaccttaaatcactctgttgctaatccctctccaaaccctggtgtcgttcctggacatggtttatctgcggtcccaagtcatcctccatatgctgaggtgtgcatctactttaaaatttaattaaaaaaatgttataccttttctgcatctctggatatgaagatctaatcctattattatttaaatccagtgaaataactttattcttctgtcagatgatatttgcagcaatcggggcactaaaagagaaaaatgggtctagcaaaaaggccatagccaagtacattgagcaagcatatactggtctgccacctactcacccgtccctattggcaaatcatctcaagcgtttgaaaaacagtggtcttcttgctatgatcaagaagtcttatattctccccaccgattcttcagttgctgctgcaactgctgctgcaacagcttcacctcttcctagccctggatctcatagaggccgaggacgtcctcccaaggccaagcctgatcccaatgccctgcctgccgtgcagcctaatacacaacctattacccagcccgctgttcaattcaatggccacactgaccagccggctgctcagtccagttctcagccagtgctggttgctcttgggctcgttgacgatcccaatccttcgtcagtcaagaaaaggcctggacgtccaaaaaagggcatttcagctggggttgtagcacaaggtagtcctgtaggacaaggtactcctggatccctgaaaaggggacggggtcgtccaccaggttctaaaggtaaaatgtctgggcctagattgtctaagaagagcccagggcgtcctccaaagcctaaatctgtttcggcagtccaaggaccaaagagggggcctggacgtccatcaaaagcagagcctaagacaatgatcattccatatgctagtaatgagcctattgttaatgaagttgatcataacaatactcctactgtattatctgtacctcctagatccagggggcgaccaaagaggtttgcagatgctgctggtagccctgctagttttagaagcttgtcaggtaggcgtcgtggccgaccatctaaggttgctggcatcagtaaattgaacaattcttctggcaggcctgtgggccggccaaaaaaggtatgtatctatttatttgaatccttaaaagcaaattttttggttattttttcccacttgtagactggttatccagattgatactcaagtcaattttgtttgcactagatatagtaatggatttaaaagtcaagtatatatagagagattaaaattattgttcaagctaaatttgctcatagaatttctttagtgcctaattttagtaagtagatttttttcttttccctctctctgaatatgttgtgtaaatctataaatttgtaaaacataaattggattaaaatcagtatgctgtctaaaggcctgatgatgttttttcttttcttttttccattttgaaactgaccatttgtttggttataagattaaattttaatagtattctatttcatttttttaaaagctgtataatatacagttgtaaaatatattaggatgaagttctgctttgagaactaaagaatttatgagttaaggtgtataatatacagctgtaaatatattagttgatgcattaatgatgaaataatactgaatgttttatatcaatgtacattcattttgatctgaacttaccctcacttgtctgtgtttgtcatgatattggggtaaagagcacaattgtggcaactgaattgctggtggctgcaaatgcggatctgaagcgaaaatttgaatttgttgtaagttgagcaattgtttgggcatttttcttagccccttttattaatgcaatgccataaggtggtgattgtgttgtaatatcatggtgtttttgcagcaaacaaaaatcaagcaaactgttggcatgctaaagcctaacttatctcatgaaagtcctgctactttaattgcggcagtacaagaactagaagagctcgctgtgctagatgtcaatgctcccttaagagaagaagttcaacagcctctgtgagaaacctaagattctcgttgtgaagatcgaaagaacatttgcaggcgcaccaaagtgaaggaatctgtaaagcaaataggagggtagcaaaactaaccgtctctttcggtgatgacttttgcacattatgtctgttgtctgtacaattagaatttgttattagtgacttgctttctctttctctatctgtctcttttcatctttgattgttatttttatctagttttagaacgtatttgataagatgtctgaactacatgatcacaagctaataatgtcatgtttgtgaaatgttgttaagcttggctaaaatctctgctcttgcgttttatggcaagaggttaaattatgggtttgcagtcatgctcttttttattatttattattattattattattttaatttttgatgggattggaggcatacttttatatgaatgatgattgatgatgcattgtccaggagtaaaagattgatacttgattttgttttaactcacttaattgacttatccaataaatcaattaatatggattaggttttgtgtgtgctttactgcttttgtaactctaaggtcctttgttgcattggactaatgtttgggattggattaggttgtccaattctatgtttgcttctattttgggaatggaataattttgtccacactccccacaattgttccttggattaaaatagtgtattttttttttaactattatttaatttctagttcttttatatttattttatattgcacataaaccttaataataatatatatttttaatttttattaattgtcttatttcatttatgaatataaagtattgtttaatagtgtttattttattaaatagtatataattatattaaaaaaaaaaactatttatacctagtatcttgctaattgtaatgaagagtgttatgatctaattgtaatgaagagtgttatgatcttgcatttatcctaaagtagcttgcgaattttgtagtttggtgttatcacctattgtcctttaaggatttctagtagattgattttcaatattaggggaagtttgctcagttcaagtactggtggttctagcttcttgcatgcccgaagtgaacttggtcagagggattgtcactcttgattaaggacccatcggaggttgaggaatagtatggtcgagatctgaccttactagatctcttcgatttgcaggaatttgcacattaggatttatgaccatcggatcagtcgtatcattgggattacccctccttgtagttacaaccatcttggcgtgtcttgaaaagacttaaaacaaaagttgtattcttttcctctcaatgaaaacactaaaatattaatctcgtatttagccaacgataatgttggatatttattttaccaggattttagatcaactcacaagtatgttgtttaannncctaaatatgaactttctaaaacgctaaa

SEQ ID NO: 110743 - DNA, 9367 bp, Cannabis sativa
  modified_base (9256)..(9286): a, c, t, g, unknown or other
aaagtaaaaaataccgcctaacagtatttttgtaaaaaaatagcaaaagttagtatatcatgtaaattttcctttatttaatgttttaaatttaaatttttttaaattagatgagatctatttaatattttaaattcaatattcattgaattggataacatctattcaatctaaaaaaaataataataatgattacataagtaaaatttcatgtatataatatacattttaaatataaaaatatcaaattactcagaaccaaataaaatattaattaattcaatttgattttgggatactttttcacactatccaatccaattaaatatttaaaaaagtctgattcaatcataattggatatctaatatttaatggtttgttgtaattggattaattgatttatgttcatcctttgattacattatgaacagataattttgggggataattattgagattatttcaaaaatacaccaaattaaccaaatatttacgtttttatagaattatagcagtttttacatttttacggaatttttttcttatagatcgttgcttttaagtattttaaaaaaactgttatttacatgttgcagaaatataatataacgttgtaacaatatgaaaataacgttaaaaagtacaaatcagtaaaaatatgaataataaaatttgtaaaaatgtaaaaaaaaaaaactatttttaagtgtattatgtaaattttctataattatattgtagacatacccctcctactcctcgacgggctcgagtggacgagttgtcaccatttatagatgaggctttgtactttctaatacccaatataccatgcttgataattataggcaaaaaatgtctttctcaacaatatgagaaagggtagagtggaaagcccttgtaaattggttcagtataatttgagattattactcaatacgagtttatatttaactatataattagaggttattaagatactattgcaagaaaaaaggttatctatgactatgactatgaaatgtgaatatctgtttgttgaatatgatatggggtattttcctggacatgaaaagtgacatgaattatttttttctaaaattaaataataatataattttttttattcaagtctaaaacttagaatattacagaattttttttaattaaaatggaccctttaatagtctagtggtggtgcaaaaaagtttgatttttttttaaagtgaaaatcgatattttaacaattgtgccataaaaatagaaataaataaataaaaagatgtttgacgacactgccaaaaatgatgattttgcgataatttgtgataaaatttgattttgcgatgtttaacgacgttatcatattaatatctatatatatatgacaacataatgaagattgatatctaaataattaagattttactaagtttttatacactagtttaaggttctacctattttgattttgaatgtgtaaatctcgatgaaaaaagtttcaaaactaaaaacaaatcacctcaaattaacatctaagtaaaatgatatcaccgaaaatttaacaaatttcatcgcaaaaacatcgttttccattgtttttgcgtttttatgaaagattttagaccattgttaagtgataaattttttttgaaggaatattgttaagtgatttatgatttactcttgctttttttttttctttttttccatgcaatcaagttctcacaccatctcaaagtatcaattttaataacaaaatttatatatttctatttttcagaatttcgggtggggaaaaattaaacaaataaaaccaaaaacgtaacgtagtgctcaccattatgaattagggttttaagtaactattatatgtgggtttaatagtcatagattttgaatcatgaaaaaaaagaacaaaaaaaaaaaaaaattggtgatgggcatgcgtatttcaatagttcaacagtaatggagcatttattgtatgtattgttggaaggcatatttttgtaatcattatattaaagctttgctatttcatttgttcttgacaaatatcatagtgatgggtcagaatatgtgtcttttgcattataggaaatttcttttttgacaatagatgtgattgaatgcacaaaaccatgacgaattatagagtttcatctcaaaaacaaatcgataatagatggagttgctcttataaatagttcaacatttttacatttgtgggacaatatatttagtctataattaatagttcttatttatattacacctcacttgctacatacaagtctcattaggtatttttaagaaagaggcaaaccaaaatcaacaaatccattcatgatttctaggacaaagctagagttagaaaggacaacgaagcagaaggcacatataaattgacaaagtgtttcaattaattgaagcaggtaataataccaaaaacacttctcttcattatccgtgacatgtacatatataacatatatatatatataattatataataggggattctggagtcaaaaagagtagtagagatgacaaatattggacatagtcttattacccttaaccccatgcatgttaggtgtgtatatacagaggagttggtagtagtggttgatttgatgccttaatttgttgctccctctataaattctacaactaattgaccaatctcaaagtaaagcaactaatagcttttactacaaacttcaagcatttgagtcatctcatctattaattgtctatccatccatggctaataatttattctccaaagtaacactacttggtcttatggtcatggtcatcacatttctgtcagccacactcaaccaagctcacccggccaccggggcgggtggtttcaacttcggttggggtggaggagaaggagtaggaggaatatcaggagggtattttggtcttttccctgaatactatcagtcttcatgtcctcaagttgatgacattgtcgtctctgtcttggagaaggccattgcaagggagcctaggatggctgcttctttgcttcgtcttcatttccatgactgctttgttcaggtacctaattaattacaatatttaataattcattttcatgtgtagtacgtactaaattactaatgtaacatataaatctataaacagggttgtgatgcttcggtactattggacgatagtgcaaccataggtagtgagaaaaggtcagtaccaaacaagaattccataagaggattcgaagtgatcgatgagattaaggttaagttggaagaagcatgtcctcacactgtctcttgtgctgacattcttgctcttgctgctcgcgcttccactgtactagtaagttaattaattagtaacatttattttattctttgatgaatattaatgatctagctaatgttgttttattttgatttggataatgaaacagagcggtggacccaattgggtgttgccattaggaaggagggattcaagaactgccagtctaagaggtgcaaacaaaaacattcccccaccaaactccactctccaaaaccttgtcactttctttaaacgtcaaggtcttgatgaagtagaccttgttgctctctcaggtattaatttattaattacaacattaatttcaaataataattctctttattaattaataattatatatataaatatataggtgcacacacaattggggtggcaaggtgtacatccttcaagcaaagactgtacaaccaaaacgggaacaatggccaaccagatgcaagtcttgagaagagctattattatggtttgaaatcagtctgtccaaaatcaggtggtgacaataatatatctcctttggattttgcttctcctgttaggtttgacaacacttacttcaagctcatattgtgggggaaagggcttcttacttctgatcaagtgctttggagtgggaatgataagaacaccatgcaacttgttaagagttatgcttccaacgaaggacttttctttcaacattttgcaaaatccatggttaagatgggcaacattactcctttgactggattcaatggtgaagttaggaagaattgtcgtatagttaattaattaatacctaacaaacaaaaggaagagagaatgaaaagaaaagatgatcagtactactgtgtttattcaagtctattgtgtttgtacgtactactatgttaaatttttatgtttaccaagtaatgaattgagtttccaaaagtaattaattaaagtttgcctttaatctttctttctttctttttttatttgtttatggatacttttattatatgtttttacatgggacaaagtaactttgacaaatatgcacgttgttgtgcttacctaaagagagaataactgaagaattaagtacttaataagaagcgttttatatatgtattatgtattactttttatttttgtccaccaaaatgatatatatttttttggggttgggaataaagcaagaattcgtgcaagaaagggtaaagtatctaatgttacattcttttctgtgttgatggtctactaactttccagaaacatgaaattcttttccaacctaaaaataaaataaaatgttcttttccagtttgcctttgcttcttgtttctttctctcttttattctccctattttttttttatttttcctcttgtttttgctttcattaaaaactttctcactccttaattaattacgctactttccacttttttcaaattatttgtccacctgtaacgataaagcagaacctttaaaaagaccatcttccatacacattataacttttattattaattttcactttaatccatttttagttacactaataatttgtgatcagaataactaagaaaataattagtaattaactcttgagatttttaattaacaatttttttttttcgataaaacaaaatcttgagtaagaagtaagtaaagccaagcctagtgtgcgtaatttagaagcccaaaactgaaatataagatccaaagcccaatcacattaagcccattactggccatggcggtaacgacactaatccaacagtctcctctctcctctcctctacaaaaatggtgaagcttgatggatcttcatcactaacttcacactactactaggactagctgccagtacagatcggagaagcagcagagcagtatgagatttctgaaaaggtgttaatggttatgattttttaataactgatgtgagctaagagccaagtaagagaaggaaaacaataaagtttgtttgaagattaatggctaaacataatagtagtaacagtcataatgcctggatggggatccagaagaagaggtgggcgatgatgattttagcgttgttttctctttcgacggcgattgttttcctcatgagaacagcgttcgattcatgcagtgtccccaaaggcggaggcaatggttttggaagtcctggagtaattgagaagagagatattgtggttcactcagaactaaatccactggaattcatgaaatccaagctcgttcttttggtttctcatgagctttctctctccggtacacttttctttcgtattaatcttatattatagttttctttttctttttcatatggttctgttctcggaaattggaaaagaatgaaaagttaaaaccccaaaagaaagtttaaagaaattaaaagtgctacaatgtgattgggtggctttctttttctaatgtgtcttctttctttctcttaatctcaacttttttccttttttcttttcccttctcaaaaaatatgaaacaggagggccattgttactgatggaattggcgtttctattaagaaaagttggagcagaagttgtttggattactaaccagaaacagggggaatctgatgatgtgatttacagtctcgagcggaagatgcttaaccgaggagtacaggttgagcatctttattacgtacttaatttcatcttcaaaattggcttttattcttcttatttttcttcccctctaaaatgttgcagttaattatcattcattagattcatatgaaatttggaactttggggcaatgctgactactttatttttatttttattattattattaaatttaaagtaaagctctgttttttcctttcacttaatcttcatcaaaaattggataaagctttctttatgccattatttttgtttaaaggctttgaattttagtactgggtcataggcactaatgtaaaatttctggaattcctctttttcttttccttttaatatgtaagtagtagtcttctaatttttaattaaactgggaattccaggtcttctctgcaaagggccaaaaagctatagacacagctcttaaagctgatttagttgttctaaacacagctgttgctgggaaatggctggattcggttctaaaggaaaatgttcatcacgttcttccaaaggttttgtggtggattcatgagatgcgagggcattatttcaaagtggagtatgttaagcatctcccttttgttgcaggtgccatgattgactcacatgcaactacagaatactggaaaaacagaaccaaggaacgattggggtatgcttcttacgcattgaaatttcatataacatatatggtcaaggccattttcatgttatttttatgatgatgtatgtgtttcaattttgtggtctgtagaattgcaatgccgaaaacctatgttgtacacttggggaatagcaaagaactgatggaaattgctgaagatagcgtgtctagaagagttcttcgtgagcacattcgagagtctattggagttcggagtgatgatctactctttgccatcataaatagtatgtaatccttgtcaaaatattactcttttccagcttcaacctgtctgatttaaattgaaataatttgtgcttttctctttttcgtttcccttttgtttcacactttatacctttcttattttgctacttcgattttttcagattgaagtttgaacaaaccaactatgatcttttgggcttttgtgccaattttagtagccttttgtgttctgactaattctttcttttaaagaggattaatggatgatgatgatccatgttattttttgttattgtggttgattatccatgcataattaaggcagattctatgttcttgggctctttctcttttgttgaatattctctaattgtaataagttggcaagttcttgttctcccaactgttctccagttattcatcaaaattagctaacagtttggcatcttttgaaactttatgttatatccttgattgtattttattttaattgttatattaatgagccttggatatcttctaattataggtgtttcacgaggaaaaggacaggatctatttcttcgggcattttatgaaagtctgcaagtgattaaagagaagaaattgcaggtgccaacgatgcatgctgttgtagtgggaagtgacatgaatgctcaaacgaagttcgaaacagaattacgtacatttgtgtcggagaaaaatattcaggacagagttcactttgtaaataaaaccctgaccgttgctccttaccttgctgcaattgatgttcttgttcagaactctcaggtattgttatacatggcgtttgtcaaggttcatttgtatattttggatgccttacctgtatatgattattcattttgttctatattacaattgagcatatgaagcttaaatctttttcgtgtgtaggcccggggagaatgttttggaagaataaccattgaagcaatggcttttcagctgcctgtattggtatgtcctttaccacattggcctcctttttttatatctaatttaccttttttctagatccagtgtacttggagtttggtaatttagtgatttttcgaaatgagatgtttgatagtgatgttactaatctgatcggatccaaaaccagaggagcactggaacagagaaattatagaccaaagaaaggattatattgctgaaattgaaaggaaatacagaaagtgataattcaggttcttcaaggtgacgtggagactttccaagagctcaaagctaaccacgaatcagtcacacttttcctactcctttcctaacccaccccacatttatataatattctaaccacccaaatactcatgctaacaacccagtaaatcccacacgtgaaagctatcctactacaaccaattcctaacataatcattatgtgatctctttctctctctctttgttacacacagaattagacatctcatgaatttatggcctgttttggctatttctttagctgatctatcacccaaaaaaacctgcacaagaaagacactttgctgtctcatctctggcttttgttgggctgatacaacttggattaccatgcacagtaggaaaatctagagacatcaggtgtcttaagacgattctatgttatctaaatttgtttctaaagagagacgataagggtcagctaaattaaggaaggataattgccatcctttagaagaaacttttttgtattgtctatgtagatttgttttccaactaataatagtcttctttcttttctttcgttcctttttgacaatatttcagggaacggcggctggaggaacaatggagattgttgagaacgggacaacagggctgttgcatcctgctggtaaagaaggtgtgattccacttgcgcgaaacatggtgatgatggcgacacatatagagagaaggctgacgatgggcaatcaaggatatgagagggtgaaggagaggttcttggaaccccacatggcacatagaattgcttttgttttgaaggacattttaagcaactcaaaaccagtcactagcacttagttctcccactttcaaacatggaacttaaagtagtagcactatctgcaagtaaagaatgaggcaatgcctctttttttattgcatttatttttgtatcataataaagataagataaaagatatagcgagaggaaatttggtaaatgtaaaatgagtagttgtcttgtgagaatgtaagtcatctaccctctttttaataggatggtgttataagggtagcttaagagtttttaaatacttaaacaaatacgacttacattttctctttttgacaataactgttattttttaattctacaaacaaaagaatgaagataggaggcgtttggttgggaggannnnnnnnnnnnnnnnnnnnnnnnnnnnnnnaatgggaataggaatggaataaaatttaaaatggataaaaaaaattgataaaataataattaaattttttttcttgttaca

SEQ ID NO: 110744 - DNA, 7632 bp, Cannabis sativa
  modified_base (2073)..(2083): a, c, t, g, unknown or other
tgttttgtagtagtgatatataaaaaaaaaaaaaaaaaactcatatatataataataattaaaaatctatatttagttatattctaaatattttccctatatatttgcaaagtaaaatatttccatatattatgtggtattttcgtttttccttattgtaaagaggtttgatacaaataaaaaatttctacatttaaaatagtgggaaagaaattaaaaatgaaaattttggctaaaatttgtatcaaaataaattatcatggcacgatagtccaattaattcttcttaattattataatcattgaaattaatcaattaaattcaaagtgacacaataattaagcaaaaattaggttgtggtagctttattaatattcacatttgaccaatattaatattaatgcatatataataacaatattcaaaatatgacatttaatattgaagctataatttattattaattaagacaaccatcatctttttgaaatttccatatataatagttgttagaactcatacatatatatttttcacatatataaataataataaatatatatatagagtggtccataaaaatagaatattaattgtctaatttaaaatcagattttatgacatgaaaagcaaacatccctgtctcttttattaactctaacttcatcaaattataaagatagctagagtaaaagacttattgatattataaaaaaaataggtcccaattttagattaataataagaacaatttttaaattataattagttatatatttttttttaaaaaaaaattatatctctaataaaatatatacatatatagtttataaattttatttatgtacttttattctaaatgacaatacatgtatataaatattatatttatttaaaaataaactttatatattttcttatattttttttttaactttatatatataatgttttaataagaatgcaatttatttgctcctaatctatttttaaataaaagtattttatattgaaactagctaatttgctttcgttatggatagttatatataaagaaaacaatattaatggtttaaggtaattgctttcgaataattattacaattaaagtggaaaagaagttataattattagataatatatacattaattgggagaaaagcataaatatatatttatatatattaattggtgatgtgatcacattaatacacaaaaagttattatatagtataaatatatataaactactttacgcataagcatatggtatataataatttgataatataatatatattgatttgattatacaattataattcaaacactagttcgagtggccctaatttttttttttttagaaagtgcaaactattttaaataattttaaaaaataaaaatactcaagttattttaacttaatattgtaacaagtaaatgacattaatttaaaatatatattttcaatctaacctcatcatcattatttattaacctctttttaacccacatacattaatatatttatagaataataattaatcttatcaagtatcatgtttatagattgtgaaatcttttgggtttatccaaaaagaaaaacacaaaagaagaattttttttgacacactaatcccaataaaatgatacccactccttctacctccaaaaaaagccaaagagaaaacaaccaaaactatatattgaaactcgtgctcatttaactacatattcttttttaaaaaaatatatataaaaataaaaatgtattacaacttttctttttcttatatttatcaaacattctagtcattcaattaagctcagcacaaaatgtagatatagataatagatattcatgaaatctatatattttttttaaataattaagtttaatttttagttatagataaatatttaagtttaatttttaaaaataatatatttaaattaataataataattattcacatgttattattcacaatacttgtgattaaaattaaattagtgataatttgaatttaaatatgttttagtcacatgtaattttttgttgtgactaaaannnnnnnnnnntcacaaaaaatttatgttgtaactaaaagaattcactaaaaatagttttttttatagtgcgttattagagtaattaattatcgaggctcatataacttaaaaaaataacttttaaaaaatatcgttaatcaatcgtaagacgcctcttatacaaatgttagatattattagtacctaataataatattaattttgtattaaggagtattatcttaaataatcttttaatttagttatcatattatattataaatcattaataataattaaagcaattctaaacgtagaagttattacatgcatgaaatattatttgatgtttggtactatattccaaattaaagaaaaccacaagaattatatatgattagtgattttatttccatctagaataaatgccaagatcattttttttttaaaaaaaaataatcatatatatattattaatttgtattatcagtatatatatatatatataatgaggaggtacgtagtcaataatcaaaggtgattttgtcttcttcatattcctaatattaattcatattattattcattttctcttcttctcttttccattacttttactttacgttactataaaattccatatctttatttactaaattccaaatttgagtcccatcccatcccatcttaatctttttgcttttttttttttattattttattattgttgctgtttgatattatgacgtggcatagcaagagaatgacacgtagaaattcacgtatggtggttgaatttgttcgcgtgcatgtacattgggaatcgcaactccttcgtaattgccggaatttgagctcattccattgagcattcttattgggccagtggtgcctagcaccttctaaatgtgtcgatttgcaattaactagcgatactctataaaaattattatattaaactatatgggatccgatacttaattacaccaagtatttctccattccattaacactctctctatgagcattgctattagctaaggtgattcatactattcattagttagtgatagttttttaaaattatttttttaaattataagatattcgttatttaattatactaaaaatattatatctctttattattattattattattattattattatgactaattatctactcattattaaaacggacagtgtccaacaatagatgtattgtattgtatggactagtttagtagactatataaaaattatattgtatattaaataataaataatattatgtttagataaaataatatattgtattaattattacgaccaaaattttaatacaatgtcagctgtattatttaatatatacataacaaatgatatgtattaacttgtattataatctttataaaggattttggttcaacccctatctttgactcggactccagtcctaaacctagatctagaccaagaccccgaactcgagacctcggacccaagacctagacacggacacgggactaggttccggacacgggaccgagacccaagacccgagatcaggactcgaacttgggacttgagacccaaattcggacccgagacccagacctgacccctctaaccccgatattttaatatcacaaatgattttcccgctaaaataaaggttctaaaccaaccccgtgtgactctaatggtcaaactgtcgtattttctatcgttaccgaacaaaaatcacaaaaatattatatttcacttatgtcatatataatacagttaaagtttaatgaaatcttcgaaattgaaaaattataaccctaatgcatatttcttgaaaatatgacatattgtaaattaatcacatacaatcataaaatataaataattaatgctaattgtctctctaatccatatccttagtacgcggtcagtacactttccttcatccaacgcccctctttctttccttacagttgagttgataatcattagagatgggattcgattggtcgtagaaaagaaactttaaaacacttgtacgtatatcgtctcattttcttgttgcgattcagttaatcaattctaatcaaagaggttgtcgcgaggttaatggttttcctaaagacattggttctcttttgctaagtttgtttcaaatgataaatcaactgctacttggaatggtgccctatgctgctagtccttttgttgatttggacttgcctttcctctcataattgtttggttggcttaatggatatcttccatttcaaaaaaaaaaagacatgtaaaataggggtgacagttcatgttcgtaagtcgtgtttatgttatgttgaggtttaggtatattccaaacccaaacccaaacccgaccctatttattaattgtgtaaaaaactaaaacttaaactgaactcgtttataaacgggttgatctcactctgaccagtttaacctattgatataaagaatcatgcttaattttgatgaatttattaactcattaacacgtttataataagttcaacatgtttacaactttgttatgacatatttacgagcaatttaatatatttatgtcttatttaactaaaaaaaatataatttatatataataaatttaagagtgtatactcttacataggtcattatcgtgttattttcgagttaaacgtgttagcacaaaaatgatccgtttaataaataggttaatcgtatcaacccgaaaataacacaaactcatttaagccaaaactaaacacatttatacatttatttcgtgtaaatttcaaatcgtactactgtatctttcccaaattgcaatccctaattgtgaacaataaatcaaaaaacttcaaatatattttcggcactgtaaattatttgaaatctttaaaaaatttacagggataacgaacactcccgtgaaaaaaaaaattaaaaaatattccgacatgtatttcaagcatgaaggttgactaagagattgtaacagaaaattaacggtagcactcttctaaaaaaaataaaaaaaatgatctcttttctttttctttcaataaataataataataatataataaagactagtaaaactcatcaaaattcatacgaacctaacaagtctctccgaacaaatcatggaccgttgatagtgccacgtcggatggcttaatggaaaagcaagcaagctttggaggatggtcatagcagtgggccctaccacgtacctgtccaggaaacacggctctcttttgtgggacccactcattcattcatttatttaaatgaactaattatttctaataattttattgaaaaattaattatgtatttcaactccaaacattgagaactagctactcaattttcttgcatataccaccactaacttattataatttcacttattaatattaatattagttcttagcaaaataataatagtaataataatattacttaactaagaatacccttttaaaaaaaatcgaaaatactctgataaatttaaatatttgattgcacgtaatattgtaaaacgtgcatatcgtgttggttcgatttattttttgagcttttaaaaataaagattatgccggactataaaaaaatataggtcgtgctataaaaaattataggtcgtatcgtgccgtactaataatttatagggtaggcccatcatggccccacaaacccgataatttcgtaccgtgttcagaatcgtgtcgtactttattcagattggtccatttttcttaagcagaccaatttattttcttataggggcttaaattcgtgcgccatatttttatatttttattacaattgattgactaattattaaaatatatgtgtatattatagttttaattatttttatataattttttaacaataattacacacaatcatctaaaaaataattataattattaaaatttgaatattactatcattttaattgataactaaatatttgtcattgctattattatcaacaatttataaatttttttaatgtggcgtgctttcaaactaaactgtttgtatttacgtgtcatgctttcaggcttgtcttatcatgtcgtgtttaaactcaaatttttcgtaacatgtcgtgccaattcgcaaaaccttgctatatcgtgcctaagcctgtattttttttatgttgtgtcgtactgaaacacatattttcgtattgagtcctgctcttacctctcgtatcgtgtcaaaaaattcaccccacatttagagcactagttgcacatatacttattatttttcttcatatgtcattaaatattttgaatttcttttaggtgttgtaaatttcttaaaatatctataaaatattaattataatataatctatcatattaaataaatgagataaaaaaatttcaaatactaaaaacaaataatatgcgcccactaatactttaatagcttgcccattattgttatgcttgtttagttgtttccaatccaaaaaaatgcacaaaaatgggaattatataggagttaggtaattgaatcttaagaataaaataacaaaaatatatccactatttagagagttattattatttatttaaaaataaaataaaaattcttagagttcttaaactactccataatattattgggtaatgattatttttattagatattttttggtattttaatgaaatataacaaattaatgaggtgacataaaaaaaaataaaaaatacttatataatagtatgcaaaaattagtgcaaaattaatatcatataataaatgatattttttattcatgtttttataataattattttgattttatttattattttacattaattaagatttttaatgattatttagtatgttttcatagtttgaattttcttggttaatttatatcttttgtgctacactttaatacttttgtccataatgtctatagttttgttttttgaaaccaaaattgatggtatatataatataataggatttagttaaagtgaattaattatttttaaatatggtacttttcaaataatataagaaattatttgttttttaaaatagataaaatagaaaagtggttaaaaaatagtttaatattacaatgtttttattattttttttaatttggtgtgaactgataaagtttgactaaacgagggcttaaaagaaaagagtgaaaaaagttaaggatagatttgaaaattcaagaaaaagtaggactaaaagtcaaaataagtggaaaggcagagctgtcaatgtcatgaatacagccgccgacatggaaagccacgtcatctattattttataaataataaatatgtaattaattaattaataatgaaagcttctttttatttttcttgaatgttgaattaaatttcacttagttatgattaataataattaaaatagatggatttaatcatgattaataccataatgtggtgtgaccatataatatgagaaatgctaaagggcaccattggtgcctagcaccctcctacgtgtcaatatcgctattggtacaattaagtatcgggtc

SEQ ID NO: 110745 - DNA, 1427 bp, Cannabis sativa
gaatttttacttattggtaactttctattataggtaaaaaaaaaaatgtaaccacatggttacaataaaaatgtaaccattgaataatcacccttatttataaatatataactaaaccatttaatttaatgaaatatacatataagctttcaacacatgcaaaaactgaatgctcgtatagtatatattatataatgtaacttttttctttttttggaataattaatacatattaatattaatatatttgaggttcaatgtatgtaaagtgtaaacttgtattattattaaagtttagataaatatatataaatgaaaaaaggtccaggtgggtcgggttagactcgaacccgaccacatgtagaacgtcatgcaaacttgctcgttcaccttgaacgggttgaagctaaagttctgggcaagtctccagcgagaaatgggtacgaacttgaagttcagtacaactttctattctcagacagatggtcagtccgagaggacaatcaagatattagaagatatgttacgagcctgtgtgatagattttgaagactactggagtaagtatttgccactgataaaattttcatacaataatagctatcagagtaccatagggatggttccttacgaaatattgtatggtataaaatgtagatctctaattcactgggatgaaactggaaaacgaaagtatctgggtccagaatcagttcagcagactaatgagacattagagaagatcaaagtcaggatgcttgcctcccagagtaggaaaaagagttatgcagatttgaaacacagaaatatagagttttaggtaggagatcatgtattcttgcaggtttcttctatgaatggggttaaatatttcggaaagaagggcaagttatgtcctagatttacaaggccttttgagattctcgataaggttggattagttgcttatcgtctagccttgccttcagcattgccagtagttcataatgtattttatatttctatgctacagaaatacacctccatcccccacatatgttgagttatgagaagcaaccagtgaaaatccttgacagaaaagataaaatcctttggaattaaacaaagacgccaaaaggtctataacaagctactgttgtaattatatacatgctacattagttggaaatctcaatttcaattagtggtagccttatcaacaatagaagcagagttcatgacaataattgaagcattcaagaaagctgtttagatcaaatgaattttaaaagaaccgagtttgatgaaaggcaaggcaattatgtattcagatagtcaatctgtgtgagaggtattcaacctcttagccatgaaaacatgaacaagaaaacagaggaacaagaaagacaaagaaaggcagaggaaaagagagaaagagagaagagaga

SEQ ID NO: 110746 - DNA, 10917 bp, Cannabis sativa
  modified_base (10871)..(10878): a, c, t, g, unknown or other
aaaaaaaaagagagaaaaagttaaggtggatttttttaattgtcacagatgctgcgaataaagtatttgactatttcctcattgtttttctaaaccactattaatcttactggtacttgaatcttcatgtcagtgcactgtttgttttcattttctttaatgtgggactacttagaagttgtataatttttcaggttatcaagaaagaccatgttgctgctggactttgttgcgttcaattgttcttaaattctaatttgctagaggaggctattaaacatttggaacatgctaaggtataacctgttgttactcttggatatgtttttccttacgtagttacaagatgccctttgtttggtaaggtagaatggtgtaaagattccaggtttggtaaggggataggaatgttgtatatttttaggttgggaaagctgatttgtggactgataaaatttagaatctggaatagaactatgaggttgccttgatgcttcttggtgtagatcgttgctaaatcatcatgcttattgcaatcttatgaatagtatttctcttatgaatagtatttctcttatgaatagtattagggaagaacacgaaactcaagagaagattttttaaaagcaacaaataatattatatattcatctgtaaaacaatctttttgttgtagatgcatttcgatgaagggttgtcagctcgatataaaggtgattctactaagcttgtcacaaagggtgtcaggggaaaaagtgcatctgagaagcttactgaagaaggactcgtgaagttttctgctcgggtttcaattcaggtaaattggcatgaatcaaattttctgcctgtttattacgtagcttgctcattttctcatacatgctttcacaagttgggtgtgttctgtacttggccctgatctatctttataatgagatcaaaatgtccaagtttcacacatattccattggcttcctttttttccatgaattataacatcttcattcattcattggtttttatacattttcatgtggataacctgtaggtcgaagtagtgaagtcctacaatgatgttgatgggccacaatggctatactcactctttggtaacccaaatgaccccgagacattcaggtgtgccattcttattcaataaaccatttcgtcatacttgggagtatgggagccgtagagaaaatgatctcagtttatatttacatatcaatatttttattttatataaaccatataaggacattaatgtgagtgacttcagacccattattctagtaacaggcttatgtaagacaattccgaagattctgggtaattagattgagagaagtgttcgatgacacaatcttgtttagtcagggagtattttgtgaaggaaaacaaattgaaaagaaacaactgtatcttctatgtaatagagttggatgtgctacttattgggagaaataagtgattttttttttttaaataaaacaattcttgtgttaatgagaaaataaagcaaggctactgtagattagaaactgctgctaaagtagatttaccgcttcctttaaataaatactcttggctggaaactcttttctgccctcttagtttcattttgtttcttctttttgctttagtttgtatttttggcttttatcgaggatggtcagatagaagtttgtttcttataaaatataggaaaattctaaagtgcaccccttaaaaaggggtacaacagtgcagccccatcccatccccgttgtgtttttagaatgtaaattgttataatttagccgatatacattatttctgacatactataaatttttgggatttagatacgaagtctattgcttgtgtgctatttttgttttatacgcatgaaatagactatttgaacatgttttcaacattgtaaattataatgaatttttcaaaaatttacaagatgttctaactaactacattgtacaccatcatatggaaaaattaagattataactattcaaatatcgggaacatgaaaggatacaccttttattaaggggtgcactgtagaagtgtgatatgaggatatacggctttcatctgaaccaattaattaaacaggaactatgttttttaagaaatttaaggtttaacgtgcctacataatgtatatacaagaaaattctccccatatttcttctttttgagaggggctagtggagctggtgcacatatttcttttgttgctgttatttcttagtttgtggtactgttgctttagtatcttctttcctggtcacctaggttttctgagatattatgtaacgagatttatgtgttctttcctttgcaggaggagatgcaaaattgcagagactcttgtggaaaagaattttgacttggctttccaagtgatttatgaatttaaccttcctggtagcaaacaaagtttatgttatgttgattcaggttttttttatctcgtactgctcctactgtttctaaacctagtctcctctctttcattgtagctgtggatatatatgctggtgtagctgcatcacttgctgagagaaaaaaaggaagccagttgacagaattctttagaaacatcaaagggactattgatgatgatgattgggatcaggtaatatggaaactttaagtattgtggacaccattagctaaggtacaataacattttcgagttgatctagtaaatgaaatgattgcaaaagaatatttatccctttttcaaaaaaaaaaaaaaaagaagaatatttatcaacaggcctaaatgtgtagacatagaaattgtagtcaatcctttaaaagaaaataatatatcagtggctagcatgttgcttggaaccctgagttgttatgaggtattattaagcttagatgctcaaatttctcttctttttgatctaggctgaatgctaactgctattgcctcttgtttatgagcaattcttgtaaccatggttttcctctgccacaagtgaggactttcaatgtataacgggcagggacatgtctaagacaaggggttccttgctctttttcaaaaaaaatttcccttcaaataattcaactttttaatttttttcatggctatctgaagaaaatatatcatgacaaatatttgtatatggtaggcaagtaattgttttaatgagctgttttgctgaagttacccttgggctgtgtaggtactgggtgctgctattaatgtatatgctaacaaacacaaagaacgccctgatcgtctcattgacatgttgaccagtagccaccggtagggatctatatgctgttaactactgtacatattcttgtagaaattttacccaacagattcatggacacagtttatgcatagacacttcctttatacataagattggaagtgtataacacgggtcatggctgattggctagagagaccatttgataaacatgaacttttttttttttttgagataataaacatgaacttatgagagcagtatttgtcaatttttagatcaccaatttcggttattgatatgatagaaaatagatgagaattttctatgggaagggggagatttagtaggaggggaacatctggtttcatgggagctagtttttaagccaaagatgaaaggaggcctggggattggtacactggtagaaatagcacttttcttataaaatggctatggtgtcctttggcacaaggttataaagagtaagaacagaatttacgataatgtatgggatacaagattacaagattataaagagtgagtacagaattcacgataatgtttggggtacaagagtacaaggttatagagtaagtacagagttcacgatgatgtgcggtatacaagagagtaagtacagaattcacgatgatgtgcgggatacaagagtgggagataggttgtcttctagatgtcatgaagtgaagttcttttatgctccctctagtgtatcattttttttattattctcgctcaagtatatcgttcttattattagattacaaggtaaaataatgaagctacattcggtgttgttttcaatgtgcaggaaagttcttgcttgtgtggtttgtgggcgtctgaaaagtgcattccagattgcttctcgcagtggaagtgtagctgatgttcagtatgtagctcatcaggtattccttaatttctatcgctatcagttacttggatgtggttaggtctggtgattctgggcttacttgatggaggattctcgatgtcctatgtgaaatgtgacataatttgtgtttgattttggggctgtgcttttcgattcaatttgcaggcgttacatgcaaatgcactccctgtactagatatgtgtaaacagtggttggcccaatacatgtgatatgtttgttaactcaactacagatactgcaaactgcaagcaaggtaatgagaccactctcctactcagaatcagaagtttcaaactccatgattttaaatgagaacatttggctggatacacatagttataattactggttacaccaaactttaggggtgccattacagcttctgacatctggaattgctgacactgttctcaagcattgttcgctctgccaattgtaagtttaaacaatttgaagatgcttgatgattcctgacccatgtgggagctattcaagttaagactagggtcaactctaggctaaaacagttcatacacaagtttagattcacaattttatataaaaattatttaataaaattaaggaccctcaaatacaattatactgtccctgcttaagatcggtcgatcatcctgtagttgggacttggaagagcagatcaagtgcttgcggctgtagatagatgttcatggaaaaataaagggttgagatgtatatgtatttgcgtgattgttttcctttttctttttttgaggggtcccctgtatatatatatgtatttcctttctgcctaaacttgctttgtaaactatatgttaatagagaatttgctaaaagattagggaattatattatgtatttgcctaataaagaaaaaaaggaaaagaaaaggttgggttgggaggctcaagtggtcattgttttaagtttgtaatgcatgttaatattttagcaattttgtataaccattaaagaatgacttttaacttaatacataattttcctcttttttaaaccctgaatttttgtaaacaaccacacattagaaagaatactaacagtgagcaaaacagagtaataataataaaaaaaaaaaaaaaataaagatcggttgattttgtattaaaaaaattaatttacaaacttcattattgacgagattcttgatggtagcacatctgggcaatctctgccatttttctttggaaatcttacatcaaccaccggaagttgtggatttaattgtcaaaaatgacgatggtaattttcagtaccgcctaactctaactaatacccatattatgaatctgtttggcacagtttttacaaaagctaaaaactgtttaaactgttttttgaaaaagttgtaatataaaacaaaatactgccagacacttttttttgcttcattatattatctttctttttttttttttgtaaattttaaaaattatttttggccatgttattattcttttaactttaaaaaaatattattatgatctactcttcaatgtgaatattttaagatgtcggaaacatatatttttttgctattttttttttttaaaaaaattatttaattactaatataacgattagttattgttttataattattttaaatcttatttaacatttattttataattttgctaattgaattgtatcatattataagataacaaattagctttcaaaataacaaaaaagtatataaaataattggtatataaaaatggtagcttgctatattaaataacaactcattagtttcgaaaataatatttaaggttaattaaatgtattttaaattataagttatcataatataatttgaaaataacgaataattactattatgttacaaataagttttagaggtaactaaaatatatctcaaattatatgataaaaatgaaaaacgttagattaactaacgtgacacgtcagtaatagtagtaatgttattattgtaaattagatgcaaaaaatgtatattattgtaaatttttcttttttttttattcattcgtctttctctttctctgcatatcgagatcttcgactccagttgcttccctagccaaagctgccctggtcatacggctaccatgaggtgaatactctaattcatgtgcaatgttagaagatctctgacaaacgtgggaacatatggaattgggagctcagctaaccatgttttaatcattttttgttcgggccatcctttctctctcaaacttttttgccttttcttcttcgtgtattgacgctcacatttataagggccttttttttatcattattataagactataaaataagaattgaattaaagatagagaaatactaaggggtatcttaaggtgcaaaacgccacaagagataacatacaactatttgtataatttaatatcgagtcccacacatttaattagaaaatttgggtattcatacttaaattgtggccaaattaaacaaagacaaatcttttttttatcccctttaaaaaaatatgcacatttcccctaaatctaaaattacccctcccatcaaagtcctccctctaactcactttctctctctctctctctttgtttctcttcccttctctcctcgctttctcttctcttcatcacgcccagtcacccaaacccacattcccaccattttctccagtcgagtcaccacccgcaatgacccaacctacgacgatgaagacgtaccttttacgtttatttagttgtgtgttttgttaatttgttggtgaaaaaaatcagatatgcatttcttgtgcttttctcattttttctgtgtaaaattggataattctattcatgttcgatagttgctcggtaaaagtatttttagaggttagagatgaagtttcgatggtgttcgatagagaaaagttgtacgatatgatcgataatttcacaatatatgttcgataatatagattgttataagtttcgatcctatatgatacttgctcgatgtttgtccgattgttcatgatattttagaataaaattattttattatattgttcaatactcgtcgataactgttcgatatatacctttgaagaagttttttctgtattaattttattttgttttcaattgataggcaatactacaagaaactcctttactgtccctgttatcccaaaaatcatccaaatgacatggcatagaaagaggtgacacatggcttggtaaatgagtaattggacggttgttagctcatttaaagtcattcacactggacaacgtaataggaagtataatgtactatgttagaattgttgaatcaattagaacatcctaacatggtgaccgaatagtgtctagctagatgaccaaaaacaacctgcaataaactaacccatgaacatacttgattttccacaagaaagtcacaaggggattgactgattacccagactgcagatggagctgacttattctagatccacgaaatcagtccctaaatctctgaagatcaggtcattaagattgcctaaagacattaattgagtattttataattaatataatttattaacttgtaaagcctataaatagtggcttatttctttgaaatgggatccaaattttgattcaagaaagctcttatgctgtagaaaaaaccataattaccgaaacacttagcttttttaatgatatttcagttactaatataattgccgaaataagaactctttcatttatattgttttagccaagctctaaggaaattatcgtttcacttctaaatagttataaaagctttagattcgatatctatgattaatactcccactcaattgcactactaaattctcaagatgtaagtatgggctagtccgacgggtaagctggtaacgaaaaaatcaacccgtatatattataattaagctacaacttcaccatctcaggattgacttaagatcaactaagtgacattgacttagaaaaaatagtggtaagtgataatatcttttccactgtcaatatcagtttatttcaatgtatagccgatgcatttaatacaagtttactttgttaatgccctagaaaagatattccacttatacaagtgtaagcaaactacatcgctgattatcacatcagtataaatctagtgcactgataaatcttgggattaaatagttaagcatataatcatgattattttttactgtgttgataatactataatcatgagtaactatatgtttgagatttattagaatttgtatatattaaacatataatcatgaaaataacatgtaaaccaaacaacttgaaatgatttttgatattttattaattagtaaataaaattatattgaaatgagttttattagggcataaaatcctaacaaactcccacttgcactaatataaaactaaaagttcatttcaattattttcatcttcttgctgtccatatcaagtgtcatatgtagtattatctttataatagaatttgataggttatatttagtatcaaccttctccaccatcacatccttcttagtcacaaaatcattgatattgtgaaatttctatctatatgtttacttctcttagagttctagattcttcactatttgacaactacatctatgttattgtaaagtaatgttagtagttaacccacaactagaataacaccaaaaactgtataaaactttccttaagctgaataattgtctagtagattttggacccactttaatatccaatctcactggaagagttagagaccctagaaaggattttacacttctccaaaaagtactgtcccaccccagagtaatcaccatcttacaagtagacgttctagcgttgatgcaagtctagaaatttgagttagtgtagcctaaaaggtccaaagcaccacctttatatattaacatatagttcctcttttaatcttaagacttatacgattgtcttccaatgttcttatcctgaattaaatttgatacctactcataactcccactcaatagtagatttttggtgtagtgtataccggagcatacatgagacctctcactgttgatgcttaagaattatttcctttgcctttatattttgtagaatagttgaaactattcccaagattaaaaaaaaccctatatctggaagtctaatgacctcttttagagtgagccattgaataacacttctaaagtaagtttcttgcgaaggagtaagtaaattaccaggtataccaaaagtcgtaggttttgatgatctcatcaaacccataatactaggaacgggaagtttgcttaagttcattgaataaactgagcatagtttcccttcttgtccttgtatttgaaaaacttttgattgatccatgtgattggttaaataatagttatcttggcttcaagtcttagtttcatataaggaatattaattacttatttaaactaacaatgatctgccatcattagtgttatctaagtcataacagggtggattcttagaaactctctcactacgacgaggtactatgactttttgtctagaaatatcagtggtgttgtcttctttagttgtgacgacttacgttaatacaatagaggtagtgggaccatcttatatagtataagatgataaaacactttgggtttgaatcaaataatatattctcttctttgtaactttgtttttcagatttagtcatgttcttaaaaagtagtatttgttgaaacaaaaactttgttatcttaatgaccataggatggtcatcccataatcattttaaaatagctatcaataattcaaacctcaattaacagttttagcttttcttaagttcataattagggcatccctagatctattaatggtatacactaagtatatgaccattacattattctgaggttgtcttaggatcagacttagattgtaatgaccgcataattagattatagattagtaaggaaattaacattaattattaatatttaataattatatatgagtttatatttattatgggtcccatcttcagaattaggcattagagttgtagttttttaattttggaggttttattaaactctaaatgtattatttatgttatatgtaaaatttatagttttaatgatttttgctcgatgacgatagaaaatgcgacgaatggccaatttagtcacatgggttagtttagaatttttttatttagtggggtattcataaattgatatttaaaatatcggaatttggcagggttatggtattggaccattttactcctaagccatcttatcatttaagctcttaagggaggccattttaagtattttggttttgtggataggtggtttgttctctagttggcagctggccactaagggaaataagaaaatttagaattatctttattttagaaaattatgagataatcaaaggaaaagacaaaattagaaacctaagtcttgctctccctctctcttgcttcggctcaaccaaatcaggggaaaaacccagcttgtgatcagtaattcagaggttatttagcaagattcaaatggtgtaattcaaggtataaccctagcttcttcctttttagtttttgagagtttttggttttttttaagcatgcaaatgttatgtagtagttcttgttggatatattttaccannnnnnnnatttactaacaagtatgttttaacatcctaatatgaatt

SEQ ID NO: 110747 - DNA, 13839 bp, Cannabis sativa
  modified_base (10305)..(10322): a, c, t, g, unknown or other
  modified_base (13803)..(13803): a, c, t, g, unknown or other
tgaaccgctcttccgatggtttgtaagtgaagaagcccaagatcagtttcttatattgaaaaataagttgtatatcaacgactaggggattgattataacactttctcgttgaacaaccaaccccagtttgagaggataaggcatcaagttcaaaccgaaattggggttcgtttgtcaatgtccacgaaagagccaatgtcaccatggcttgtgaattcttggcctactagcctgaaagaaagaatgggctagtaaaagtacgaacaaagaatgtccttgctactacagaagcaatcaacctgttatatgaaatgcttgggtttgatcgagagcaacatagattgagaataattgaggaatatgaagagcttgattaagaggacattgcagaaaatgtaggcttcctggggttgaggtttcatgaactagatggatcgtcaaacctcttgtatagatgtgaactgaacctagtggctaagacttggttatacattgtcagtgcacatttggtgccaagtaagtactttttttatgtgtaaatcgattgtctcaagtatgtgtatgccatcatgaagggctacaatctttatgtgggtgaaatcattcgccaaagctttgagacaatggttcaaggcgccacgagtggtggagttagtttggtcggggttatcaccaatctttgtggatcttacgacatcaaacaacttgggaggtgttgggctgaatacttgaaaggaaaagtcacccagcatcaggtgtaagctggacggagcctgccaaccattactctaaacaactaggaagacacatcccgaacggatgtccagccaacaaactcatagaggaaatgtctagattcatcccaactgcctaattccctacaaaataggtcaatcatggtgcctagaagtgtgggattgcgataatcaagggtattgaggatattgtgggattgactcaatcaaatccttaattatttattctgtaattaaatgtgaatattttgcattttaatggattatattcactattcagagactaaattctatattctcaaaagagccattacgctaccaaattacttgtaacttttacagaagtgatagcaagaaactcacttgaacttcatgtgatcttgttatttcttagaaaattacaacaaaaagagagtaggctattactgaattcgggaacgaatctctatacatctttgtgtcgtttataattcttcattattctcattattcaaacatttttattatcgttttattgatcctgcgtcgctgactagaaacgtggtcaacacataaataagtaaatatatatatatgacaataaaattaaataatatatcatactctaaaataataaaataaaagtattttaatgataaaaaaaatatgtatattaagcaatattttaaactagtcatttaattaattttaaaaaatattaatttattaaatatttataataattcaaagataatatactatatattatataatattatattatttttttataataaattaaaagttattcttaaatagagtattcttaatagattgaatagagtattcttaatagagattctaatagagattctaatgtaatgtaatacaaatatttatttcttaaataaaaaaaaaagttaacagaagtataattgtaagtatatttatctatattttaaaaaattacacccacttcacgtatatattatataaataaataatatgtttcattttcaaaaaaaaaaaaataaaaataaatggagaagaatatatatcaagaggtagggttatccatttccacacaagtggggtgaagatcataatcacaaacatcacaagagaatgcccaaaatctccctcctcctttacaacaatcacaaacataccctctagccatatccaatttcagctcgtgctcatgtttccgatctttcacacgtctcggcaaagcctctccttctttcctcagcgccgcctccacttccccgatcctcgactccgtaaacgggaaagccctagctccgtacaaggagatcacagtcttcccatcagccggcacgggtctcccgtcgggtccgatcagaaccagagccggaatctccttcacgtcgaagatccgacagaggtcttgccgtgcttttcggtcgtggtaagggattgcaagccagggcatcagctcgagattaagttcgaactcgttcaggtctcggtctgtggagacgaacacgatttcgaattcgaaggacgacgaagacgatgatgatgatgagctgcaaacggcgtcgtatgtctctttcagctttgatgtgaatgatctgcacggtgggctccagtgggccccgaagtatagcccaattgtctttcccaccagattttggacctgagtctgcaatgggcttattatttgataatgctaaaattaatttgaatttttatggtatttttgtaaaaaagaaaaattagtacctgggttccatctcttgaattaagatggttacgttgttcatgtgacaaaagtagttccaatttacctccatgaagcttagccttatcaatggcctttaattcttcccttctctccctagtgaatggaaacgcttcagcaccatagtcttcaatcaatccaattagatcctcttcaattgaaacaccattatcatctgaactcactaatggattaataagagatggaatacgatccactttgaatttctcacttaatcttctgtgcacatctaaatgaaatggcacagccaaccaaggcatacacttgaaatgctcttcaaatttagtgttgtcgcggtcgaaagagatgaagatgatctctaattctttccctccatttttcagggaattgtaaagctgaaccaattttggagtgaaagctttgcaaggcctacaccaatatgctgagaaatataggcaaattttcttgccatggcatgaggacaatggtacctgctactctcacaaaataataatagaaaaaacaagagattcagtacaagctactgtaaattcagcaagagacaataattatctaaactaactaactacctctccttcacttgacagaaggaattcaaccccttcagatgataagatatcagccatatcagtagacttagcttggtagttaagtgctgccatttttagctacaaagccacagaaaaatggtttaatctggtttctcacaagaaaacttgtggtcaatatataaacaaacaaaaagagtgacattcacaaaagtgagaattttatttttggccaatgactctttaaaaggtgcacctcagctttattatacataatatgtatatataaatatgtatccagcttgcattttcctaagtttgggaatttaatttgcaaacatattcttcaagagaatttagattaccaacttgaagtcaaagattatattctgatccttaacagagagtggcaaaaattaaaaaaaaaatgatgccttgaattgaacccatcatttaaaattaataataaataaatgtacaaccgctattactactgttgcaagaaattagaataataaacaaataatccaacacaattaatttcttattgaaataagaaagaaagatgaacacgctatgctacgcaacacaagaaaaaaaaaggtcaatatttagattagattagatatattattttattccttttagaaaaggtaaagggaccagccatattgttcacacagcttttggtctcattatccattcgattctttttatttatttatttatttattatcgatcggaaggcacagagtccagaaataaggattccttacatattaactcacctccaaatccaatctacaatttgtcaatatagtatctaaacacatcatcaatgatcccaattgaggtaggaaggaactattatattctctatgaaacactttattgggatcgagttatgtaattaagaatctaaacaacacaactagaatagaataataaccatgaacatagaactagaacctctgtgaggaaacaacaaaatttcaagtgggattggtccagtcatcaaagttccttagctttattatatacatatatcaaaataagaaaaagaaagaaagaaaaagcgagaaaagagaattaccttacctatttggttatggaatggttataatctcccctgtttttcttttgctaagaacttctcttaaagcaagcccaaaggagtaggaccaccagaccaaggtttatggataagtgcccaacaggcacagagccaaagactaaggttatctctatcgatataaagagacccttagattagatatgatataatgaatgccaaagataaagggagtaaaacttaaactattgagttagttatgaattaatttagtgatgatgttatcttgaattaatggtatatccatattgaacattaaagatccctttaagctcttcacacttgcacccaatcgggttggtccatgagtcatgactatgatgagtttggttttcaaatcaattcgaatttaaaggaattggtagtatgtactgtttgcatgttatttatgacaaaattaaaaacatgtgtgtgattagcagcatggtgaatttaatcaactgttttttttatttaattgataataatcaaattctttaaaaataagataaaataaaatgtaacatgatacattttagctctatgaactaattcaataacaactatggctaaatcaatatatatgaaataagttttaatgattacatcgaatataactataatggttatatttaattttagttattggatcattattagacggttgtaattaatttaaaaatttatcaaaaataattcataaattaatgtaacctagtactaacatgattttatttattttaaaataaaaaaaaattaatttatttttagtatgtaattaatttaagtctaaaaatagaaattgtacctgattatacatatataaaggaatgttcaaggaagactatcatgtgacattctacatttcttttagcctaacttatctattttatagaaatttcatattttctttgaaaaaaaaatacacatatagttatgttatgaattactcgatcaagaacacaaacaaatacaaaaccgagaaaacagttaaaaacaaaactgaacataacacaaaacaaataatttagactaatataatcaagcataaaacaatgtaaatgaaagagatattatgtggttcgaacaaggaataacaatgtgttatcctgcctaccccacggccagaaacaatccttagggcctttgatctttattgaatgaaagtcactaaagattacaccaaaaggaaatgttaagaacagttcagcacactcaaatgaagctttgtttcaattacaatgattctcagaattctctcaactctggtttctctctcattcctctctctcaattctttctctgaatcgtggtctagattttggtgtatttagctcgattgatgaggactccttttataagccctggactagttttcaaatagcataactgtcataacagaatattaagtaattctattatgacattagccgagctagtgagatggtaccaaaaactaggtacctcaaatgtgtagccaaacataacaaatcatccaccttaggttttacatttgagttgtagtcaccctgttgagaaagagctattctgggcttgataaactcaacaatcaagtatgcttagcaagttcagataaagtctgaactttgttaaaggaacatactttgttagcttatctgttgggttttctttagttcctccaatcttcttcacttgaacttctccttttgcaatcatatccatgatgaagtgtagcttaatgtctatatattttgatctttcatgaaacataagatttttcatcaagtgcagtgcactttgattgtcacaatgcactacaatatcttatgaattgaagcctaattcagatgaaaccccttagccaaattgcctccttgattgcttctgtggcaaccatgtattcaacttttgttgaagatagtgccactaccttttgaaaattagatttccaactaacacatccacccgaaacagtgaatgcaaaccctgttatagaactcctggtatcaatgcttccaacataatctgagtctacaaaccatgcaacttcagtgtttatcttattgttattgctgtaaactaattccaaatccattgtaccttttagataccttaagatccatttgacagcagaccaatgttcattaccaggatctaaaatgaacctactcaccatgcttagactgtatgcaaggtaaggtcttgtacgcaccatacagtacatcaaacttcccacacaagaggcatatggaactgtgtccatttgagccttatcctcttctgactttgggtctgggattgagaaagtttaaagtgaggggctaaatgtgtggtgactggttttggctcattcatgcagaacttatccaataccttctgaatgtaatatctttgagataaggatattctagtaggtctttctcccttgatatcaatttttaggattctcttagcttttcccatatttttcatttcaaattttgcactaagttgttgtttcttcttgttaatctcttgtctttattttctaatgatgagaatatcatttacatataatagcaactagatctgtatgctattatagtacacacaaggatcatagttgcttcttgtataactagtttttgttatgaactcatggaatcttagattccattgtctaggagcttgtttgagcccatataaggacttcttcaagaggcatgcttgatttggcttgtcacatttgtagccatctggttcagccatatagatttcttccttaagctttacatgcaagaaagctgtttttacatccatttgatctatttttagatcaaattttgctactttggccatcatgattctaatagaggtatgttttaccactagagagaatatgtcgttgaaatctatgcattctctttgactgaagccttttgctaccaatcttacacttgtacctaatttatttacaaccaattagtttatgtcctggatggtcttataacaatcttgttttttttttttttttgtttagtgtgtataaagttcctttttgtttttttatcaacttaaccttacttttgagacaaaagtctctctctctctctttattttattttatttttttgctgtatctttttgggaataccattgttgacaaaagttgtgttaatttggagatccattgaataactaaagagttgatctaaaaagatttcaaattgaagttgttgaagggtaattcaaagagtagctcaagaggatcttgggctaagaataaaatattatttgactaagtacttaaggggacttgaaaccaatttcttgggaggaactcaagtgtgggtattactttttacttagttgtatcaatgaaattaatttactagtttgtaatcagtggataagtgtttctaattttgacattctctgttgcaaagaatagctggtctaaaggttatggtttgatgtttcttgaatctttaatttgttagattagatagatactgaaatatatagtaataggtttaataactttcaattttagtttaatttgcaacaaaagtggatccaaactaacacaatcattaatttctccataaatgaaaaaagaaagaaagaaagaaagaaaaagagattaatgcttaagtgagaatgaaaaagcatcatcagcactcaaaacatcccaatcagtgacataagaggaataatcttcatcttctgaatctctctccctcagctcctcaattctctccgctgcctccttccaatccaaccgtcgctcaaccctcatctcgctgcaactcattccgatcttcaacagcttcaacatttccccttccccatgtcctgatctcaccatctctttatcgaacacctcacccgtccactcctcccgcacaactgagttcacccacgccgctagatcacccgcagaggacgacaacgacgtcttcttcttcttattattattattcccttgatccacataattctcagggaatttccctgtcagaatctcaagaatcagaatccctaggctccagatgtccgtctttctggagattcgacgatttttattattattattattggaggagaattctggggacttgaaagcagccatgaatcgatgtgcatggtccttgttggtgagagggacgagggcgtattcagtgaggattggggagaatttctgatcgaggagtacgtttgaagatttgaggtggccatgtgggagggttacgtctggaaactccttatacaagtatgttaaccctcttgaaattcctttgattatgctcagacgagtagcccaatctagcccaactcctcttttattacctgatggtcatggtgaatcaaataattaattaattagttgaaattattattaatatatatatattaattaattaattaccatggagatggctggccaagctttgattgtcaacaaaatcagatatcaaaagcttctcttctttcctgtaatagtatgcaacaagaggtagtagattagggtgtgacaaccttccaagcttggccatataatcatggaagtactcctctctcccaacattgttcatgtgactaaacctcttcacaaccatggcaggtccatttagaagaagtgctttataagatgacccaaaactaccacttcccaaaacctcagctgatgccctaagaaggtcttccaactcgaacctctctctatctttcatcacaaattgcaagctacctctttttttgtagccttggctgctgcgcatcatgtcatgatcaagatcaacagtactattcatattattatgtgatgagtattgatcataatgataattagccctttttacagcaccaaactgctcgtaattaactacttttgggggagttgagccatgtttattgggttgtaggagtagtagtggtggagatgtagtggcagttttggttcgagctcggcggaagcataggaacacaattgaggcgattacagctactactaacgtaactattatcaccattattatgatgtgcttcttcttgttgtttgatgatgttgaggacttgcatgttgacccaagaggcggtccacacaactccttgttccctatatttattattatatgtatataattaaatatataatctgaatgtataattgagatcgaaatgctaaaagtatattgggtttattattgagaaatgctaaagggcacccgcggtgactagtatttttttatgtgtcaatatcgttattggtccaactaagtattaggtcccatataatttaatataatagtttttaaggaatgtcgctagtcaatcgcaacgtgacatatcgagaaggtgctagacaccactggtactttatagcaatgctctttattattagtataattaaatactaaatttcatatatagttaatgtaatgacatctattgttaagcatcccccttatagtggtgctagttacaatgctcatgctctatatataaagagcattgctattaagcactagtggtgcctagcacctttgtgacatgtcgcattgtgattagctagcgatacattctaaaagctatcatattaaattatatgagacccgatacttagttggaccaatagcgatattgacacataagagggtgctacacaccactggtaccctttagcatttctcatatataaaggccaaggtttgacatagttagatgaatattgaagacataataatataatatattttgttaataactttttacatacaattacataaattacatatgatgctataatttttgtccaccaatttatatatatttatatatatatataacattacattttctaaatacattttaggaaatatgaataattatgtgtactggatgtatgtagataggcgcgagtcaacaatacttattatcactcatatcaaatataacgtgcgtcctaccaatactatctacaaaagtattgctgtatattaatattaagactattacttattattccatatttttgtcatatattaattgtttagatattatcgatattctatctaaaatattttttcaattgttcattgctaaaagttaaataattaaggacaatagtttatcgttataaaccacaacacactaccaaataataataataataatannnnnnnnnnnnnnnnnnataataataataataatagcaaattaaaacttttgttttttttacttgtataattatctattcatttcgcgatattattcaagtgaaatgttaaagggtaccagtagtgcttagtactcacctatgtgtcagtatcgttattagtccaactaagtatggggtcccacatagtttaatataatagtttttagggagtatcactagcaaattgtaacgtaacatgtcgagaaggtgctaggcaccataacaataatgctcattaatcaagtatatgcatcatttaattttgtgaatcattataaacagtactgtgtaattattatcaatgattactcatatcacaaaatttgcagttaataaaattaatatatgcatacattttacgtacctaagaaggcggttacattagcattgctaagggtggagggtattggtccctgaaattgattattagcaaagctcaagaatttccaatcctggcgtggaaactctggtatcctccctacaaaccggttactctcaacgtttaactccacaagcttagtcaacctcacaatggagttgggcaatctcccatcaaactcatttctgtccaagtaaactttcttcaagtaaaccattccttcaaaactatcgtccggtatgtcccctgaaaaatcattgtacgacaagtacaaggctctcaaccctcgaagcactttgaattcaggtattccacccccaaagtggttgcctatcacgctgaggctgcgcagagtggttgggagcttggacaatgtgtagacatcgatggtgccacctagtcccatgttttcaagtcttaatccgtaaaggcttccattcacgcatgtcaaccctttccagttactgtcgtttgtgttgggaatgcataagggaatggaagtgctccaattggccagctctgtgtcattgcttaatgatttcttgaattggaggagtgtttcaccgtctgttacagcctcggcggcttcttctactattactactaataatgttattatcaatagggaaacgagatcatagctattaacattttttttattattattattatgagccatgtatatatatatgtctaatcagctagctagctataatactgttttgatgagtagtgttttacataatataatgaaattatggagaaaagggttggataaaaagaaggaaatggaagaagaaagttcgaaaataaatgtgacaagagaggttggtggagtctgaagatatatcgatgagattcacaaggtaattaataataagagtactagttatactaaatgtatatatgaagaaatatgagctgtggtttgttgatgatgatcatggggctggccggcctcaaattaattaattaattatatataatttaataaaagtgtatagtgaaaatcattatttggatattacctcttggctctttattcattaattctaattatgtgtatatatgctgtgccctttagtttcttgtttagtagatttttggtgtcgttcagccgtctctatataatataatactatacatatatacaatcattctatatatgtgtgttcatgattcatgatatcattttcatatctgatattgctaagtgcttgccatttcgttcagttgagtcatatatatgttatatatgctagctggatttttttaatttattcgcttcacatggaatatataataaaatattcatacaaaagaagaaaaatggagcattgatatatactatacatattttctgggctttgtttgtagttataagagtaaatttataaactctgattaaagtgcatagattagtcaattaatattttgcgtgatcaaccattatttttaacgtataattatgtgacgtaatatccaaagtaataatttgacaaattgtacctaaaacgacacatgcatgcaactatagaagtcaagtaattaatcctaatctatatatatttaaataaaggaaaattatataagaggtaacatccaacaatttttttcatccattatatttattttattagaatttttataattaaatttagtttattttatagatttgtatgagaaacatgacattttatagtttttttttttttttttttctgtaaaaattctatactacttctaaactataaataatgtatttttatttgtccaaaattatatgtgtgattaataaaataatcttacctattacattttttgttgttaagtttatcatcaaatcaaattatataaatatctaagtatatttataaatttagaaagtggaataatattatttagtgatttataaattacatgctttataaattttttcaactattttataattttaatagaattttgttgattttagttttttctctttttttttttcataaaagaatttatttctttttataaatttgtacgtggatgttgagaaataaatttatttcttataaatttattgattgtatacttgtaaaatatcaatcaattgataacttagttatgccctattaagagtttatcatcaaattaaatatatttatgtctaatatatttatattcataatttttaaaagtgaattaatatttttttttcaataatatatgtaaattatttcttttaaaaaataatatatctatatattttttttaatgtacgtaaaaattaaaaaaaaaaaagtaatatacatatattatttagtgatttattaattaaataaataatgttataatttcgatatctatatatataaaatataaaagaaagcacgagtctaagttacattttacattttttttaaaatttgtgacattttcttattttgttctaaaaaaaaactactacatatataaactaaaagtttcacatggtttagaaaccagttaagtgttacttatgtaagttataaacaatacttatattatgttaatttcttttgtccatgaaacatatatttttatgggtgattgatttatttcttatcggataaattttaagtttttatttaatatatactgtaagagagtcctacattgataatatgtgagaactaaatatcatacataagatgcatgagttattcctctcattactaattagttttaagatggaaccccataattcttaatatggtatcagagtcaaactaaacactaatgagtaaccgatcaaaatccaaaacctatccaaaaaaagactagtcaaaagagtcgtttgtgattcggagatagtgagctaaaaagagccacttgtgatcgagttgtgtaagattggtaaatataaaaataaccatcattttgagggggatgttagagagtcctacattgataatttgtggaaactaaatatcatacataagatgcatgtactactcctctcattactagtagggtgttcattggatcacatccaatatttttaggcccatccagatccgatccaattatatattggatgttagattntaccatccgatccgatccaattgatttcagtcatcc

SEQ ID NO: 110748 - DNA, 2591 bp, Cannabis sativa
gtgattagatctaagatcctggtaaaataatttccaacagtttcaatctccttcagattcttcccatcatctatggcttttaaaatcccattatgaaccagtaaagccttcatcttgatccttcataatccaaaatcattggctccattgaacttctcaatcttaaactttgcagtagattttcttggtgattcttgaacccttaaactcgaatcttgatttatctaaagcctagctctgataccacttgttatgatcgattcaaactcataatcaagatcagtttaagcttagtgagctttgttcaatcacattactagctaacaacaatacacacttaatgaacatgaaattataatctttattgattatatttaactcaaattacaggaattttgcataatttggagaaaaattaaagctaattcaataggcttattcatatgacaaaaatagactatggtagcttctatttatagttcgataaattaacaaattacaaaattagttgatgatgtggaaaatgagagggatcaatacactacaaggatacctaaaatgtgaagatcatagttaacaatgaaaatattttcacgaatagagtggtcatggtagcgatagaaaaagagagaaatgtgtgtcaataaaagagagcaacaaaatagttgagacggttgatggggtgtataagtgttggagttttttgtgtctaagaaaaagcaaaaatagagaggaataaaatgtctgagcttttggtggcctgtatccctgatccttcatgaattgctcatggattcatctttaggctcaccattaggttttctaattaaccattctttgtggtggcactaacgaagattaacggaatggatagtgatagaatcatacctttgtaggttggggtaaggtaattttgttattaaatcaaaaattaggtatatattataacaattgggtaatggtgtttatgtggaaaatacctccttcaaattaaaataatttttttatacaacttgctaaactgatattttattttttcttttatctcttttcaaaattttctatttttcatctttagtttgaaaaattgttttccattaaccatgaccagatgtatgaaagattttgtagataattagtctaaaattaaatataatatcccattactggataaaaatcttattgttatttttttacaaaacgaatttctgttcgatcacaacctaaagttcttgccctcatacactttattaagctcccaattttcaggagcaacattatcagactgtacaaccttaccatcactatcagtaaccctaaaagacaaagtttggccttgtaatctctctgaagtctgccaattttgtccccaatttctggtcatctgaaaccactggtctccattcccacccttgattttgacatcaacaacttgaccaactccaccaacattgtaaaccaacacaagcaaccagtatgggttccctttcaactcaaatctcatgccgcctgttttgaaacacaacagtctccgataagcgactgggacaattccagctttgtactcagcaatcttgaggaacattggcattgaaagatcaaagtgtttttgtggagggttgcaccaaacatcaacagtttttgtgtagtttggagggcagaagtttgtggctgtaaccctaattgaccctgcattttttttgcaccattgtcttgaatttacacacactatttgaaaacaggctccgcatgtggacccattgttgaagagtgctgtgcttaaagctgttgtttcaaggccgtacccttgtttgaataggtttccataaccacaagctcccactttttcatgcataataaaaatttacaagaattaattaatgtctatatatcattattattataatggtgtatgatgatgtgataatattaatagtaaaagttaattgtagtcatgatttattcatcatgtagctatgcgtgtctatatggtgaagtttgatttttttagttctctttgtgccttgtccaaaagtaagaagtaatttaattaataaaaatattcaatatatatgatatacctacaagaacaaatacacataaatatataaaggaaactacttactcatagtttcatttccactcatgtctccatagaatgttgcgtgagctaaaccccagctagagtccacttccaaatgatcaacaaaataaccatggcctagtacgacaacaagggttataatcatgaacacacaagctacaaactgaggatttttcatgatttttaaccttaataaaattctcaagtaggttattgagatttgaaattaagttcggacaaatggaacaaacttaaaaagaagaaagagtaactaaaaagaagaacaaggagagtatgatttgacctaatattttttatgtatatagggcttaccctgcctttcttttttttttggaagaagatttttgtaacttttttttgaggtaaaatggtgacattttattagcaaattgaatcaaccattacaatgtttaaaagatcatccggagcagtactctcggtaaacatacgaactgagtgaaaacaa

SEQ ID NO: 110749 - DNA, 5504 bp, Cannabis sativa
aaaaaaaaattaaagtataaaaatgaaaaaaccccaaatatctttaccaatttacttttatttgtccccacagtgacagggttcacaaaatttcaatataaaaatggtgtaatatatggaatcttgtagaatctagatgagagtatacttgtaaattaaataaaagatgctagaagatcgattgtgttgagcaagttttgactagtagctgtcatattatgtggatcaatttgttaaagcttttcatcaataacaaagcatttttttttttattctcataaaagaaaaacatattttattattattattattattattattatttaagaataataaaacatatttgttaaattgttattaactcttgatcaatagattagggttgaaagtgttggaatatccctttccttgacacgttactagcttgtgatggggtggagttttagactaaacttatgatgaatgcaattaaaattaatgtagatgcccctacgatattcatccaattaaatctgtactattttgatcatagtacatccgatccgcattaagtgcggatttcatattatgaatctaatccaatccgcataatagctcaaattcaatccaatccatagaagtgtgtattggatcggttatcaaaatattttttttcacataattatattgttattttatgtttccaataacaaattaaaataaataaaataacaaattcaagggaagaaaagaattatatgtataaaatgtttaattttattttaaattgtatgtagaaaaaatatatatatgtataagaatgaaatatacatttaatataataagttttgaaatatatgtgtattatatgtattagaattttaaattagtattttctttacattaaaattttaattgtatatataattttttaaatttttttataaatacgtgtggattagattggattggatcggctacttttacatgtcaatcaacatccaattcgcacaagtatgaatttgaattttccaatccgtacaagtgtgaatattcgcactttacaaattggattggatcgtacgaattggattggatcgactattttatgaacacccctagctagatgcgactattcttgaaaaaagtaagttgtttggttatggttttgtggttcgggattcaaagagagagttgttagtggctattgcttcttgttcgcaaggggtggtgtatccttctttgacataagtgattgggattaatgagtttcttagttggttgaaaacctagagttattctagggtggatagtcttattattattcaagctattcgtaattttttttattatgcttcttgattttcctgatatgtactattgctttaatgtgaggtcatttcgttttataaaaatttgttatgaccatatttctttacgcatcttcaataaatgctctgctaacccatgaaaataacacttcattttctaaaccatcaacatttggtaaagtactaaattgatataaagtagtagtagtataactatatctttatggaaagcacaaaagagatcctaaggtgtgatgtatactacacctttacatatatacaacacggtactcttatttactaaaatggaccaaaattagagatatgtagcatttttgctaaattagagcttcattgtttggtcatgaataaaagtggtcatgactcatggaatgaaacgtagtttgtctggcaaagcttaatcatgcaatcgatagcaaaagaagtttataaaagaaagaaaaggaaataaacttaagaaaatgattttgagtgccttgttgtgtaatccaaccaataaagctaagcaagatctataaatatagtgctcatacaaaagtggggaaattttagaaagaaattttgcatgcaaatttaatattaataacgtggtcaaagttcatgattgtactaacaacaaaaaaaaaaagatggtaaagacctagtaatggccttatgggacgaatataactaataaatatggtaaaataatctaaataatgagcatgcaatcaattatagcaaaagtttgctttatacaaaatgatattattcaattgaatgatgtaacaaaaatcaaatcatgttggaagctacaagaagccatataaagatacaaactacgaaattatgtgctcacacataattatctatacaatgaatcacaatcatctggaattatttattctatgatttagagcaaagtgaactcggatgttcttggagtctttaatgtttggctgttgagtaaaacatgttaaagagttaaaaaccattatagaagtaaatcatgttgagtgaaaaaccaacaaaattatcttcaattttgaagttaccaaaagcccaaaacagtaaaggagacaataataaattaccttctaaaagttgtcacatccaacaacataactatctttaaacacagtattcaatctgaaaaaacacaatgttgttactatatataccatagtttgctgatctcactacctaaaataaaaaatacatctgtgctcttaattcatggcctagtattatatgtgggtgtgtcacaggcaaccaagccataacaagtctataatgtttagtgtattatcacataatcccatttgttcttcagtatccttcttgtcattccagtaaacggtcactagctacaaaagagttttatccaaaatgtgttataagtttgtgtgcttattatgactacttgaccctttggtataataaatattgaataaattaatatattgtattaattgttacgatcaaaatttttaatacaatgtaaattgtattatttaatacataataaatagtccgtattaacttatattataatatttacaaaagatccgaaatcaattcttatctccgatccgaacccaaacccaaagctggagccgggacccgaacccgaacttagaaccggaccctaacccaaaccgggacccagactcaacccgtagtcgctgtttagatcgagtttattgaaaatatattataactttacacaatatattaatataaatcaataccaaacataatattgtattaaataataccaatacaatacaatccaacacaatagaatacggcgtaccaaataatccattggagaattagtttacagttacatagtgaaattttgtaattaacagacagaaatttccaagtattatggggttggagcttgaaagagctattagaaaaagaaaagagaaaacaagtgcctttttctattgtaaagtttaatcacaaaagatgcgttaaaataaactcaagggttcaatgaattttatttcatcgctactttccaaaacactgagtggtctattatagtcaaaaagataaaaaggtagacaagcgaaacacgaattctagtcaaagaaaaaacagtgatgatggtcaattgaaattcttttatttgtagtattgctttcagtagtggcagaaaccttttgggagcactaatttaaggcgtaggagaaagaaaagtgaaacttgctgtgtcgtcatgcaaagacagtagtgtagaacttataatatgcccatgcaaatgcaactacttagtctttacccaataagcagaatctattctttccacgctgcagctattttcttgtgtacaagctccactccaagccgaggagacaatctaggtaaagttacctgaaagagaaatttctacttcataagagaaggaaacttgaactaagatacagacaattatgtaattattggaacaattgttggagactcaaatagtaacaaaagtaaatagattttcaaacttgtttgcgagcctatgctgcaaaaataaaagtaaataaaaacaaaagctgaggaaacgtaaagcaactaaagtaatgctcctctgagacatcctaataagggaaaaagcaaaagaaagatgagcacagcaggcaatcttaaagtaaatgttggattgaagttgatctttgatttgatactcaatcataccggagaccttacaattagtgtaaattatttaattgataagaatccatctcgaccacactttaatgagaggtccaactgaaaccatatacttgcactcatggaaagcaaaccaactgaaaacagcactaaaaaggtctttgaaatcaagagaagtctgactgaaaagaactaatcttgtcaagagaggtcttgcaaagggaacctgtatctttcagcaggtattcttatcagggattgataaatatgccttgttagagatgatcatttcatatttccatgtaaatattttatgtgccgaatgaatttttaactcaaaatgaataactatttttatttttcacctgcaaagcaccaaccatatttaactctgttaaaaagtaaaactggctggtacatcagatggataatcaactgggtcttaaatagcaaagaatatccatgaaaaaaatatttaaccataaaagtttatgcaagacctgttatttaagaggagggtacaggaaactgagatttgcatttagagcaattgggtattggattaagacttcattagagaaaaggggtatgatccaaaacaaagaatgtgcaggacgatcttaaaattgctaatccctaacagctgatctgcaaaagtaaactattactttatgttagaatattaattgtaaatattaaggtaaattatatttagtagtttcctatttgtatttagtagtttctcatttagtcacctaattttgtatataaatatacaattctatagaatacaacacacaattttattcaccattctttacatggtattagaactaaacttagaattgtgattcgaaattcaaaattcaaaattagaaattagagttcataaaaaaaaaacaattaaaaaataagattagagtttgagtttggggttcctttttcgaaaaccctagttagagtgcgcgttctttctcaccgtccacatagatggattgcccaaccgcggatctgcaaaaccccgaagtccgacacccagtatcaccgcgcgtgggcctcacgccgcccaactccgtcgccccgactcccacagaccggcgcatgagggcgcgtctggcttctgttttggtgacggtcaccgtctgtcaagctcccaccccttccccaacctcattgcatcggtctccagcagtgcttatcattttgtagattgatacttttgccttcttcgagttttggtgttcattctttggtgtttactttcttcctttcactttcacttgtttttgctttcgagattatggcagagataaaatcagattcgaaatcagtggttgttttgatgtggttcccgtgatgtctaaaatcaaggaccataaattgattggttcgagttatttggaatggagcaagacatttgattgtatctgaggagtattgacaaagatgatcacatgactgacgatcctcccaaagaaaaagacgatttaagaaaaatatggctccgtgaggatgctcgct

SEQ ID NO: 110750 - DNA, 10277 bp, Cannabis sativa
gctcttccgatctaaatgttatttctgatctttattaactaaatctgattattgaaatggattttatttagggcacaaaacccaacagaaggttggttttcacgacagccctaggaggtggacttctgcaaccccttttggaatacccttctgggatattcgtggggcatctgtttgcatcttttcatacacttggcaattcaattaagttaactcttcagattcatcggtccgtgtttgttttcaatcaagtcttaactatctactattgagccaaaccgctatccgtttgggccttgagaatgggccgcaaatcgactaagggacatcgaagacacacgtgtcgcctgtccagaaacgcagataacactatcattgatggccatattgagaatccttgtggcttatgatttaaagaaattaagtagaatttgtggaaattagttcctataaataaaagctaatttctgttatgatagttagttgtaactaactttactaatttggttggcagctcaaggtagactccttcaaattctaactgccaataaatattttcattctcaattcattaaggtaaatgatgcaaagcaagattagagagggagagaatatagagaaaagagtgagattgggactactttggtttttctatggagctacatatctagatgaatatgcttgttgggaactgagtgtttaagaggagggaaacactttgtgaggaatcaagtgagttgtataagttagagtgtattgtacttaattttttgctcaatcaataaagagattcggcaatattgcacaactagaataaatccataaattacatcgatttattagtcttcaatcaacatatttcttgatgttttttatgtttctgcattgttttattcttttcattaattttgattttgatttaagttcttgctatgtgttttatggttttagttgtttagttcttgatctctaaattcaagtttagtttttttttttttaaatgaaattaattttcccacacccttgtttgtttttcatatttgttgtttcatttagttgttgcatactttgagtttttgtttacaaatgaggaagtgatttataaaatatcttaagaagtacatcactgaaaaagtaaagttacaataaattaaatttaatagaagattaattgccgaatgattaaagtatacatactcgttgattgtaaattaaaatgttgataaatagatgacacgtgtgtgaagatccatcctcggggagtctgtctagttttaagttttccacaaaggaacacgctaatgatgaatgaacagttgattcacaaaaacactcatttagacgccaagtgtgggcctatttttgagtgtttaaattagaggagaaaaagaagggaaagctctctctcagttctcattttcatgtcatgacacgaacatgaaagacttttatattgaaacagaagaagcacaagtcaacgtaaacgtagaaagtttgaagatttgaccgaaaatccacagtccaactcggttgtccgaaacttagatagaactcgaaggcggctgctaccgaaccctccctcgcccatcactatgagttgtttggctcacgctatgactatgattcccctgtttttttattattcaatatcttttcttttgtcaatacctcaatacccattgttggcttcttcttctccttcttccacattcccaatttcacttcctcttcggaattggattcttcgatccttctcttcttcgccgcttgcttccatttttcggctacgaaacgtctctctttgaccccgtcttcatcttcttcttcttgtcttcttttgaaaaaaataataataaaataagacgttagagcgaagagaaattcctattcctgtttttttttttttttttaagattttggtgaatagaggagacggaatcaatctgttttggttttgatcgtatgggtttttggagttgttataactagaagtaatttacttgggctgtttgggtgtgtttggcaaactagaaaagttgtgcttggtgaattgagattggctctggtgatgatattttggatacaatactaaaatttgagctgtgggttttgttgaggggtgttagagctcaaatgggtgggatttgttcgaaaggatcctctaaagttgagaatccatatggggaaggaaatgggcatgttgatcgtcacaagtctgataaaggagagtaccagtcaagtgtgaagaccatggttacgccgcctccggtgattggaatcaaggaggataagttacaagagcagaagcagcagttgcaggatcctgttgggttacagaaaattgatgctgctgctcctggcgatgatttctacgatgggattccacggtatccgagggctcagaagtctcgatccgtcaggtcgacacaggcggcggtggccaaggtttttgcattttctgaagttcttaaatatacgtggtttagtgctgttattctttcatatgaagtgtcgctttagtcaaactaggaggttatggttagcaatgctttatcagttttttgaaaattaacctccgttagttataatgcgcttatacctatcataaagaaaatagaaatttagtattacatacttctgtaataacaatggatgaacttgataatgtcttttctaacaagaactgaattttttccatatatatgatgctgttatttgttgttccagtagtcttttaccctaaacagtgctggttgggattccataacaactgagtaattgattttttcttttcttaataatctttctttatatgtctacattttccattttttttttccttagagtattcttaagatctaccctcattgatttgttggagtcgttaattatgactctgaccatttagttggagctcaaatacatatgcttgctgcctttattttctcacaaaaagaaataatacttctatttgattctctttcttgatccgccatgtttcaagctagtcatgattttgctgctaataattctggcattgttaaagtgataaattttatgagcagattggtttttagtctgcaccacctaattttgcatattattttgccaatttagaatttggtaaagtctggctctaaggaaattgtaagttattgaataaccatgcataagtcttgtttgggaagctcatgtttgagctgtatgtttatcattaagaaaatacatggtttacttccttatacttctagtgggcaagtgttgtcttaagttagtggttgaaaattaaaatatgctctatggaatgatggcataagtaatttaatgctctgttgttgtaggtttccgaggtaagttcacgtttaggtagggctggtacagctgggttgggaaaggcagtggaggttttggatacgcttgggagcagcatgactaatttaaatgctggagctggatttgctacaacagcacccagtaaaggcaatgaagtgtcaattttagcatttgaggttgcaaataccatagttaagggttctaatctcatgcaatcactttcaaaaagaagtattcaacaattgaaagaggagattcttccttccaaaggtgtgcagcatttgatatctaacgatacagatgaactgctaaggattgttgcagctgacaaaaggtggataatgaatcatgtagcagttgttcatttcattcaatacttgaataatacaagttttggaagagaattcattttgttttttaatttacggaatttttctctgatagggaggagttgaaaatattctctggggaggttgttcgttttggaaatcgcagtaaagatcctcagtggcacaacttggaccgttatttggaaaagtaatatatgtgttatgttatacatttaagtaattctgtcgaaattagatttcccagtcctatatcccttatttgctttggtgacatcttattttcattttctagaatcagcaggggactaaattctgaaaagaatttgaaggaggaggcagatttggtgattcaacaactaatgaatttagttcacataactgctgtgagtatattatcatcctataattagacaagtgcattttctttctggtcacatattggatagtttccttttttatattatgaagttccaaatattgtatgcgtagcttattcttatgtaccaaatttattatgcataaaccagctatgcaacatttctaacagcataaattttcttgtaagaagaaaaggaattataataaagataaggatgagtagtcatcaaattaaactagggagacccttgaatttatgcgtattagtctacttcctatggaagagtacttttcctctgaatgatagtaaaaggttgtgttgttcctcttcttgacgaaatgaccctcacaaagctataaatatgtaaagtgatatagttagatgatggctcttgcataaatgctatttgttgtttccttatcactttttcttaaatcttatattaaggatttttcagttgataggtgccctttttctgaactagtggctgaacatttttaaagacattttcgtattattgaatttaagagtttaattatttatacaaatatttttaatttttcaataataaacttctgttttggttgcactttctcttttcatcggtaaaagtttgtcttcaagtattatcttgtatgttaattcgttttcaaaagaatgctgtttgagctctgtgtgtcgttattttactgaacgcgttaaaagacagccaaatactattctgaatgcaggaattataccatgaactacatgcactggacaggtttgaattagattatcagcgtaagcgtgtagaagaagagatgtcaacaagtactcagaaaggtaactatgtggtacttgcattgttagctgttgttctccaggatgatatgtacttttctgttttataattggatttgtaagcatcaattgcacgttttacaccaaggttggtttaattctcatcccattttttcttttcctacctcatttttttgaaaactcgtaatataattttcaaatatgttttcacgccaataaaatttccttaaatgcaaacatatccttactttattatattcaataagagaaagtgaatttgtaaaaaggtgaatagagtcacacatcattcaagtgtgtgtgtgtgtgcgcgagtgcgtatgcgtgtacgtgtgttaatatcaacttgtgtaaatttgtggtgagctaggaaacagtacttaaatgaatggtgatatgtgtaaaagactgttaaacgtgcatattgtattgatattgataccatttattatgatctgacatttagagatgtttatttataaactaatggatatttccaccatagaatccatttactagaaaaaaagagttataccatttaatataattttaaaaaaagcttagtctagcttgtgtattggtataaagataatattgtggattggaagacaatgttgcacaatatggagcagttgaggaaaactaagtaaagtagaatgttaaaagtcatttcaacctaatgttaagcacaaccaaatactgaacttagttttataattatattgtatttgatattgtttaactccctttgtcccacaggcgataatatgtcactcttgaggtcagaactgaaaagccaaaagaaaattgttaagaacttaaagaaaaagtcactttggtctaaaagtctggaagaggtaactttcttctttcagtatggtatttactatatattaactgttgaagatgactgttagatagtagcccattggctttataggttcaaaaacttattttatgactgttatgggattagtaataccatttagagaagttttctaaagaagctggtctgaaaagcccttcaataaatatgtaggaccttgcaccattaagtaaaagaattctgaactttatcttatttcttttgtttctcatatgtccatttaaaattgtaacttttgtttgaaatagtttttgaacaatcattcataagctctattttttcttcttcaaatactcaaaagaaaagaatatccaagatggatgctcctagtgttcacaatcaggttataaccatagcagggacttctttccatgcttaatatatataccaagtattttctatcatttattattgttgttgatttattgcaggtaatggagaagcttgtagacattgtccattttctacatctagagatacaaaatgtgtttggtgatgctggtatgtatgcattaacggtgtaacatgaatagatttattagagatagatattattttgctttttttttttctgaaacaagatattattatacacatcatacgtacgtaatgatttgtatatttaagattaacaatgatagtattttcgcccatttaatggattgaaactgtgttttgaagtggagaactttaatgtttgtgttccttcacaatagaaatattaaacaaagttagtgaaatggcagtgagaagattcgggtatgaggttgtggcaggggtaattgtgtccaaaaaagtttgtcaagcatatatccttctatctaaaagtgctcccttgatctctagcctgattgattatgcctcgtattttttttcactacagagtaatacaattttcatatctataataataatggtgaaaagaacatccagtattcatccaactcagagagtatatataacattctcaatttctacagatgatgaacatataccagcagcagaagaaactccaagcagccgtaaaaaattgggacctgctgggcttgcactgcattatgcaaatataattattcaaattgatacccttgtaggtttcccatttctaatcattctcttcatctcattctgcatcttatgattatctgtttgcatcctgtatctactttttctcaagaaacatgattgattatgtattttatcttgtagttatttcttgtttaactccatttgagttgctcatttagcctatgcttgattagattttttttcataaaaaaactactgaatgttagaaatagtcaaacaaacaagtaggacaggccgatcttagaatattgcagttttgttaagagatagctttatatttttattgttttggtgcttggaagagcttgatgagaggtgttgatggtgatgagaactttatgagatttgatttgaatggttccttgagatcttcagggtttacagtgtatgtagagtttatatatgtaattggccagaatcttaagggtaatttgtagtaataatatctaacgatcttattatagaatacatatacaccaaaattagttgactgccttacttatctgtatctcccaatcattaatctagcactgttcatatttaatgaggagagtacagagtaaagttaaatcaggggcagctgctaaatattctaaactgtgatactgaatctttgaatctgataaattgatttcagtccttgattgagattggttgctagaatatcgtaaatttttccgacatagactctgtggcaggtttagagtgtaagggagtttttgaacctggattacatttggccaagttactgcttagtttacactgagacatgtatttattcagaaatataatccattgcagaatattattcaaatgttggaatatatagatataattattatgggcaaagatttttgtagttgtgatattatagtaacagctaatgcttgtagacttcagaatgccgatgcttatcaaagatgtctcttaatgcttagacaaatgtgatggattgaaagagaaagatagtatatttaaccatgtatcttaatgaaaattacaatgccacattaaattctttgtaaacatttcaatttttgtagatcttacaaaacaaaatgaagtatgtgtcgctaaaagagcccttttttttatctgtttatggctgtactttataagttcatattaaattattaatgatcgagtgcaggaaaaatttgtgggcttatgatgcatattctttttatgaatatcactctccttaatatgatttaaatgttttctgctgctgcaataaccaggtagcccgatcaagtgcaatgcctcctaacacaagggattctttgtaccagagtttgccaccagcactaaaatcatctttgcgctccaaattaaaatccttccatgtcaaagaagaggtagcatgggtgcttgtaatttttccttgacaagaagtttttctatgtggttcgactcttttgttcgtagtgatgttttatagttatgtgtcgatccactgatttcttttttcctacagatgactgttaaagaaatcaaagatgagatggagttaactcttggctggcttgtcccagttgctacaaacacagccaagtaagatgtcctgcatttcttgccctctttttctgtgtgtatgtatttgtaggcttgcattaatgaacttatggctaatcattactatgcttgaatttattttcaaaaaccagagctcatcatggttttggatgggttggagaatgggcaaatactgggtaagtaataaaaatctatcaagttttgtacttgtagcatatttctctttcaatgagtgcttctcttattcttttgatgattgtacagttctgatgggagccgaaaggcagctattcaaactgagataatgcgaattgagacacttcaccatgcggataagggaaaaacagagtcctgcatacttgagatgttgttgtggcttcatcatttagcctctaaaagcaaatctgccaacacagaggttaacaagtcacctttcaagtccacatccgacccaatggcaaatcaggagcccaaggacatgcaaaccaatgcaaagtcagtagtgctaacgcctgaagactatgcaattctgcaggcgacaaccaagaaaagaagaattccaggtatcagcaaaagccaggacttcgacgctgagaggacctgttcgagaaaacgcagctctcttacacggagtagcagctattctcctagaagagaaagcagcaaggaaccgctacctttcaataggctttcttctggggttcgtgttctggatctcgtatttgagaaacagaaagtattggatatgatagacagagtggaaatacatagatagatcacagatattctgttgatcctgaatttgcacccgggagtgatgagaggggccagtcgtgttctgtaaatttactacacttcgttctattttttatttattttattaggatgttgcacttgggtcgagaagaatatcaaactatatttttgggttgggaaatataacctttacacttgaaaatatatctatatattgagagtgaagaatgtcgctaggtagaaagaccatcgatattatgatattattgggtgcacagttagaaataggaacttgttgaacttgaggttttggagtaatagttaaagaatatgactatagcaactattacctttttcaatagtgtataataaataaacaagattctatgtaacatatcaaattcatccatcaggtgagatttttgtgggttacatgttaaatgtcttgtttgtttgtttcgttttaagaatacgatactttattaggattgcacacaaaaagggttacatatgaaggggtttcttccaaagaaaaaagaaagaaaaaaactagtcaaaggatatactaagtcaatttatgacccacaacattaaaattaccactaaaatgagaatgagatgctttggaagtttagacaatagaacttaaaagtcagaaaatataattgctaactcattattgtacacattagagttatttaaaactaaaaccagccataaagaatctaaaaaaataactttaacatgcaaaacaatagtacaaacctaattcaatccctccaaaaaagtaaagtttctattcgaaatgatgaaagaccacatgtatcataaaaaccaacctaaataagtgtccccttaagcaaacaaaaatatacgataaataactcaaattttagaatatactctatttaacaatcgaactatcagtcaaaaataaaaataaaaactattaaaccaaagggagatccctttagttacaatcctaaattttattttagcttattgataatattgtacctgataaacattgtattataattacaatcttaaaatttattttaagggtgcgtttggaagtaactatgtaattactaggtagagtaagtaattacactatattttaaaa

SEQ ID NO: 110751 - DNA, 1754 bp, Cannabis sativa
agatattgcttgtcaattacttgttttagtattagaaagtccaatagtttgtctctatggcaaccatttctattcatcttacacgtttaggaaaaagcagtgcttttgagaatgtctattactactaattagtcttaaatttaaattactttttattaagtggttcatgaatgaaagcttatgtatggcagactaaggacatgactaggaggcttcaattaaaggggaaacaaaaaaattgacattgagatcgaatccaacttggaatttttaacaacgatgaacactctagatgtcaaatccattgaatttatatattgtacccttcagttcaaaaatgtgccaatagactttttaaactaagtactctattttttgaacagctccaaaaatccatgcacaataaacatatgtgcaaattggttctagttattaagttattatgaaacatatttctatcttcttcttctttttttcaaaccaagggtaaattctatgtatgtagttggaattatggaatattaataaataataaatagtttgagttaaaagactttcttgtcacagcttttattatagaaactgattaaagggaccgtgagttgtctaaactctaaacccttcaatttattatattgacatttctcgttgatgaacactaatgtttttcaaactctgcataaatattaaatgcttatttatttttttctgttttgttttgggatatacaagtctcattacattgttaaataatcacagaggaaaagatattttttttttgtataatcaacaatcaatttgagaaaaatcacatgttacagttaatttgttgctcgagttagtaattatatttcaaactttatcatctagaaaaatttaagtgacctgctaatttttgtaactaatagtatttagttaaatctaaatttattatctaaaaaaaatccaattagtaattaaatttagaatttagccagtcgatcaaatctaattagatctcaaaatttaattattaattaatttagatcgatttttttaattaaatatctaattagacacttaatttttattattaacttaaaaacataaagaaaaatacctaaaaaatctgaatgcaaacattcatttaagtttaatactatataaatatatcatccttacaaatttaatgcaactaaaattttaaaataactaaaacaacaacacaactaactaataaaatagaacaaaatatcaccaaaataaatacatagaataactaagtattacaaattaacaaaaatatatagtaaaaatataatcaaaatagttttttttattacatataagtataaataatttttttaatatgtatttgtttatcgagattttcgaaaactaaatatatttagaacttaagaaaaaaataacagaataaataacaaatacgagatttttacgtgattcaggcgtgagctatccttagtccacgaatccattttattaggctcattggctagtaaatgtttatagaaattggaatacaagggactgaaaatctatgttcctcttattcatcttcaagaagaagcttagtaggaattttcttgtagagtttttatgcatatagtatagtattattttctatcttccaagtgtctccccccgtatattatggaatgtaggtgttaattccatttttggtatatttaattgacaaaaatattttattattcattgtatattttcgactggtatgctttaatatggtttcc

SEQ ID NO: 110752 - DNA, 4493 bp, Cannabis sativa
acaaactaacaaaaacagttagaaatcagttgctaactgaagttggttgctcacttgtcttgacaagggaccaaaagagcttcatgaatagtcttgggaatttgagtatgatctagagtcgagataaaagctctaaagttctgagacaaacttgaatgtgacaaatatttattgagtgggggttgagtgcatgaccagactcctttctttgtgaaattggcttgtcagaatcacactcaatgacagagtcaagtttaatctcttcttgaaaaatctcaggattgattgggactcgggttggactcatggctttactgaattgacacaagttgttcacatatttgcctccttttgtagactttgataattttctgaagttagaaggggaatagaccgaaatggaggctttggatgtgtacacttaggaaaaggactagttgatggttgaaatggaggttccagatgtatagactgaggacaagggctagttaacgattgtctagcggcattagactagacacttgaaggcttggaattaggtttgtgctagttgcaaacttaaatttttggatatttatgccgcaaatttccctaaagagaaagattacactaggatccaaaagaactaagatttactctaacaatatgctttatagtttaatgtaattataatgtagttgttggaactcaaggttccacaatttgatcatacatgccagggacaccactcacaataaccgagaataaagccttatggctctcacagaacacacacacgttcaagtactaaccaagtgtttacacaagagagcgagagagagagataatgtttaatgaattgtttctttatttaatgtaagaatgattacattaatgatgcgtttactaaactgtaattaaaatcataatatcaatgggagaaatgaatcagtttaaaatagaaaataatcgtaaacaatattttattatgctgtttactaaactctctgaaaaagaaaaccagaatcatactattttatttacataactaggaatggtaatcggaatgctttaatttgacaaaattgtcattgttagaatatgtaattattttctgtttatagatttttaaagggcatatttgtcttttttatttttaattaataaaattaaaataaattaagttaggaaagggaaaggtattccctataaaaattgggggagaacctttccctttgttttctctctaatttgtgtgggtcccagtactttctctatttccaaaatttagtaaacaattgtatggaatcaataccacaccattcattcccattccctttaagtaaacatgccataaaaggttagtttaatgggaattagttaagtctatttatagtaggacttaactaatgtacaagggtagtttagttaaaccataaactaaactaattcactaaccactaactatattaactataataaatacttatcataatacactaaacagtcactacaggagaaaaaatttcattatagtctatacctttcctttaagtgaaacctctagcaaccaaccttgctttgaatctagcctcttcaacaccttcaatgcctactttatacctataaacccacttccagcttgtgacttttctattgccctcattcctaataagaatccatgtcttattcttgtttaaagaaatgacctttgagtccaacgcccttccccactcaacattattcttagacttcatggcttcgtcataggagtttggttcatttgtggctagttctgctacactcaatgcataatgaactatatcaacaaaacgaaacctgtttgggggtttgattgttcttctactcctatctctggtaaggtgatagtctttagtgtcttctaagggctcttcatactcaattttttggttcagcttcaagttcaacttcagattcattttcttcattcaaaacttcttctgtgatggcctgttcctgctggttattgttttcttttccctgtatctccacctcaaactgtaagaaatcatctacattagcaccatagttttctggcctggatttaattacatccttgtacatgttgtcctctttaaaaactacatctctgctaatgaaatacttctggtgattactagattcaatgctcatcatcttgtagcctttaatttaaccacttctggatatcccaagaaaatacactttcttgctctaggttctagcttcccttgcctaatgtgtgcataggcaacacaaccaaaaattttgaggtgttcataactggctatattacctgtccaggcttcaattggagttttatattcaattgctgaggatggacatctattaattaggtagcatgttgtcttcacagcttctacctaaaaattccttggcataccagagaaaattaacatacatctaactttctctaggatggttttgttcatcctttcagctaatccatcctgttgtggagctcttggcacatttaggtgtcttcctatgccaacttgtttgcaatagttgttaaattggtccacacaatactccaatccattatatgttcttagcatcttaatttttctttcagtttggttttccaccagggttttcaattccttgaacttgttaaaagcatctttcttattccttaagatggaaacccatacatgtctagagaaatcatcaataacagttaggaagtcccttgctccacctcttgaaagtattcttaagggtccccataagtctgaatgcagatagcgcataatgcctttggatttgtaaattcccactccaaactttgctttggttgatttccccaaaatgcattgttcacacatacccatttcttgtatttgatccctgctaaatactcctattttgctgagaaatttaagccctccatagcttatgtgaccaagcctcctatgccataccagagttggattcttgacctctttagaagctgcattcacttgattctgcgtagtacttcctctcagtacataaattccattcacaattgtacattccatgatcacctttggctcttccattaccttaagtttcccattttcaacttttacaagataacctttctgatccagcatagacattgatatcagatttcttttaatctctagaacaagtctcacttattctagttctgtaatgcttccatccttgagtttcaatcttactgcaccaatttcagcaatcttgcatgatcaattatcacctagcttgacaatgccaccttcaatcttctgatatgaactgaattagttctgattaggacaaatgtaaaaagaacatcctgaatcaaaaacctaaccagtttggtgattttctttggacacgaccattacacttgcactatcatatccattactatccccatcagaaactgtcagcatttccatttctttttcgattgtaatctttcagaattgggcagtctctccttagatggttggtctaattgaatacaaaacattttattttgaattttgaacttagcttctctttttctgattggttctgacccttgttctctttcttaaatggttttacacgaattaaaaggccatctccagtgctttcttctttaagttctgattttctctttatttcttttgacatcaatgctgactgaacttcctctaatgtcaaagaatctttaccatatatcatggtatccacaaagtgctcataactttcagtgggaagagaattaagaactatgatgacttgatcctcatcttctaccttgatccctatattctctagatcaagtatcaccttattgaaatcatctaaatgatcttcaatgtctttctctggcatcatcttaaaagaatacaatttctgtttgagaaacaacctgtttgccaacaattttttcatatacaagctctccaatttcaaccatactccagcagttgtggtctccttcgaaatctctctaaggactttgtcacctagacttaagattatgacactatgtgctttttcaagaagctctagcttttctttctctgttagaccttcagggaccttcgactcacccagtaatgcagcttgcaattcatgttgaaccagaagagccctcatcttgacttgccacaaaccaaagtcatttttactcgtaaacttttccagatcaaactttgtgtttcccattttcttactcgattgatcatctggtcatggaactattttctctgatcaagattttccttcttgcacgatcaggattctccttcgaagctccaagatccaccttcaatcaatcttagctctgataccacctgttggaactaaaggttccacaattcaatcatacatgccaaggacaccattcaccataatcgagaatagagccttatggctctcacataacacacacaaactttcaagcactaaacaagtgtttacacgagagagagagagagagagagagagagagagagagagagggtgtg

SEQ ID NO: 110753 - DNA, 710 bp, Cannabis sativa
ttttattttcacattttttttaaaaaaaaaatcatacaattttttttttttaaaaaaattctaattaaatttcatataatttttttatttaaatatgtttatcttaataaacaatatatgttttaatttttattttatacttttaagaatataattagaaaaaatataaaaagaaaattaataaattaaaaaaaattatgtctcttttattctgtatacaacaacacagcatgaactagtaatcaatgaagttcacaaatttttttgtttgctcgtgaatttgttgtttgaattttcaagagttttcctaatcagggccaattctagactaaatccggctaaatctacatttatggctcatccattttagggactcaaataaaaagtatattttttgaaatacatacaattttttcaaaaaattattaaaaaatactatttatttttataatcaagtctattttttttttttaaagcccatttcaactcagggtcatacaaactattaatatgattgcacataaattaattgtgattgctcatttttcaaacaaataaacaacatataacatatttgactaaataactttatgtatttcctttaaattatatagtcttttatcagggccggccctgaaaatttatgggcccaagacgaattaaattttggggccctcaaaaatatatcaaaaaaagagtgttatgggatt

SEQ ID NO: 110754 - DNA, 2109 bp, Cannabis sativa
ttgttttttttttttttttggttcggttacagtatagacagaaggagcagacttagattccagagagagaaactatggagaaaaaggaaacatatattttcgtttgacctttttgaccaatcacaaccgctaaaacataagacctaaagactagattcaacaaaatcaacggcaaagattacataatcaatggaagtggctgtaggtgattatatttcctttttttattttatggaaaatattaaaattatggctgcattaaaaaatattctataacgtattgcttacacaaaacgacaatggctattgggtacggtagtccacgttgggctgttatttaatattattattatttttttttaatcgtttaccgtttggatttaaatgttatattttctatatgtgtcatcactcatcagcttatttggtctttttaacaaatagaacaagtgtctcttaaaatattatgaaagtaagaagagaaacctggatttgtacaatttaatagaaataataatatagggatatgtttagggatgtgattttgtcccgtgatgtactttcatggaatgtattctgtggtacattagatcggtcttaggtacattaaatgagtgttagggtacgtttctattttttaatcctaattattctcagatcaatctcagttgtcaaattaaataacttccttatctgacggctgccgtatatcacggattacaatccgtgaaagtacaaaatgagataaaattatatcccatataatataataggtaaatagttatttgtgtatcaaattatgctaactactaactagtacaaaaagagcatgagcctttacgttaagcaaatataaagggcatgaaaggcaagtccaattttataaataaaaatggtttagaagtttaagttaaatgacacttaatagtcatggtagagacatgaattgtattttattattatgttcacatcgtagactttttaagtaaagaaagacaaaaaaagaaagtagtgctcaaaagtgaaacaagtaaccgtttctagaaatagacttgggtacacatatgctatatcttgttttttagtgacctatattggaaagtgtaaatatcaagtccttctttaggctgttgtggctattatattataataattagtatttttgttcacaaacttcttacactatttaagttgtgtttctataatgtacgatattaataatacttcttaaaatataattttcataatactatagtctttttattatatttttatttaatttaattttaaaataaataaaatagtaaatcataattaataaatagatacatattaaatacatttttatcatttttacgttaataaataatagaataaaagagtttttattttttattataatttataatttaattttagtttttaatcattaaagtaaaattagtaaaaaatatttgcatctatttatcaattatcatccaccgcgtcactagtttcacgataaaattgaatagaatataataaaaagatcatgatactataaaagttgaattttgatggatattattaccgagctttatactataaaaagcacaacttagtatagtataaaaaatttaagaacaaaaatgataattattcttattattataataataatagataatgctagatccacactcaaattgtacacaattgttacatacaaccatacacattaaatattattcatttatattgttaagtgagaccatatcaattttaattatatgaataaaattaattacatatcattctaggttagaaagtgtgtctcaattatttaggttacatatcatatcacttttcttacatttttacaaactcttttatttatatttttaagattttgtattgttttaatgttatcgcaaatgttatactatattttcgcaacgtgtaaataacagatttttttctttaaaaaaaaaaaaagaaaacaaaatgtaaatgtaacaaaactatttcgtaaaagaaaaaaaaaaaaaaaaaaaatctattttgaagtgtaaaaatgaaagggaaatttgattttctatgcttagaaaatcaaaaaatttgatttttaaa

SEQ ID NO: 110755 - DNA, 7267 bp, Cannabis sativa
cagtatttttgaaaaaaattccgtataacagtatttttgtaaaagttaactaaaattccagtatttttgtaagtttccctaaagaaaagattgctaaagacgttccttacagaattgggcttagttctaactaggcccacctaaaaaactcagccctatctgtagtacgatatccagctagtgggcgttttctctttaggtatcagttattttttgaaataatttcaaaaatacacaaaaaaaaaaattacaaaaatatgattatacgtaattttaaatatttttacagttttaagattttatttacataaaatacgtttttttaatgtatttttatattgtactcttattattttattgttgtgttttttgttatttttatattgttttttatgttatttttctgttattttttacgtgactttcttgttatttttataaatattgtaaaaatgtaaaaaaaattctttaaacgtaaaatagtaaaaaaaaatttatcaaaaatagtagtttttatcgatttccctttttttgggagggaatttacacaatacacctaaaattaatttttttttacaatttcacaaaaaaaattatttacatttttacggttttgttgtttcaacgttttttttatgttgttacaatgttatactatattttcacaatgtaaaaaataacatgtaaattacgatttttcttaaaacaagtgtaaacaatagtctgtaagaaaaaaaaaagtccagaaaatgtaaaaaaaagctcaaaattcagtaaaaaaatgtaaattttttattatttttgggtatttatgaaacaatttcttttttttttcttttttttttttaagaaaagtatcggttaatttcactaatatgatattgcaatttacattgaaaacaataaattaatatatatacggataaaagtttaaaattctttaagactgtaacagattgtaacagtattttatttagtccctaaatgttgtttacaaatttgtaacactttaaactagggttgagcatcggtcggtttggtccgtttttttctatataaaaatccaaaattcggttttcggtctggattagtgcaatccgaaaaccgaccgaccaatccagaatctatcttaaaaccgaccgttttgaacctccgtttggttggtttaaaccacccaaaccgaatttttaaaaaaaaaatgatctaatttattctataataaatacattattttacattttacaactacaaacatacaaattaattgttcaaaactaattatcttattcttttaactttaatattaataaaaaaataatgtattatttttatgtattattagtaactataatatatccaaaaaaaacttaataaattaatatataattgtatgacggtcggtttcggttttttcggtcagtttattattttaaaaaaaacgaccgttcaatgacggttttaactgttagcgattttttcgatttttggtttcgtcggtttttcagttccaacggtgttcggtaagtcagtttgaacagttttttcaattttttaaattttatgatcactcctactttaaacttcaggtacaaaaaagaaaatatattgttacaaatttatagattttgttaattttgtttgcagaaaaataaaatccataattgcaattatatcattaatcattttgaaccctagattaaaaagatttaagtacttctataattttacttgttatagtgctataactactaataaaccataataattgacactagtcttacgagtgtactcacaattagatgtactgccagtctgccatgccaccatttattattaataccaccaatttgggctgtcactttctcaatgagcaaaatgtgggcattatagcaaccccccaagaactcagtattgcacatgtatgcacactcgaaagctcaataactcatcatcatcatctctctctctcaaagaaaaagatgttccaactcttctttctgtcttcagcttaggtccttggcatgattaattttggaatgaaaataatatcattatttggtaccagctttcacattcttcacaaagcttttttcttaaaaacaaaatcttctacgtacaccgatttgtgacccactacccattaatgagtattgagctttgagcgaacctatgccaccaaattgcctataatgcttctttcttttttctttttaccacatatacacagagtgccgtactcatattgaagcgatgaaaataaaataaaaaaatatatatattttaattagttacaacgtatatttataataaaatatgatatttatagatataatattaagtttgatgtaatgattaaattagattgcatttatgttagaagtccaatgttcaaatctcaccaacaataattttgtttttctttttaagtttacttttgtcctctactttaaaaaaatttacgcctcttcaccaataattttgtatacccattttctgtgtttgagcagaactccattggccaaggacacttcgagccgatctcagcacttccatagcagaacaagtttattcttccacaacaactcgttttttacagcccaaatcttccaactaaccattgctgcctccaaaataacagcagcaggttaattttcaattaacctgaagaaccacctgctaaaatcattgaccactaacccagccatactaataacagataaattctagtaagaacgagcaaaatcacattcaacaagaacattaaatatagtctcataagcagtattacagaaagggcacatgagatcaacatgaacatgcttactagtcaattgtaccttagtaggaaggcaacccgaaatagcgcgccacaaaaaatgatgaacttttggtggaactgcaagctgccataaagtcctccatcctccccattcttcttcaatagatccaacattattactcaattacggaagcttatacacacttttaactgtgtaaaaactggttgactctttattctaatactactcatccatctcagttgtatcacttagctagatagataaaattaattccctctgttgtcccaaagaggtcattcaacacctccaaatctcatgtctttgttcccacagacagcaagttgaataccgtttgtccctctaaaccaggatgaaatgaagagacatatggattatccaaatcaagcaaccaaggatcaagaagaatactaaccaatttaccacagccaattgatcttctaacccctgcccaaaccaactcctgagcttcaaaaaggctacaccaaaaactcagattttgtcctaaggtagctgttaaataactacctgaaggataatatctagctttataaattttactcactaaaaagtcttccttagtcaataatctccaactttattttcctaggaaagcaagattgtaatcacgaagatcacgaaatccaataccgccaatatatttgtgatgacaaagacgcttccatctcacccaactaacacctttactagttgaactagattgagacttccaccaaaactttgacatcattccttcaagacttgaacaaatttccttagttagcaaaaatatgctcatagcatagcttggcaaaccctgagcaacagacttcaataagacttccttacctgcttttgacaagaactgactctcccaactgaatatgcttgttttcattttatccttaagaaagccaagaattgtatttttattctttcccatgatacaatgcaaacctaaattaaagctattatctgaggcttccaacattcccaacatctcacacatatgagaacgaacatccacaatagtattcttactgaaaaaaaaaataatgactttgcatagttcacctgctgtcccgatgccatttcatatacataaagaagttgtaagatatttgaagcttcttcctcatgtgccttacaatatacacatagctatcattagcgaatagcacgtgtgaaactcttgggactcccctagccactttacatcgttgatttcgctcacaatatttcaacaaagatgatgaacactctgcacaaaccaaaaaaaagataaggagatgacggatctccttgccttatccctttgcctggaagtatagggcccataacatgacccccataagtcacattatacctgaatgtagtaacacagtgtataaaatgaaagaaactagataccggctaaaccccatacgagtcatcatagcttcaagaaatgcccaaccaaccctatcatatgctttaatcatattgagtttaagcaccataaagccttccttcccaattctcttcctcttcaagtaatgcattttctcaaatgataccataatattatctgatatcaagcgtccaggtaaaaaagtactttgtgtattcaaaattacatcaggcaaaacaactttcaatctattggcaagaactttagaaatgattttatacagaacattgcaaaaagaaataggacaaagatcactcatatactcaggaaattttttcttaggaatgagaattatattagtttcattcaatgaggaaaggaaggaaccagccgtaaaaaaaatgcatcgctagtgatacaatatcctcgccaacaacattccaaaatttttgataaaataccgatgtcataccatcaggtcttggtaacttattgggatgcatttgaaacaacacatttctaacctcatctatggagataggctcaagtaagcttgcgttttgatcaactaagataagaattggaatgctctccaccactgttctgtagtcaacaacttcagaagcatatagttgttacaagtagtccacaacaatagaaggaagacaatctttcatccaacccaaattccctatgaattttttaacttttgaatggaattgttccttcttcttgatgtggccatcacatgaaaatacttcaagttttgatctccttcttgaagccaaagctacttacttcgctgcttccaaaatatctcacactgaagcaagaaatcatttaactttaatttggcctttttatagtttgtcactgacacgggatcacgacctctcttccaatgataattttcaaatttacagtctttaattctttgtttaaaattactcgagtagtcttttccccattcaaataacacctctccacagtgttcaattttttcctttattgtgaaatccgaaagcaaactccaagtatcctccacaaccttaaagcacataggttcttttagctaggagttctcaaacataaaaatttgattttgagcaaccgtaatagaattcactggaactaaatgaaggggaaatgatcagacgtagacaccttcaaattaaaaagtttaacagaaggaaacttatcaagccaatgttgagtgacaatagctctatcaatttgaaccaccacccactcgtccgtacctctgctgcattcccatgtgaatgggtacccattcaattccaaatcatatagtccacactgatccaaagtatcacaaaatcctttaatcaaccaatttggataaggattacctccacgcttatcatcttgggaagtaacattattaagataacctattatgcaccatgaaaattcaaaattttctttcagagaaaattcttttcctcaagcttctattaggttcaccataaagactagtaagcctccacttcccataaccctaccctcaatcgaaacatcaatataatttgaaccataccctaacaactgaacctcttcaccaacttgccataataaagtaacaccccgactctttccttgaacattaacagaaatcgcacccttaaacccaacagacaaataaagcttttccacaacatcacttctcgacaatgtctcacacagaaagacaaaattaggtttcttttggaccaccaggtccttaatgaattgaaaagcccatgggttccaagcccatggaaattccaagatataagactcataatgactggtgggcctggaaccaagacccaccttgaacctattttttgatctagttcctacaatatttgcttgatccatttcctcatctaccatctcatcatccatgttactatcaaccaactcagtacgccgccttttacttttagtaataagagtcaactctttaccctgtggattgattgtactctgtaggcaatatctccaccattattttcatcacttatctttcctaaaatattgggatcacaattactttcaaaaattttggtatcagttttcataattctaatagtattaactgtcctttcacctgcaccagaccgacgagaatgcccactgcctatcaccatctcggactcttcattccctgtacgaagtcattgtgcaccaataaggtagtttttcttcttcttctacactctcatcccaatcccataaggtttaacaatttgatccacattttggtcaaagcgtttggaacattacctttctgaatgtccaatgataccacaaatgaaacagaaggttgggagatgctcatacttgaaagtagcccagatccactcgccattctccttacatagtttcatacgacacttcaatggcttctctgtatccactgtagcacgtacccgaagataaactcttcaaataccattgaaattttttagatcagatttgaaaaaagactcaatataagctcatgcactacatactaccttgtccatcatgaaccatgttcctaaatcatgaattcgcacccacatatccagtttatgcagacgaattgatcttggatttttaccactttttaaccaatggaacaacgggaacttattgaacatccatgggcacaaattaaccaatggaacacccacttaggatatccaattcatggtagaattggaataagcacaaattagtatccaattctttgatatacattaaaatgtatgtcatcatatggctcattgcatcaaaatcaattgatcgacctatgaaaaactttccttctagacaccatcgatcatcaaacactagctcatcccccttaaattctccaattccttgtcatccaaatgtatttaatataataatttttatgaaatattattaactatttataaagtgtcacctcggtattaggtaccactatatagttattatgtgtatcgttactctaatataaattacttaccttatttttaatagaagcttttttatttttacattttaaaccagttttttttttttt

SEQ ID NO: 110756 - DNA, 13792 bp, Cannabis sativa
  modified_base (292)..(304): a, c, t, g, unknown or other
  modified_base (6997)..(7004): a, c, t, g, unknown or other
  modified_base (13109)..(13111): a, c, t, g, unknown or other
atgggttcgaccttgcacttacatgaacactatattccgaaacgattcgtacacttgcgagtataaatattaaaacactcacttttgaagacaacaaggagagggagagaaagagggctgggagggtttctgcagaaaaagaagaagaaagaagaaagaagaataggaagaaaaagaaaaagaaaagtaaaaaaaaaataaataatgtttttaatttttttaaattaaaaaaagtaaaaaaaaaataatttttttttctgattttttatttttttttaatatttataattannnnnnnnnnnnnatattacgtggaccactaaaaacatgccacctgtacaagtgtgtacacgtggacagtctaccgtggcacataactgtgatttttggacggaggtgtgcagagtaaaacaaaaccaggatttaggtagttagccgccaaaatttcggtttttgtggttaagtgttagaaaccgtaaagttcaggtggtttaaccgcaaatatccctattatattatttattttttaaattaaacgcttcaaaatttcaatttgcctagttgtcatgcaatatcatgagataaaaagccacatcattgttccgttaaacatatttttgttggacataagtctcattataatgtatacaacagagcactatttttaatcaaatttaagagacataatcatacatgtgttataggttgagagcaaatatactaaatagcctaaaagatatatgctaaattatagaatattagtgcaatttacttgcattaaataaaactggataattaatataaacatgaaaattatgtatatatatatatagggaagaaaagaagcgtttagtgtttacattttaaacacgagctatgtcaaatagtacaataccgtcaaagaaaacataacatttgagtaaacaatcaccttaataccttatgtcataaaattaacataaggtgctaattaacgtaagacatatgttatataaaccaaaaatacaaagttaaaataataataataattaatcttaaagaaaagaaaacctgagaattgaaaaaaaaaaaagaaaaagaaaatctattaaagaaatgaagaaactttaaggcccgaaacacaagaacctgtacgcataacagtgtcgagagttttgtataggtcattcgcgcatggcctagcagtagggtcagatgcggtgcagtgcagggctaggttcatggtctccacgatctggttttgatgagttgacacgtgtcctccgaatacaggatctatccacgtgtcgagatggcagtcggagtagcagtagcgggcccactcaacaaaagtctcgtgcacgccgaactcgttatcggctgggcttttcccggtaaggagctcaatcaagattaggccgaatccgtacacatcgctcttctctgttactactcctttgcttgtttctacacagtatatacgtaaaagcagataaacctttttaagtataaaaattggcacacgtgcatgggtgcctggatgcatggataggtacatgggtacatgagagagatacacagagctataattataataaatatgggaagaactaatgtatggatttcaatgtttaaaaccacgtgaaatacattaataaagcaccatttagttcaatcactaactcaacaccaaaatgataaattgagattatccggtcaatactcgaattttataattgtatttttttttttttttgttactttgactaaatatatatcaaaatgaacatattgtcgtttcttctccggcaaattttgaccttttttgaactatgtgtatatatatatattgaacaccatatatatattcaatacaatagactatgtgttcatcatgaagttaattaatgataataaaatgagaattgttaaaaggaattattgcttagtttttttcttttttttggtgtcatgtgtaattaaatatcatgtgtaaaaagcataaattaaaaaataatttttaaaaatatagttaatgaatcttaagataaggtgctaaagtgctgagaaatagcattgctctaataaaatttaggattgaaaaaatatgtacctggggcaaggtaggatgatgaagggaaacccttggagttggaagaatattgcagtagtccaggaagggtaaaactcaggcgaggctcatcgctatcgtcgaccacaatttcatcaggggaaacatgacccaaaacgacatttggggaacaataagaatgcaaaaaacgaagagcttttgccaccccgattgcgatcgaacgtcgtcgttcccagctcaaactcctcaaaatttcactcaacaatttcccttcacaatactcgtaaacgacatatccgctgcccttctgagaagaacgacatactcccactaacttaatcacgttcggatgcctaatcttaccgaaccctttcacatccatccaaaaattagcaccaataaccgaaaagttaacgtcgttatttatctccttcaccacgaactcagttccgttaatacttgacttccctttgtaagctatcccttttctgctgcccaacgaattattaagcacgttatttcctctttggacggacgaaacgacgtcgtttagtgtgacagagttagcaatgctggaatcgaagaactgcacttcccaaaccgatccatcgtcgttttccattcttttcaagtccaggtactttcgcttacgattaatcatgactaaaacaaagactatagaaataagtatggcgaaagaagtcaaagcgataaaaaaacaagtgagaatgagcctccacgaaaaatgtttccttaagcttttctcacacgatggtaaaccactgctgacaatatcaccgctgcagagttcgttcccggcgaccgagctggcgtttatggctagaaatgctccggtaggcggtaaacttccgtggaaatgattgtgagaaacgttgacttggacgagcgactcaactcggcccagatttcgtgggatttcgcccgacaattggttgtccgataaatcgagaaaaccgagaaccggcatttcagtgatactagctggaatttctccgattagcttattgtgactaaggtctaaactcaccattctgtcgcagagagccaattctccgggaatctttccggagagtttgttatagctaaaatccaattgcattaaccttgaaaagtttttgatacttgtaggaatttctcccgctaaatgattctctgataggactaagttctcgagcctttcgctaccaaacgatttgggcaactgtccgtagaatttgtttctggccagattcagcatttgaagtgaaggcatattccatccctcgaaatcaattctgccggacatactgttgccggagatatcaaagaagtaaaccaagggaaattttgttaactcaggcgacaactcgccggagagaagattattctggagacgaactcttcgcatgctctggcactgagccaaacgctttggaataattccctggagagaattagaaaagagaatgagcttgaaaagcctaccggaatcgcacaagccgtctggtattctccccgaaagacgattagtggagaggtccaaaaccgtgagattgtttcgtttcccgagatctcgtgggatctcgcccgataattcgttggaccacaactgaagaacttgaagccgaggaagcgaagccaaaccggaaggaattgtaccggaaagtttgttagagaaaagatgaagaatctccaactcccgtaattgactcactgcctcggaaatctcaccggagagaaagttatcacttagatcgagcgaaaccaaacttcggagctcaaaaacagaacgaggaatcggaccgttgagcttgttctggtacagaaagaggtaccgtaactgggtgaggttcccaattgagtacgggattattccagtcagactattgtagacaagatcaagatgatacagatttttgagttccccaatctgtgaaggaatttgaccactgagattgttgtaacccaagtaaatcaacttcaaggtcttcggcagtttttgtggtatctcaccactcaattggttggaagccagggtgaggtactctagcccagaaatattaaaaattgacttcgggattggtcccactaagacgttacccccgagatcgagatattttaggccgtagaatgagccaatatcatcagaaatagaccccttgagcatgttgttggagaggtcaagtgcctcaagtgttaaaatcgcaccactcgggatgtctccagtgaaattgttgttgctcaggttgaggtaccgtagcatattagagccaccaaaaagttcctttgggagctccccagtgagctggttccccgataggtctactttttcgataacgggtaaccgaaatagatttgccgagagtttgcctgtgaagttcttgccagtgagttcgactgagctgactcgggacgagtttttgcatgtgataccttgccatttgcagacgttgtttggtgctgctgatgaggatgaccagtcggaaaggtggttaaagggatcattgatggaagccttaaacgacagtaaaagatggatttcgtctttaccatcatgcagagctgagatagtagaactcgtgctgaacaacatcaacgacatgaatatcaacagtgttggatgtatcatttgagctgctgatctattgctttccatgatgatatttgttatttcttttctttctcttccaaactcttgatgtctaaactcactgcagttagagattatcaaaaattattataaacatattatattacaattgattaaacgtaaagctgattcatatatatttggtttacatgtattccgtattactaactaacgtttataattattacataagtgaatttaagtaaactgaaaaattctacattaatgataatattgtgcatataatttactaaattgattatttaataacgaaatcataatatttagttgaaaaggtttaggtaaaacatctaaaacttacctaaatatcataattaagggggaaataaaaaaggatggtgatgatgatgatgatcaggggagagtaggctattggaatatttatgccatgaaggtttgagttttgagagtttaaataggtatatacattgaggaaaattaaaaaggaagaaaaggtatatatataggagaagtggacagagaatttgaacataattaccaaagaccacccatttcatgacaatctaatcttgtttgagcacaaatggctgaaagggatacttgagagtagagaggaaaagaaaaaaaaaaaaaaagaactcctgattttgtcggcttctttacacaaaatgccaactctttttgactcactcagtgactcagacaaaggattttcattagtaaccgttgaaaactttccgaacatttatttacatgctgaccatgtgcatgagaagccatatgcagactaaagactaagtgggctataaatttgactcggttttaagatatttggtactttaaatttaaatatattttttttgaactgggtttatataaatattaatttggcaaaatattatccaattatattgtttagtgtattagtaaatctatttttaaagaggaagttatagaagattaaaatttcacactttcattttgctttttgtattattgttgcgatttgaacttaataattataattactaatttaaaatgtagttatactaaaatttatttaacataattggttatttagtagaggcgaaagaaattagaaagagtaaacatcaaaattaaaacataattaatttacaaaaaaataataataatatataagaaaaatacaataaaagagagtataaatataaaaatatttacaaaattaaagtatacacataaaaaaaaaaacaaaaatgactaaattgcaaataaaaaaacagatattaaaatttcagggtgggcatatgccacccttattctatattggtctgccactattcttagtactactctaagggtgatgccttttaaatagttattgattttttataattattattaaaaataaaataagtaagattccatattaaattgtaataataactaataacacttcataaaaagtattagcatcataaactcttatcatttcattataaaactagataaaagcccacataaattttatttattaataatttattaaactagtagtaaatgatatatacaattttacagtgaaagttaaaagtaattttataatttttaatattgtagcttgatggatattttctgttggatttgttacaatatcttatgattgtagcttggtgggtgcacaatacggattaccatgaatgggtaatatattaagaaaatttgaatttttatatttaattagaaaaatttctcattttttattatatagattgaggttgttgtatcggttaaaaaaataatagcaaaataatttttttagaaaataaaagataaaaaagatgagtttaatttaaatatttttatataaatatatttttatatagtgtaaaagaggtaccttttgatatttttttaattaagtaactaaattaaacatataaatttaaatttgtcttttattatttgtcaactaatcaaaatctaatggtttaatatttttaatattaatagttatagttaaatttatttaatatccatcaaacatcaaagggtaatacccattaaaaaatattccatatatatatataggatatatatggattccaatatcatattttttttcctataaatatatatcccaagatcttctttttctttttctttttcttttatatatatatttatggaaaattttataatgtattcccttaaaatgtatgtaccgatgtatctctatttattttggtatccgaaatgattttttagtcatatttcttctcatgatcatgtatattatagttatttaagannnnnnnnaaaattttaaaaaattcgaaaaatttaacatgccgaaaacagagtttaaattatttcgaatttctcaaaattatgtaggatactttaaataattataacgtagtcgtacatgagtataaaaaaaaattggactaaaaaattcttttggataacgaaacagataatgggtgtaacagtaaattgtaaaagtaccatatattgttttacttattaattgatgttgactaaataaatttaactaaaaatattaagccattatattttaatataatagcaaatgataaaagataaatttaaatttctgtatttaatttaactgtttaaataaaaaaatttaaaaaatattttttttttacactatatcaaaaatatatttatatataaaatattaggtaaaactcaaccttttattattttttttttaaccaaattttttttgagccaataaaaagactctagcctatataatataaaaatatgagatttttttttttaatttgataaaaaaattaagaataaatacttaagaaattttctaaatattactagaataatatccacccatttatacatgtttatgagaattagttctgctcactcaaattttgtcacccttccagatattatgagtagtcaatttacatagtatatggaagggtgacataattcagtgagagatcaccttataatactaccgatgattctcataatatatatatatatatatatatatgcagagatctttactaacatcatcatcaactgattcacattaagaaatggtttgacacagcacaaccgtatattctactacataattctaactagctatattttatgcaggtagtggcaaagcacagacaagttgacccgcactgtcagattcttcaaatcgaaatggttttttttcttttttcttttttcttttttcaatcaaaagaacaataatgtttattttttatttttttcaaaattttctatttttaggctccatgatcagatcagatcagaaggaatttgactaatcattaatgcatcttcctatgtgttgtcattggttgtttaataatttactttgtcagacaggattaggcatcacaaatcatttttttcagattattcttcaaactctttgcttttcggtcgtctattttaattatacatatgaaaaattaatacatataatataactaggcacagcagatatattttattttcatataataatttttcacatgcaagcaggagttttgagtttgggggcaactcagtaaattactttaactgcaaaaatgaagtctctaagattaaaaagaaaaaagcaatattcttcgaccccttttgtttggacgctttattattatcttggattcttcccctcagtagtctgtagtagagtggaaaaagaaatcttttcagagggaaagagagacacaaaaattaaaagtgaagaggcaaagtggaatttgaagagaaagaagaagaataaaaagttgggtgtctttacattacattaatacatagcaatatatatagcgctataggctaataatgctcgtgcgcacactacacaatccttttgagttgagttagtcttatattctctctttttcgcattgttcgtcaatatttattggattattaattaatatacatatacagactactctttatgcttttaagggtcccaccgtctctttctcgaaggaatatacagtgaatggtctatatcatacccagcatgctttgctcacatccattttctagggttttacaaccagtacacaatgtatatattctcatctctctcctaaccccagccattgcaaccctaaactttatgataatatataatttaggcaaatggatgatatgttttatgagaaatgctacgcagcacgtaatacaaaaactaattttgtggttgttgacgttgaaaaacgaccaactccctatcatctaataagcgatagcgaccaccaaaaaaataattaaaaataaagagaataacaccgaattataatagttcactctctatattactatagtaatagaattacgtttacttcgaacttttattatcacaaaactaaatttccttataagagaactagagaaaaattgactaaagtaagcttcaccttacaatttctagaagaaaagaaatgaggagagaaaagctctgatcttgtagagaggatagagagtgtgaaaaatgagctagaggaagtttctttttatagggaagaaggtcccttaaaattacaataaaataatgaaaaattcatataaaatttgctggaaaattatggacgagatcgcgaattaattttgaggccgaaaacatcaaaatcatgggaagaacattagataagcttagatccgtattgcaaaaagctttccaacgccacttgaaatgcgccatttagattaaaattgagtgagctatggttaaaatatttaacagtgtacaggattgaaaaattgataaaactgatgggcgaccaggtttacgtaaaacgtcaatcgagcacccaatactatgtgtcttaggctttaggcatattttgagatgcttggatgatgtcaaggattgcttagttcattcattgactccggtgaggttgttcaccatctccacacaattttacttgtaatgacattttaaagatctaaattttaagatttattaaaaaagtgttgagtctttctcatttttattttgatgggttacgatttgataattgtcaaagtttagggtgtaaagtggttaatttataaagacgcgtcagtatttaaacagaatagtgggacagaacctaacagaaagactaaatttttgtaaatgtaaaagttcaaaagaggattcttaacaagccatatattttagaagacaaaattaatattgtcgaaagtttaaggcaaaaaatttctaattactcttaatatttaccactaaatatcaatattacatttacattaatttgaaatcaatttttttgaatgatcagctaataattaatgaatttttgagtgaaaaattaatatacaaaaaaaatctaaataatatcataatatttgtttaataattatactcattttattgtaatcatttatatgactgttggaattatttttttatgaaatttttttataaatgaattaaagtatttatgaagaaagaaaaacagtcaaagtgtaatgattattagtaaaacatgtgaaaatgatatgaaattaatattaaaaaataaaaatttgaataataagaatttaattaattaatttatttttaactgaaaaaaatcaataaatcttgataaaattgataattttgtcaaaaaggcctaatttaattttctcataaacttttgtttcagcttgagacgacccttgcctaggttgacataagtcaactggggacactctggtatacttttccgaaggcaccacgaatctggccactaaagttggccaggatgatacaagcatcccggtggatctaaacagtcgacccctgtctccgaggaccttccacatgcacctctaactgaaggaagaatccttaggggccacccccaagaacaataaccaggtttttctcctggtactatgtaggagagacgagaccaagaattggcgagccccatgtggacttgggagaagttctcaagttagccagacttagagaggtcgtctgccaagccaacctaattgaagaactatgcgctgctgactatgatgtattcgttcagcatagacgcaaattccatgaagaaccacgcgttgttgattacgatgtacttgctcagtatagatgcaaattcttgagatggatggatggccaagagtgcatcattcgatctcaccaagcagggttagatcatcgcaatagagaggctagcaatctgataagacgcttcaaccagagaactgatagaagaggccaggatctcatcaaagatccacttcaaggaagattttttgatagatcacatgctgatcaacccagttctttaggaacaatgacatatgttcccttgagagggggaggacaaaccttgtctcaaaggtctaacagcgagaacaaccaaatcccgacaaccagcggcatggagggccagccaggaatctcaggctcaacaacagcccccactatcaatcctatggtcagccaaccacctctaggagtccccatggctggcctgattcctccagaagtccccatggccgacgagactcttctagaagtccccatggccagctagactcttccagaagtccccatggttggccaagcttttccgaaaatccttatggatggccagagaagagcactgcctccctaagaggagcgagtcacttgaagattaattttcaaccaatgaggatcgagagcgggtcgaaacacccaaaacaataatttgtgaagtgaaattaatcacttcagacagttggatccaccaaactccagcaattgttgtgatctaccctatgtcaacgtacaagctccactagccagacagagaagtgtgggggctggccaaccatgtacaagcaccagactcagggctagtcaaccttgagtataccctctcccatggtatggccaactaggctctggccaatcaaggcctgcagtccaaccaagaagggacaatcaagtacgcccctgcagcaacagatccttctgtgcaagcatagttggatcaaatatgagacatgctcaagggcttggctggcccaaaaccatcagaccttgagatggatatgttaaggggctcacctttcttggcatatattaatgccttacccttacccaagtttaagatgctaaattagaagatgtacacatggaaagaagatccccaagtacaccttaaatactttgagatccaaatagatctccaacaagtatctagagatgtgcaatgctgaatctttctggcaaccctagctgaaatagcccaacaattgtatttcaagctggccccaggaagatttaattcttaggaagaattctcccgagagttctatatctagttctctgcctcaagataaatacatacccgactggaggatcttgtcgaaataaagcaaagacaagatgaacccttaaaggactacattcaacggttcatgggtgaagcaaccaaggtcacaaacctaacaaaagaaggccgatatacaaccatactcagaggcatcctaccgttgagtgacttctggaaagatataaggaggatctcaatgaataacatggaggagttccttgagctagttgatggcttcataaagttggaagagctgtctggaaagcctagaaaagaggataggacaatgataaacaaataagcagtcctgttgaatttttatgaaacaagcattggcttctgggaaggaaggctgaagtggtataaaaattcaagcttagacttcacttggaaagatcaacgggaaagcatcacggggagtaggacaaacttcaagcagtccttccattctaggaaggagggatgaagatgtgtcgtacccccaatgatctttcttgcacaaaaaaaaaaaaataagcatgcaagagtcctgttgaatttttatgaaacaagcttcggcttctaggaaagaagtctaattgtataaaaattcaagcttagacttcgcatgaaaatatgaatgggaaaccatcacggggagtaggacagacttcaagcagtccttccattcctggaaagaaggttgaacacgtgtctaagctttcctacccctgtgatgctttcctattcatccttccaagcgaagtctaagcttgaatttttatacaacttcaacctttcttccagaagtcgaagcttgttacataaaaattcaatatgactctcgtatgcacgttgtttctcgtgcacaaaagatcactgggggtacggtacgtcttcaaccctccttcctagaatggaaggactgcttgaagtctatcctacccctcgtgatgctttcccattgatcctttcaagtgaattctatgcttgaatttttctacaacttcagccttccctcctgaaagccaaagcttgttacataaaagttcaacatgactctcgcatgcannntgttttttgtgtaagaaagatcactggggttatggtacatcttcaaccctccttcccgaaatggaaggactacttgaggtctatcctacctcccgtgatgctttcccattgttcctttcaagtgtagtctaagcttgaatttttatacaacttcagccttccctcccggaagccgaagcttgttacatgaaagtttaacatgaccctcgcattcagattgtttttggtgtaagaaagatcactgaggttatggtacatcttcaaccttccttcccggaatggaaggaatacttgaggtctatcctaccccccgtgattctttcccattgatccttccaagcgaagtctaagctttaatttttatacaacttcagccttcccttccaaaacctgaagcttgttacataaaaattcaacatgactctcacatgtacgttgtttttcgtgcaagaaatatcaatgggggtacggtatctcttcaaccctccttcccagaatggaaggactgcttgaagtctatcctacccccgtgatgctttcccattaatcctttcaagcaaagtctaagcttgaatttttatataacttcagccttccttttcgaagccaaagattgttacataaaagttcaacataactctcacatgcacgttgtgtttgttgggttttaagccctaaata

SEQ ID NO: 110757 - DNA, 7065 bp, Cannabis sativa
cgctttgcttcgagcatgcatatgcagtatcctgctcggactatattacttggagtcgattccacgtgtcaccatcctgtgatgccacgtcagagtgcaaaatttgggataacaaataatattgccattcttgctaccacttgctatggtatttggctcaatacaaacaagtgtatttttgacggttgctccagaacgttagctcaattgttgatgaagtgaagagtgtagttttatacagattatactttataaataacaggaaaattacgaggcaagagaggaattacctgaatagattacaatgtaattaattgttttttcttgtttcttgtttgtgaggtttgtataggtgaggcctaagggtgtaattgctttgtgtaaatcaaagttctttggggcattgggttttcgttctctttcctattttaatcaagccatgttggctaaaaaatcctagaatttttttaaaaatcttgattctatgcttggcaaacttctgaaagctaaatttttttttcttacaagtctttttgatgttaaaaaaggacactctccttctttcacttggacaagtatactatggggaagagagcttttgaagagacgcctattgtggaagattggtgatggtgctttagttaatactataagtgatcgttgggcggctaggtatgattcttgtaaaaaccatttgaggccaccttcaaaattttgtctttcttcattcattctttgtgacattgggacttacataagcttaaacaatattttggggatgatgatgtttctgccatcctagctattcctttgattatgttacgaagtccagacacacaaatttggagactcactacaggttagttcaatgtttattcgactaaccatctatccttttcttctagttcttatccttcctcctcaaattctcaaatcttgaaaaaatggtggactttcctttggcactcaaagcttcctcctaagattaaatattttatttggtgaatgtatcatcatattcttcctgtggctataaatttacattctagaaaagttattcttaatgcaatctgttcttggtgtaataggcatttggaaatagtttcccactcgttactcgattgttctagagttaggaaattgtggaaacattcactgttttaacattttttgttgagttatcaatgtctagatattaaacagtttatactgacttgttttgaagaattgaatagctttcattgtgaactaatatgtgggtttctttgggcaatatggaatcaaaggaataatcatcttttcgagaaatctaactgtgtctttgagaaagttttcaattggttatcatcatatttataggattatacaaaaagtcaaaggcaaataagcatagggtgtcaacaaaggcaacaagtaaatagaactggtggttagaaacatcctccagctggaggtttgaaacttaatacagatgttgcttaagatattaagaagtcaagcacaagctatggtgctattgttagaaatgttgaaggcagaatagtggctggttgttgaaagcctttaattagtagaggcgatggctttacaacattcttttacttggtgtcgtgtgactggtttgcctatttctcatatcgagctagactctaaggttgttgtggatagggttttatctcctaaagatgactcttagccttatcggatgttgataaagaaattatatatctttatcctttctccaaatgtaattatttcctatgtttttagagaagctaattgtttggcatataaagttgctagaaatgctttagggtggataaagagttggtatggaatggaggtatgccatgttttgagttgtaatttatattcacacttacgcaactttccgaaaaaaaaaaaaagttggaaccaaaagttttgtcttgaaagctaggttaggaatactaacctagaggcagaaaatattgtttaatcatgaggaagtaacactcaaagctagaacatttatttattttatgtttgtcttactccttgtgcgattaattgctttaagcactagaaatggaaaacccccgactgtccaaatatgaaacttgacaactttgttgttccgataagcactgtccaaggcttataggcttcaatcctttaactataaaaaagattcccccacttcctctctctttccgtagccttaaaagttcaacttttccacttaattcaacagttgaccaaacgtctgttctaatccattttctcatttcggacttttctcaaagcctcctccagtttaagacaaaacttaccaaaccaaaccaaatcacactgttggtttcattttttctctgtaatttctccaatctcaaccaagctttgcttttttatcacgtttctcttctgtccaagtctgcatctgggttgtttttttccctatcagcttattccttacacctgaactgattggatttttctgatccaaaatctctagtttttctaaatccctgtctctgaaactcagtatattctgcttattgtttccaaattatttacctgggtttggttccagttgaagattcactaactgttttttctttaatccaaattgatcgattagtcttcttcttttgactcataaatgggttgttgtgcaagcaaaaacggaggcctggaaccacagtataatggttacagatcaggaggaggagaaggaggtggtggtggtggggttcactaccagaagcctaacgagccaattgtccatcaatccaaggcccaacaagctcaacaatctcaccaattaccggaaaagcgtccggcggcagcccattcagagcctcaacctgggtataagccttatgttcccgccagaagcccaaaacatgctatgaggtctgatacaattctggggaagccatttgaggatgttaagcagttctactccattggaaaagagttgggtagaggtcagtttggtgtgacttatctctgtactgagaattcaactggtcgccaattcgcttgcaaatccatatcgaagagaaaactggttagcaagaatgataaagaggatatgaagagagagattcatattatgcagcatttgagtggccaaccaaacattgtcgagtttaaaggagcttatgaggacaagcagtcggttcatttagttatggaactttgtgctggtggggagctctttgatcggattatcgcaaagggtcactatagtgaaagggctgctgcttctatttgcagggcaattgttaaagttgttcataactgtcatttcatgggggttatgcatagagacctcaaaccagaaaatttcttgctctctagtaaggaggaaaatgcccttttgaaagcaacggattttgggttgtctgtgttcattgaagaaggtatgtacttcatcttttccttggggatttttttttttatgaccattcttttatatgatacacaatgatgttagaataaaaagggtaagagtagtttcctgaaagatgtgcatagtttttttactctaagctagttgctctttagatttttcttgcttgagaatgcatgacattatatgatcctaatcttatgtggatgttataagaattttccttaaagctgcgcaccggcaaatttaaagaattggagagatgagtaagcgaaattttccttggaaataatgattttgtttcagttggtgaatttcgtttacttgaagtagtttagttggcaatatgataagtgatgggtaatttgtaatcctataaatcataaggctcaattaatgttgctttttaggtttgtctttgatttaaagtaacattgcatatgttgtttaagaaaataaaaaataaagtaacattgaacatgcagaacatcatcaacatttgcttgttctcaggggtagttagttccactcttccgaacagataatattttgatctgagttaattgaatatgcggcttggtggcattttggcatgtactttatcaaaaatgattagtttcatcataatttcccaagtaattgtagtcctatttcatttagtctccagataataatttttcagttcaatatgcaattggaagtccattttctttcggagatgcaaaatcttttgttttcattacaccaagaaggaaccatataatagatgtacccgcttgcagtgcatacgcaatcaaaacatgcatgcgctacttactttagtctgtgtaaatcaatatctatgttttgtttaaaagaaaaaataaatataccttggaatccgtattctttccttcatagtaccgctgttgatatcttcttctgcaaatgaactcttgccaggtaaggtgtatcgggatattgttgggagtgcttactatgttgctcctgaagtgctgagacgcaaatacggaaaagaaatagatgtttggagtgcaggagttatgctgtatattttactcagtggtgtacctccattttgggctggtaaagtattgttttatatctctttttgctcaacatagttgaataactacaaatagtagcttctattttaatttgtgttttcattataaagaaatcatttttggtgtaatagtgaccttttttattgcctttgacttacagaaacagagaaagggatctttgatgccatattgcaaggggaaattgactttgatagtcaaccatggccttctatttctagcagcgccaaagacttggttcggaagatgttgactcaggatcctagaaaacgaattacctcggctcacgttttaggtagtatctctcattgcaactcagtctacaatttacaacatcatgaaaaactgaagtgttgcacataaagtgtcttgccttggttattacaagatggtgatgtcttccattttataggtttcttcgatagttctttcctttacaaagtttatgtttcggccaattttcagtcaaccagaattctagcttttcatgtcttttcctgttttaaataaacctaattttggaatcaatgggatactgaagtcattcaaatgacattcttctttagtcccatcatatatttcatatcactagaaacttacttcacttgtttattgtacaattctcttagctgaaacctgttttatggttgggtgtagaacatccttggctaagagaaggtggagaagcttcggacaaacccattgacagtgcagttctttctaggatgaagcaattcagggcaatgaataagctgaagaaacttgctttgaaggtgaacttgttcccagtccaaggagaaatcattttggcacattgtggacaattctaataaacttgatatggatttcaggttattgcggaaaatctgtccgaagacgaaatccaagggctgaaatcaatgtttaccaacatagacactgacaatagtggcactatcacttatgatgaactgaagtcaggattggcccgactaggttctaaactcacggaggctgaagtgaaacaacttatggaagctgtatgatattttatcatattccaagtgaaaaatagttgaccagttttcttgtacatttttagctaactcttcattttttttttattttacccttttcaggctgatgtggatgggaatggaacaattgactacatagaatttataacggctactatgcatagacacaggctagagagagaagaacatctttacaaggcttttcaattttttgacaaggacagcagcgggtaattcttcttttatttccccttttttttcttttaaattttccttctttactgaaataatttccagtttcacgctgttctatttatcagttcggtacaaagattcataaaagcctgaaatcttaaagcagttaacatgtactaatggaactggagcacttcgtgagagtttttttttttttttttgcttaaagaatacctcataatatgactatttgactcaaaaatctttaaggaagatgggagaatcctaaactttctacaatatgttttggatttatttttggctattatcaatcttaacaatcagaacacgaacacaaatagagaaaagattaaatgaaatgttctagtgtttccctcaatgtatcttgtatcttgcttttagtttattttgttgaaatttattgctggcaataactttcaggtttatcactagagatgaattagaaacagcaatgaaagattacggtatgggtgatgaaggtacaatcaaggaaataatttctgaagtggatacggataatgtaagtcaatctttcattgcagttctacctcagcattgtaaattacaatgtgactttctaactgtcttccggtataacaggacggtagaatcaactattcagaattctgtgcaatgatgagaagcggaacacagccgggaaaactcttttagatgaattatctgtatgttaccattctaaatattaaagagagcatgcataaatagtaagtcactttcaaccacactttgggaaaagcttatgtacacaaatgctatcgggctaagaaaggatgaattccattgccattgaacatagggggccttcattttggatttattttgagtttgcaactttaacagttgtgcatatcgccatctttaattattttgttttttttaatgaaagtataccaacgtgttgatgtttgaagaagtaatcattacaatagagatgtatttaaaatcatactcctgtttgacagatccagctaaaaattgaaggctctatatggtgttgattttttgaggaaatttgagtttttataaccctatatgtaatgttgctcttcaaaaatagagtattggtgcctagtattaacatgagatgatgcaggggtgttcataaaatagccgatctaattcaatctgtacgattcaatccaatctaatctataaagtgcggatgtccgcacttgtacggattggattggattgggaaattcaaaattcgcacttgttcggattggatgttaattgacatgtaaaagtaaccgatccaatccacacatatttataaaaaaattaaaaaattattgttgaccgaggtttt

SEQ ID NO: 110758 - DNA, 1746 bp, Cannabis sativa
aggtttctcattgggtatctatgtatgtaggaagaggagcgtcaaaggaacaaattgggtatggatgtgttgtttgttcatgtgacttatcctttagcaatgaatatactttctttctatagaagtaatgttgatcatttgagcttgatcgatactcaaatcaaacaggaaattgttccagaatccaggtatttgtattagagaagtgcaactctattctttcgtgccagcttttcacaattttggcgctaaccttgctgtatttccttaatcatgcagtgatgggatgaatggttacatttttgtttctaatataccagtgcagcctgagcaaatatattcaccaattgatggcatggatatgatcgctgacaataaagtcttgtaagttgcatgctattttcgcatcttgtctggtcttgttcaaatgattatctttgctatcatatttgatgaatctttatttctgtttatctaggtccgtgttctacaattctcctgccttccatgctcacattcctagagcaccaaatggagttcattatccaaaaaaggtacaatggtttgtgttttttctagccgttatattctaaatcttggaagtttaatgcaacataattctgtgcaggagttgaaaagagttctaaaagtttaataaaaattagtggtagtaactttcattatcaatgatttatctgtgtttgtgaaacaatgttttcattagtttgtttgatttaatctagaaattgtttgtggcattgttgatgtctggcatctcagcttttccaattaaattgtgtggttggataacaaacatggttttgagcaccaaacacaccttttaagtgacccaaatttatgtatagatagtccctcaaaaccattagttttgtgtacctactaccaagtagcaacccaaagtttatattatcccgagttcttcctactggttctagtctttctttgaaaattgtgctatttctttccaatcacatgtcccagaaagtgactaaacttgctgcactgaccacatggttgaaactttttgattcgaaaagtgctgctccctatttttatggctttgtttgtatattcatgtgtataaaacacacaaatatataatttttgccaagctgatttttgttgatatgtttatgcagtctatcttcaggaggcatgttaaacccacaccatttctttggcatgagaagtcttctgttgttggacgattgcattctctaaggtgagaacgtcctaatgctatctttttatagagcaggttttgcttgatgttggaatttatatatatgagagtaattgtcagttcatgcaaagaatttgtttacatcaatcagattattcgagggtagactgattatttttgcttgggactttactgacttaatactctcgaaataaatgatgactgcatgcatgtgttttttgttttgtttcctttggctaatataagcttttgcaggcctattcacatgtctatctctggctctcgtctttcaaactcagctcgtctacttgtgacgaagtggtatcttgaaattgagaagcaacgaaagagcaagggagatgtagagcttcatggagctaaaactactgatgggagtcatgctgctgctgagggcaaaagcatcaatggtaaaactattgatgggagtcatgctgctgctgagggcgaaagcatcaatggtaaaactatgaaacgtatagctagggcccgcagacaaaagg

SEQ ID NO: 110759 - DNA, 7250 bp, Cannabis sativa
ttgttgtttttatgtttttgtgaaataatccctttataaaactttcaagacgtacaaaatcaaacgtataagactacgacaataattattaattatttagcagtgtattatattcttcttaacatgtgtgcccaagagaaagcataaactagaactttggcgacaaatttctttctttttagtcccacattgacaactgacagaggttaatatgaaagttgagaatataaaaaagagagtaagtctgcgtactgaatcatgatccttcaggcagaaacgggatgtgatgagtggtcaatacttgcaatgatgcaagatgagtgtctgcccccaaagcctgttacgactttgggcactcattagaaccatctgatccctacttttaaatcagtctaattttctttcatgtgtatatataaaatgttatatacagcaaaatgagaactggctcagatatatttacaacgatatgtaaacattgctaaagaaacttggtatgatgaaaatgaacaatgggttgggtgtggtgtggtgtaattaagggctcttaaaatgtctgtcatatcttatctaatccatccataacatccaagacattgttgcaatgctctgggtttcgtctagcagccaaatccctattaggtgaactacctgtgctcctactcagagcccaaaacctgttatctcttttcttcactataataaactcctgacttttgctcattcctaacacccctttcctcctaccacaggtaacatcatttaataaattcttatcttcctgagacagttgcactttgcgagatttagtaccgaaatccaaggatagaagccgttgcattctgccaggtaaattcactccctttcgagttggagaccttgtagacggaagctttgatccattgtctttatgtctaactatgaaaattaactggtgaagcaacgtcaccaattcgaggatgtatagatctgttttctgcttatcagcgtgatatagtgactgaagacgaatcatgctgttctgcgtatttgtgctcttgccgaattctggactgttatattaagtaaaaatgtcagaattcacataataagtcaagaatacttcttatgcttttcaattgaataaaagacaaacagatggataatggttgcctacatacccagaatttgcccattctccaacccatccaaaaccctgatgcgctctgccaccaatcgtaaaaaacaattattaagtgcaattatggcgatatgaaaaaggacaagaaactatttgcaaaatttcgaaaatatttcaactaacgcacttgttagtattggcagcgactggaaccagccagtgaagtgttttttccatttcagccttaatctgaggagctgaaagctgcagaagacaaaatgtgttgataacatcaataattgggattgaaatataaataagaagtcgttaaattacattgcatagtgacatacacaatgaacaggttaggaatgtgttgataacacaagaaatggcacacattacagtctaaagagaaaaaaaaaacattatccacagttacacagacagacacatacctgttcttttgcatcaagagcctgcaaacgggatcgtaaagctgtcttgacactgtttggcaacccattgtataatgtgtccctcatatttggaggaagggaggtcggtcgggatgcctacagcagaattttttttatgtattgagtaaactaaagattggaaaaatgtgtaatgcaagcaacaaagggagggaaagatcagagttaaaattacaatattatctatctgattgatgacattagcatagtgtaatgcaagaccagctacacccagccttggaggatctttcctttgattggcactatacaccagacctgacataaaagaaacttttaagaaccaaaactaccatccaaaaatttaatataagcaaatatatgtgtttaatatacatataaaatttcaataatcaagagtatcatttaaagcacaagttatcaaagccacaaactcaaagacatgcctggcatatgccaggaagaaaattagtaatgaatgttagtataaaatatcaaagtttgtatattacttagtgatgatgcatgcattgccaaacaaataaaagaattaaaatttgtctaacgactctttagcatgatactgagtacttatgggccagtgttttaagtcagtcgttaacaaactttgagcacaactaattaaaccgattgaaatgctacgagcaaattttcaaactaatatgcaccatactattgcttagattataaacccacttatcaatcaacttaaagaattattttgtaccattattgccaaatgcttcagagattgcttgatgtgtataagtaacaatgtctacaagcttctccacaatctgcaaagaagataataaatattagatcaagtaacttatttattttttaaaaaaggaaaaaaaataagtaattgcatgtactttgatggtaaataatactgcagtttaggtaaattttcctgacaatggttgtattttaattttatatatcaaagtaggtagatgtggttttttcacttttttggatttggaatacgcatcccaagtagttctactttaactatcatctatattaagcgaatacaatatagtttaaaaataatacaacgcaaccatggtagcggcgtaaagtaataccacagtaaaatgtttagcaaagttactagtggtagataaaacaagtatacctcctccaaatttctagaccaaagagatttctttttcaaggtctttacaagctttctttgttgttttaactcactgtgtaaaatcttgagactctctcctacaattagaaagaattcaataaaatcagtacacccaagttcagaattcatctgcaaaccacattctgacaaatcaaatttgtgagaaaaacaattggactgttggacatgaaaccaaaaatagatcacagatgaagtgtatgcaacaccacaactgtgttttttgaaaattattatttaaaaaactacccacatgcacaaaaaggggatcttagtcaatcatttcatgtaaagattaatagagaatgccacacttggtataaagaaatcttttaggttctgttacataaacaaacatgcagatattttacaaaaaaaaaaaaaataccttaagcatgacaagcaaacgcaatcaatgtataaatgcaattaaccagaaccaaaaaaccaattcaagcaccagtaaaggtgtataaaccatactagaaaaaaacaagctatagatgtcatcaaaacgactgtttaactgaagacacaaggaaaactggacatgagaaattgaaaaataattcctatggccgacctcttcgtgggagattcaaggcttccacctcctcaaccttttgctggtaatcttgttcaaatctgtccaatgaattaaattcatggtatagttcctacacattaaacatgaattagcttcttcaaccatcaaagtaggtatatgttgcaaagagataaattgcacccatttatcatgcattgaaaatatatttatagattaaatgtcataaaatgtacataataaaaactaaaaaagcttcaaaacattaactctaaaatttataaaattgaagaaactccaacagaattatacagaagctgaaaccatcatcaaaactaagtttcaatcaatcaataaaataaactcaatatgacacttacagaagtatgttgagcaagaacagtcaactcatgcatcgtcatgtctgcctctgctcttttctgtgtgtgaattgaattttctaaatctaatctgaaatactaaaacaagtacaattcacattgtctgtagagatcaacaattatcatcatatagcaaatcatatcaagagaattacccggagaagaaacgaccaaggttgtgccactgtggatctttacatagatctccaaatctaattacttcccgtgaaaaaatatcaagctcttccctgttaaatacaatgaaatatgcattcagaaggtataaaatgaaaatttctgcaagctaattcatttctctgacaaaaaaggcattcaaaactaaatcactctctagaacaaataaccaccttttatcagatgcggcgatacttagcaactctttcatatctgtggaaactaatatttgaactccttgagaatttaaaatatctttcttcagtaactggacactttcttctgaaagtgattgaaataagtttgcacccttggcaattgtattagccacttcaaatgccaaaatcgatattctattccctcttgctgtgccactgataaatccagcactggcattcaaattcgacatgctacttccaagtgtatctaatacttctactgccctctccaatccaacaatcccagctcttcctatgactgagtttttttgtgctacctaaacaagaaatgcaacattaagatggtatgacaatgaaaacaccagagaaaacaagtaacaatagtcacaacaaaatttatagaacctttgttttctagatcaaatttccattattagactcaaatcatatggcaagtgtcagtctaaaagatttgaatcgtattacattctaacactagctaggaaatatagttctgttccacccttgtttattttgatgatcatgtatgcagatcgaaagcacttgagaagtcttcacttgacagaaaacttaacatggaaagcaactagtttcaacttagtcagatcactcatctcttcataaagaagaacacaagaaccttcaataaggtgtttcttctcatcaaaatagctccattccattggtaaagttcgtgatcaaaacagataaatactcatacaaattcaagcaaaattatccgctgcttcgtacaatttgaatttaaattattgccataattttgaccaattctacccgtaacagtaacataccttggtaactcccgttctggccggcgtcgacggcttcaattcgcttgaaaacgataatcgcagatcgttggtatcgtatgtctgctgtgttttatcggaattgtatgcatcagagtaagaatacgacttctctttcgatttaacgacgctgtttgttttcttcagtttcccggagaatcccatagtattatttccttcgggctttatgcttcgcttagtagtacctcctgaacaaacccctcccattgttcctcttcctgaatgctccgaattcaaatactgttctaatcttacacctaattaaccacacaaaaattcaactcatgttccaaaatgtaaacaaaagcatggaaaacttaaaaatcccaaactttctcaggaaacaaacaaggatcaaagattgaacatatatagcagaaatacaccaggaacaagagcaaacctgcttggataattgtatagaaaatcgaagaacgagctggaaaattgtaggaatacttttcttcctagaaaaaatatatttattatatatatgaaaacaagtaattagagataagattttgacaaatgatgaagaaagaaagatagttacagtgtggaagagaagggtttagagagagagagagagaacacaaatggtttgtttgtttgaataagagaattaatttgaattaaagataaaagtaattacaaatataaataaaaaaatactttattttatttaaactaaaaaggaaaagaaattggtttggtgaataatattaatatatatgatttggtaggttggagaaaaataacgcgttattacgataacgaaaatctcgtgggattaggaatttgactgaagaattgcattgaatgagaattatatttttggaagaagaagactgttcttttgtatgaatatgaacaccacaccagagcaaagggaatgaaatgaaagatcaaacgtcgtcgtctctaaattccactttcattctcttttaccatattacccccgccgataaaacttgcgtgacacctacgtactcttattattttgtgctctggtcaaaaaaggtaaaaacattcctccatacttgataattttcagacctattttgaaatcaaagggggaaaaaataatgtgtgtatttggtggtattttaaaatcaggataaataggcaaaagtcaaacgtagaaatcaattctgtaatgaaataaaaatatatatatatggttatcatgatcatgaattgatgatgatatatgtttttattaaattaaagaatagataaactagtctttgcgtttacataatttaaataaaaatctattgaagtaattaatgcatattcgtccaatctattattattggtattcaaaatgttgaaaaattgattttccaaacactttatttgatagtgcaagagtctctatcgcaccaacgacattacactctagatatcttgaatttgtcagctctttaatttaaatttatatactaattatcatataatacagtttaagtaacaaagaggtaaatagatcaaatcaaaatcagaacatggtcgtttcacgtttgtcctatagtggatggatgttgtttttgttatagctaatataagctatttgactataattatattctacatatgtaacatgtatttggttcaatccctcactgagtttggtgtgtggcttctttttatttattttttaatgaaaaataaaaaataaataaataacgaaaaaaaatcttttgcttggagttaatgtagtattaaatgtttggaactgtatggcttactcaaatcaaagctttatcaatatggagtaaatacattgacatgtcattaatgtggatgacaaataggtgtcttttttattttctgtgttggtgtgctggccgctaattatatgggacctaagataaaattcatttttgagccttttatataaataatttaattatttttaaaataataattttagtagtttggagtaatagtaaaaaaaaatttaaaaactctcaaagaattccaaaatataatcctaaaaagtaaaaattagagattaattagttgacctcttagcttaaataagactctagctacacgatttcactaaacactatttgatatattgttttatcatttaactagagaactaagctgtgcttcgcgcggtattacacaatatttgttatttttttttagtattaattcagtggtataatataaaatatgacattgtgatgttagaattattataaaaaagtaacatgatagaatgat

SEQ ID NO: 110760 - DNA, 7911 bp, Cannabis sativa
  modified_base (26)..(43): a, c, t, g, unknown or other
  modified_base (3543)..(3559): a, c, t, g, unknown or other
ctctttctctcttcatcttcttcttnnnnnnnnnnnnnnnnnntatattattttatattatttcataacatatataaatatatatttataaattaaaaaattaaggggccatgtaaagatggtaccgctccagccccttgccccagccattgacatatgtatatatatagatcgaataaaaaaaaatgaaaaaaaaaaattctgacataataaaattatataccttcatatataattacaattattaatataaaaaatatattttgtttgatagaaaaatagttgcaatatataagaatttgtagactattataataataagaatcttcatataaaagaaaataattagtaacagaatttcatatggattatggagccaataaatttatattgatcaatacaatttttacaggtacatattagcagcttggatcacgaaaatctagaaacaatggatagaaaactcaatcattactacttgtattttacacacatgtaaatcaccacataaataaatatttttcaaaccattttagccacagcttaaataaaacaaaattgtatcactatgtcaaagaagtttaggttgagtaatattataaattgtatcaccatgatggcaatattgtcttttaatttttaatgataaaaaataaaataaaatttttaaatcctcattacgcgtaatggcatacctgaacaaaatgagaagaaaagtaccttaattttctcttaaatttatgttaatccataaagcattcttattattaaataaaagtaaacaaaagaaatagaagcattaccttacatcacattctcaatcctgataagtaaacatgccataatagtggaaagggaatgaaaatgatttccccgaatataagcaagataaaaaaacttgcttttttttgttcaaaatgttattatcaaggttagaataaaactccctaaccagatttttatttggctgttgcaagtgagggacagacaacaaccactctatttgttcaatcaactcacgaattttggacaaatacttcagtttaacacgatatctaggccacaaaggatgaaaatagatattatcctgaaacataagcaacttatcatttgaattgaaaagcgcagttgatttgtttggctcagacacactagggttggaggttgaacctgattgagagtttttggctttcttagggacagaaaggtgaggagaattagacgaaactaatttcctttggctggagttttactagtaaaaggactaaaaacaaacctaattggcatctgtcagctatgttatgctaactatgatgtcaattttatcaagtcccaatgtttagtctcatctaatgggaaatctgtccttatgggcgacagaattgttgatcattgttatgttctgaatagtcaagtgaaatgccatagagtgtttctggacaaactagatcacagacttggtcacctaaattgcagagatctaaagaaaattgtgaccattaaagcagttcgtggagtccctgaattttggttgggaaaagacatttgtgtggtccctgtcaacaagggaaacaaatcaagtcttctcatcctcctatcaatgctcttcttacttcaagagttctagaactgctacatattgatctaatggatcccatgcaaactgctagtattcctagaaaaaggtatgtgatggtttgtgttgatgacttttctagatttacttgggtgaactttctcaaagaaaagtcaaacttgtttggtgccttctctgctctttgtttgaaactacagactgagaaagatgttacaattggcaaagtgtatcgggtcaaaagtgatcatggcaaggaatttaaaaatatcatttttgctcaattttatgataaaatgggaattagccatgagttttctttttcttcatttttctttctttgctgttggatccctagtgttcacagtcccactctcttacatcctttggaccagtcccaagcttttgtttctttcttcattaatcaggattccacttggaatatccctaaacttaagcatttctttcctacttatcaagtagacagtatcctcaaaatcccccttgacccaatttcctctgattccctcatttggggatttcactcctctggcactataactgtcaaatctgcttaccaccttgcctcttccctggcatctgcgaatgttccctcctcttcgacccccaacccttatcttcattggtggaaaaagctttggtctctctctgtccctcccaaaattaaacatttcatttggaaagcttttcaccatattttgccttgtactttcaatttattcctcaaaagaattcttccccaccccgactgttctttctgtggcaacaccactgagtctgttacccatgcccttattggttgtcccagagcaaagactatttggaaatcttcaagattcaaacagttttatttagcttatcatcgaagtgatattaaggattttttcctttaggcactgcataacatttctaaacaggatttcccaattttcattgcttttgtctggcagatttggaattctagaaactcaattctttttaataaatctggtgttcctatcaatgtggaagaatttgttgttaattatttacaggattatagtgctgctcagtgtaactaccagggggatcatctggattcggaggctgcacctatctctcgtactactcagcaacaacaccctcctcccctctcccctgatactccttctctttttgttgatgcagcccttgaccaaaagaatggtgtaacaggaactggtttgatcttcaagcttggttttcagactactttagcttctcactgccatcatttgcctggcgctgtttctcccatatttgctgaaggtcaagcacttatgcagagtctaaagtggtgtatcgactcccaattgtctcctaagtttgtcttttcggattgtctgaattcggtatccaaagtgaatagtgcatggcaagataattctgctctttctggtcttgtttcccggattcgattgctcttctccaatttccctaatgcttctttgtaatatctcccttgccaatttaatatggacgcccatgtccttgcaaaagaagccctcaggccaagagaagatagctagaggagtttgttttgctccctctttgctgcgtgcgatgttggttcttcttcttcatcagcttctttagttcaaaaaaaaaaaaaagtcacacctccttctctttttaaattatagaaaagcatatgtatatatgctaatactattaggtcttcataacatgcgccacgtggcttctttctcagtgtatgcacaaatctgcatatgatatttcaaatatttagaaatgaccaattaatttgggcttttgtgagtccatgccattttacaaaagatttggttcttagtgaatccatagacattaatgctctctattttgaccaatataataaatctaaaatgtacatttaaactttctataaaaatacacaacattgagattannnnnnnnnnnnnnnnnaactaaataaaattgataaaatattacaaaaattaactaaaaactaatctacaaatactaaaactaatatttatgcaaaactaaataaaactaagtaaaaattattttaataaactaaaaatacttgagaacaaaactaaattaatgcacaaaaagaactaaataactctattttcatagagttataaattacaggttgaaaattcaacagtatatattgtaagaagcttttatggtgcattccctaaaaaagatgtaccgatgcacccaattttaattttttccatggccatgtgcatagtagttgtttaagacatcctgcagaattttaagaaatttagaataatttttttaaaaagaaaatgttttatataataaaaggttagacctcatgatcattacacataatattttttggtattaatgaaacatcgatcataccagataagttgttggtatacgcacattttgccaccttatgagcaacaaaattacataaccgaaaatttttagcaaaattacaacctgataaaagtttagcagtagatctacagttactaatatagctatcaatgtcccatcgtggtgaaagtcctctgatcgcattgatgacaaccttggagtcactcttcaccatcacaaaattgtagcccaaagctattgaagtctcaatagcaagactagcagctgcttcaccgatgagggagtcaaaaaaaggaaaattattgatagctacccacacaaaagtgcccaaatggtcacgagccattgttgacacacacatggtctctctccctcttcttacatcacaagttgatcttaatccagtcaatgggaggaagagcccacccagataccacaggcgcaacagtcggagggagtacatttgaggcataatctgcataataatgttaaatagagttaatatattacgatatgctagatatattattcttgtgtaccttgtcattttttgccctccagattgtatcaacaatgatggatgcataaaggaagatctcattaacattagatcctcttgagttaaggttctacaaaaacttaacccaatcccacattcttgcaccagagtcattgatgggggtaaggcccaaaggggacgaatggaaatgtgaaaagctaaattgtaatttagaaatagatgttccatagtttcctcgtttcctctgcaaataggacaagaattgtcctcaatggtcattcgttgcctaagaatcttatgaatggggagagcattcctctaccacatgatcttgtatcgttccaaaattttactattccacaacatgttccatagggaaggagccacatcacattgaggagctctatccaaagcttagatcaaataagccaattaagaagagaattttcccttggcttctttagtccaaacctagtaaacccttccagctggtttaccccctttcagaatgtttataactgtctcctggtcgaacaggagagtcaaattctagaggtcccaatccccattttccatcaagaggtgtgctactttttggaacctaagggttgaatcaatcagtttagggtagaaatccttcccttggatcacccaagggtcctcccaaatactagtatctttaccatcaactaccattttggaagcccctttcttaagaacctcattcgccttgataatatttttctagagccaagaatctaaatctttaaacccgccctcaagcatattttttcccctaagatacttagctttcaataccttttaaggaagagattgactattaattagaaggttctagccccacttcacaaggaaggctctattcattttagtagttttttggaacccgagaccctttctagccttaaggagatacatcttattccaagccttgagatagagacctttgttgtccttttcatgcccccactagaaatccctcaccatgccatgaatctttaccgatatcttctttgataattttgtggtttgcattgaataaattagcagagagagctcgacagatttaattcgagagggttttgatcttctatccttgaagtttagaagtgaggttgtcaagaatgaaattaaagtcaacatccttctgtcttgatctaaagagagggagccctaagtatttaatgttacctgctgatcccctaattcccaacatatttgtaatagtctttttagtattaccgctaaagaagatggatgttttgagtttgttaacttgttggccagactaagcgtagaacttgtccaaacattgtcagtagcccttagcttcctcgatattagcccttcctaccaaaataaggttatttgcaaagaataagtgggtaagacgcgattctccctgactaagagtaatccctttaatctctttctatcaaatggagttctcaagaagtctcgatagaacctccggagcctagataaacaggtaaggagatggagggtctccctgacggataccacaagaaggcataatcctccccacttggcccctattaaggcaattgttaagagatgttgtggagatacattgagacacccagttacgaaactaagcagtggctccaaagtaacccatcacttggtctaggaactgtcaactaagtttatcatatgctttgacaagattaattttgatagcaaaccaaccttctttaccctttttccttaaaggagtggatgttctcctatacaaggatgttgttatcttgaatgtttctccctggcataaacattgcttgagtaagacagatgattcgtggaaggatcagctcaatcctgttggcagtgattttggatataaccttgtaagttacattacaaagggaaatcggtgtgaattgcatcaccttcttcgggttatggactttagggatgagcactacattagtagcgtttatacttttacgcatagtccttgactgaaagaaatctaaaactgagtcataaaaatccccgcccactgtatcccaataatgtttaaagaaagtactgacataccatctgggccaggagctttgttgttattcatggcgaataaagtcttcctaattttagcgacatccagaataaggagcggattcctctgatcctctttagaaaacccatctctaatggtcatgttcaagctaggcctctcggtgtcaaaattattagcaaaaatacctccaaagtaatccaagaattctttccctatttgattccaactagtaatccaattttcatttttgtccaataagctctcaattgtattctatctttttctaatagtggctgaaatgattttttttagcatttatccccctctttaagccacaaaattctggccctttgttttcaatataaacctttttgctctaaggcatggtttagcgaatttctaatctcatcttcctctctccaatttctaatacctatcggtctagtttggataagattcaacttagatttcaattctctaatgattgtgtcaatcttttcaaattggtgcatattctagttgagcaacgcaactttagtagccctgatcttcttgaaaattctagttgaagcctagttgtgattaatcgtggaccaagcgtgactcactactaggttgctacggtcatcatgagtccaagcttctttgaatctaaattggcgtttatttctactttcccaattatctgagtaaatgcataaaggcctatgattcgaattgcaagactaaaagagcgcagagctgccttagggaaaagggaaatctaactagcatttgcaagccctttgtcacacgccgatttaacatgattcacaccatcctaatgattatcccaagttaattgatctcctttaatgggcaagctaataagaccttgggagttagttaacactgagataactgggataaaaaggtctttacctttggaaccaaccctctctgactcatagagaataaaggaccaccgaacttatcccccacattcatgaaatcagtctagaacttctttttggcatggtagtacggcagtccatagacacaggatgacagcaaggatggcgcttagggtctgaatacataattcgcaagaagtaataatactttcgaaaacaaagccaactttctaggaaaagattaaaccacctacggttccaacaacaggagcagaaatattaaaataaaaatgtaaacggtttagaatacgtaccaaaattcgcattcacttttagttcggataaaaagatgaaatctggcaagcaaaactgaaccagggacttaagctccaaaattgtagaggtttgtcccaaccctctacagttccatgccacacctctcatggctcctgtg

SEQ ID NO: 110761 - DNA, 8366 bp, Cannabis sativa
accttcctcttctagcagtaattctctggtcaggtggtggaagaccctttggaatttaaaaatacctcctaaattgaagcattttatctggagggcttttcaccatagtcttcctacaactcttaattttttccataagaaaattttgtcaacccctctttgttctctctgctctaaaggtcctaaatctgttactcatgcacaattagagtgtttcagagctttgagagagtggaaagattcaaggtttaaagatttctaccgagttgctaggaattgtgatattagggaatatctgttaagaggcttccaagatttttctaaagctgacttgagagttttcattggaattgtttgggaaatttggaatcgtcgaaatattactttgtttaataagagaaggatttccttttcctctgctgaatttcaggttaaaggtctgcttcaagcttatgataaggctcaaacttttcataatcccaactcatttgaagattctcaagaaggttctcaaaacagtttcactccagatgctcctaaggtgggttcttttaagctacttgttgatgctgcaattagtaatcagttgcaaaaaattgggattggggcttcagttttcgatagtaaaagtgatattgtagctactatgtcttcaccttgtgatggagttcttccccctttattagctaaagcaaaggcactactttgggtgctacgatggtgtatagctgttgagtttcctttggatcgaattgaaactgacagccaacttcttgtgaggaaggtgaggcatcgttggaaggataaatcacctttgtttgatttggtgaaccagattaaggcctgtctctcttttttgtttcctatgtcccaataaatcacaatgctgtgacacatagtttggccaaagctgctttcaggcatcagagagaggtgctttggaacggcaacagtccaaggtcgatttgagtatattgtaacttgtgttgcaatatatttaattaaaaaaaaaacaaaaatattgctgacccaaatttccattaaccgtcaaacgaaacgattaagcaattgaatatagaatattaaatgaacctaaagttttttgaggtgatatatagtagttaaaatctacaagaaaagtagaactacatttaattgcgttgcaagcagaaaagttaaaacttgaagctcaaccccgctaaattctaagccctatcgtaccaaaatcaaaagacccagccagtacgaagtgtatgatcatctgctctgccactcagattctaacagagattccatccatgtcgcctgaggttgtgaacgcataacacaccaatgctgaattggcaaatcaagtatgtttttcagtgattcgattattgatcttgatgggcgcccaagttcttctaatgatgactccaaattgatcaaatattttatcttttgttccgctttatagtttcttggaaatatttgttgccaaatgaagacgcggtcgtcgtctttttttctttcttttgtttttgtttttttgttttttttttttggttttttttacgtacttgttcaaaaccataaccaaaattaacacttctggaaacttaacttattacacacaacccaaaaaaaaaaaaaaataaactacactataatgatatgaatgagatatctatgactgataatgataatcaggtcaggtgtaaaaaataaaatatatcaataaggaaaagtccccgtcattcgaatatgatcaagggtcctccgaagaccatacttttgtactgcccgttgaccggctctgtatccatctccgtagaccggagaaatatctgattcaatttgatgcttaaagaactcaccaagcttcttctcatagagtgatcttgtccctttttttgctgcagcggaggatgaagaggaagaagcggcattgctatctaagccagacgtgagttccgcttctaaccacatatgagctaccacttgacaaatcccttcttctacgtcttgacttagtgttcgataaccttcaagaaaacacagcaaagtttcgttagaaccatttgagagactaccaattttcgtgaaacaaaaaagaacccagttaaaggatttttatgtcgactaattttgagatatgtatcaaaagaaaagtcacctttgagccgtagccatgcatgcatcatctcatgagcaaggatggaccctgtcagcaacctgcataggcagccaaaacatgtgttttacgtttataccagcttcggatatacttatcttttgataagaaactatcaagttgagtttagtttctctgtcctttaggcctggtttggaaaacccatttcaagttgctaaaactcgagttgtaaatgcaaagtgctgaaagaatttaccttggaagtccatacaagatgagaattgcagtcacctcacagcgacgtgttagtttgtagggttctgttatcatctccactgctcggtttcctgctccaaaccttggtcgctttgaaatctgaagattttcaggttagaataagttgctcagcaattatcaatttttgctaaaaacaactgcacagtgcaaacaatatagtttccagaaaactcttacagtgctgatagtttgttcctccgagaggcagagacctctggtctcaggcatgtgataatggccctgcccattgacaaacattgaatacaaatttagcatagaaaaagaaaacaagactctaaacaaatagtctaatgctacaacttattatgcacagaagaagcaatgacacacatctccagcataaagatactactagctagagaataataactccttatagtgtgagtacacttggaacagttgctagcacttttccaatacttgaaaacctatttataccttgcttgagctttaggcatatttcataaacatagacaaagataggctagaaaaacctattcactgcctgacatgccaacctaaaacatgaaagtaataaaatctgtaagatatgttatagtctgacaatgtgccattacatttctttctccctctctggcttcatttagtgcttgtctttcaacaagtaataatggtacttgctgctctactttcatatttaaaccttcataaaattcttgtatatcaagataaaggggttggcatccactggtctccatgattgcagagtcaagacactctaggcagagctttcgaccatcattaagtgtgacatagcgtgtgtctcgtggctgcacaagatgagacacagtacaccattgtatcaaatatttccaagaagaaaaatggttaggttttcttggacagcttaagaattactaacctccattctctcacagctgcagcaccgaggagtgccatcgtgttcgtgggtagggcagtatttctgaatccaaaatggatgtgccctatattcaataagaccagcatggtttgttggaatctgtcaaagatgtatattgcaaaaagcaacacaacggactatgagtatatacatagaagaaattaacataaaattgaacataagactaaaagattgaacagtgagatcacaacattgagttcaaaactcaatgtgcttaaaaaaatctcatttatgcatatatatgctcatgatgtatatatttgttgaacaagtgtatgcattaacgtatatgccatgattccagctttaaaaaaatgatataggattgatcatgatatgatggcttattgttacagtaaaatacttacgaagtgcttacagacatcacatttcggatgatagttctctttataacaggttttatggtaaggatagttcccagatgtagaaaactgcaaaagggaaaataaccaccagttaaataactagaagtcttataccaatgcaccattgcttagatagctcatattataacggtttaaaaatacctcataatcagaaatgggtagatggcaagcacgacaacggaagcattctggatgccaaaatgcatttaaacagttcagataccgtccaaaaccaatctcactttggcaaccagcacaaatcctactgaaaaaagataaaataaggggactccttgtttaaatttcttaagcatgtataatgcctggaaaaatttacatattaaactcatggcattacagtgatacatataataaatcacatacctgtatcccattgggtagtaagctgggacgggttgatatggacttgttgggatgggtggatatgaatttgtattcccatagccatttgcatttccatattcacttccatttccatttccacttccatacccacttccattactattaccatatccaattccatttccatttccacttccattaccatatccacttccattttcatatctgggaggggactccacattcagactttcttgtagagctctagcaagttgctcatcttcttgtagttgagaatcattatctgttcagtaagggataagttttactcaattatcattataagagcacataaagcagaaaacattttcatggctttctcacttctttgtaattgaatatgctattcctattcagcaaatattcactcattggaagaaaaggaaaagtaagcaaaaaaaatggaatatacaaagactgctttaagtttaagagtcactcaccaattaacctttttcctttttgactttcttctaataaagatagtgcaatagcacgatccatatcttcattatcattttcagaccacgtttcctacattcaagttccaaactgaaatgtgtaaggagggttaagcatattagaaagctgactaatataatttggaaaagcaattaaggaactcttagtcatacaaacactcaaacatctaatgcattctgaagaaaacaatgccagcaaaatccataataagatatgaaaaatacatcctcaatgaaccatataaattaaacaaggacagtcctaaatcataagataacagggaattggcaataaggaagagaggattgtgagatgataggcttatttacccctgaatgggaaggagcataagaagttgactcttctccatatttgtcatggtagtgaccttctgaaagtttgtgattagagcctttaaaaattttgctaagccaacccataatgcgcaatgttatctgctcatggtcaattaagcttctaactgcacataaatcatcagaatacgttaaagcaattttattaaatacaagtgaagaaaggaattctgactccagatgcttattgcctaacaaagatgagaagtaagcaatcatccatataagattaacacatgggaacaaaaaaaaaatgtaatctcattttgaatggcatcaaagacatgatacagaaattatattcaggagcaaatcaaaagttcaaagcaagctgggatgaaatcatacagatttccttcctctgtaatgcaaaaagaactgggttttacaataagtgcagaagggtccctaaacccaacaattaggtctaaagaaccattttaattatctacaaaaataagattgcagaaaaacaaacacaaaagcacccaccaggcatttttgcttcacaggattgactcagcaaagatatggaaattgaaaatcaaacttccttaccactacaaggccattgtgtgtgtatatatatatgtatatatgactgtaggtaaatacagagagattctttcttacagcttaacatggccattgagcaatatatgttttaattttggtttaaagggaaagaaataaaaaaggtaagagaatcaaatagtggagaaatgactcacctttaacaaatcaacaaactgcagaaacggtggaagtagagaatacccagatcagatatgatcccaactcgctcaaaaagcaacattttttttttacattgtcataacaaaagatattcttgctcctagcctatgtctctttattccgactaaataaattaaattaaataaaataacaaataatctattgaaggacacaactatatagaaagaaaaacaaagacaccctttatttctctctttcgattcagagcagaatctggcagaccaaaaagaactatctcagacgaaacgagaaaaaaaaaattgaaaacttaagatcattcacgtgcatccaaattccaataatctaagatagagaaaaagaaataaaaaaaaaagcccaataataaaggaaggcgagtaataataaaataaaaatgataataataatcataagaatagaagaagatgtgtttaattgtacgccattagaaagtcaaaattgaagaaaatggtgaaatgtttgaaaagggttttgtcttaacccaaaagggattgacgacgagttccatcaaacccagttggggaatcaatattcctaatttttgaaaggcatatatattttagttagcattaacaaaattggaactttttaaaactcttcatccacaagaccaaaaagcaatcgttttgaggaaagcgtaaagcaaaaccggaaaacatcacctaaagccaaaaaataattacataataaatatatatatatatatatataatcacaaacaatatctattaactatctatctataagacttaattaatattttttttttaataataataattattatcattttaacttcttcttttggatgatgttatgattatttattattaaacttagaacgcggttgtgtactatggctgacttgcgtcgcgtggacgaagcaaacgaagatggactccaaggaaagtaaaacattacagctgaaaagtttagttttgagctcaattttaatacaaaatgtaccctaaaaaaaaagtgatgagagaatctttaaaagacacccaaacaatattaatattttttttaaatgaaaaataaatatatatatatataaaaaaaaaaacgaaaatgaccgttggataaagattccaaactcacttattggcaggaccaaaaaaggttttaataacttttgttaaaaataaataaaataaagttaaatatgtggatacagaaatttttgcagtaataataaaataaataaaaaaaagtataacaacacacaaaaaaaaaaggaaaattacattagtaagtagcagattttattctaaaaaaaattgtagatagtaatctcactaattttgttaatattttaattaatgattactaaatttaaagcattgattggtttgtatttactaaaatagtgaatcatgaaattatttgtttataaaattgtgatgggttctttaccaataaaaaattgtgatgagttatattgttatttttttattttttttatattggagatgaaagattactattaggttataaattatatatttgttatttattgtgagtttgaaaagagttgattaccattagttggtaattttaagataaaaagtcaagaaaatgattggttgacatacatttaggaaacaccataaaaagggttccattggccatttttcttgtcgcgagaaatcagtcactaaaatgtgtattcttgcgacaatgttgatttgttgcgctaatcatatgaattataaatatccaagatttgttgtcggcgacttatgtttgtgacgttaattttgttgctagaaattagtagaaacacactcaatacctatatatatagatgaaacgatagacgaggaaattagtagcaagaagaaagggcgctgaagagaagaattcgggatctacaaaaaaattgccattaaaagaacagaatgaaacaaaactgataaagaacatgaaacaaatctagcaggacactggaacaataagatggtggcgacatatacatacagagagaaacaaagagagctttagcgcaatataaagagaaaccaatggagtaatgatcgaagaagaaagctcgttcactttgtttttagggatctatgcatgtcactagatcctataagatataataataaacaaaacaaaataggtctataattttcccgagacctcaaatttctttttcattttgtcgttgttagatcccttaaggtgttgttagtttgtcgtcgctagatgtctttgttttattagtgtggcaacaatttgaatactagtaaacattagctttctatttgcaatgttagcttaaaactctaatgtatgtttaatttttggaacactccaccaatgagttattttaaatctaatatgaacaaaaattcaaaccaaagtttgtgaattccaattactgttggggaaatcataaatctaatgtgaaccaaaattatcaaaactcttttgtcaactagttcatatacaaatgtcatacttacataactatcacataataaaaaatcacttactttcaaaaattaaaaaaaaaa

SEQ ID NO: 110762 - DNA, 7333 bp, Cannabis sativa
  modified_base (37)..(48): a, c, t, g, unknown or other
  modified_base (6662)..(6662): a, c, t, g, unknown or other
atttctgatctttatagtaaatctgattatattgaannnnnnnnnnnntaggacacaaaacccaacacaaatatagtattgtattaaataatagaatacaacacaacacaacacaattcaatacaataccatacgatacggcgtaccaaacgaacccctattaatattcttaatatattcaacctcaatatattcacattacccataatttccttagcagaaaaaaaaatacacataattccaaagattaaaaaaaaaaacgttgtccaataattaaaggaggcaattatgttgctattcactttagtgaaatgaaccagattttaaaataaatgaaaaaaggtcaagacttttcgagaaaatcttgagcattttcataaacttttttgtgttattttttctattatgttcgttatacagatggagcgatggcatatttcatctccaaatcaaccaaatattggtagaacgttctcgaggtgcctagtgaaagatttttctcactaagtatacaatatatatatctatgaagacactatacaaaatgatcaatcttcaattaacatttttccttttaaagtggctgaagctcttgttcagcaataatggcgccaacaggttcatatgaaccaacctctagtcttttgtgtctccaaaacaaccacatccctaatgttaataatccaaaagctaaggtaactgtaactccaatagtcgccgccaatatatgatgatgcttccaccatgatctgcaatgctcaaaaaaaaaaaaaaaacaaaaacaaataagatataagtaaatacagtaaaatatatcaaacttcaacatataagacattcccaatccctctcatttaagtaaaatctcatttgtattatttcttcttcaatgaagaaccattgcagtatatgaaccaatatttctgcagatagagagacagaaagatagaatatatgaaaggagtaagtctatgaagaatgttttaaacatgttgtttaaatatgtcataataagaagctactccatatgtcataataagtataagatccatagatatggggaaaagacaaggtaaagagacaacatactgtttcttttgaggctcaactttgagctcaaccagctggtaacttccaaatttttttgggagctgcatatgatgctccttcaagcgcaaaattatactctgaaagactccacattagaccaaaaaacgaaaatagaatccgcatttcaagtttatatactcacactataaaatgatattaccattgcagtcgtaatggaaacaggataaacggcccatgtaataagtgaagaatttccttcaacctttaagtttgttaagtgaacctgaaaatagaaacttggttttacaaacaaggcaacttgtttttattgaagagtggccgcacaaaaattgacaacaaagaggacagataataggttgagtgtatatgaatgtaaagtgcaacagtaatgacatcttacaaactccagtctactttataataggattaccttcatagctagatactgttaatttctttcaaattcactacatcatgatttaatgaacaaattcagttattctcatttaaaataatttgacacaattaagagtaaagttttataattatgctttgattctgaaacttttacactttacgagaaaagacctcaagtcaaataatgaatggaaacatgtcagcttaagactggtttattttcttgcacaacttgagttatcaaccaaaccataacctcagctatacctgtgaaactttaacttccagtgcattggcaattaaccctgtaagctctgtaaaattgagcttcactgatttgttcacaccaagcttcatatcaaaagatatatgtcctatctgaaattcaactatatatgaaacaaaaaaatgtcatcagcaattacttcctaggtcaatagaaaataaatctctaaaagaagaaacaaagagctaaaggataaaattttcaaactaaaagctagtaaggatgtaacttcaaaagaggaaaaaaagttcatgtggagattatttatctataagataatgtgtaaacagtgaaaatggaaattttgcagccaaacagcagtaagcattaaatacatcttacagaatctgcattgactatcttattacaccctagaaattaacagtggatcatggtcataatcacttatcagaaaaatatatcccagactaaccctacctgaaaaatcattttttggcaatccatcaggagctgcgcttggaggaatttctgtgattccattcaagctgccagaatccgagggagtaactggaggaggagaactgagatagttcaaactcttccaaagttcagaacaattagttttccaaaaaccaatcttatcattttctcgatcataagtcacaagggtattgcggacaagaattcctgtaacaattcatcaatgaaagtgtgaaataccttctctttctctgtaacagccaaaactcttaggacaggctgctagaaaagtgaaaaagcccttgcttgctttgagtatacaagacaagcaaaaaacctacaacttagtgttgccattcatgaaataaaaaggaaaggaaagatcacatacctcctaaaagagtagtttgatcggcatttttaaaaattcccaagcaatatgcaccactaaccttcgtatgctttgatgaggaagagtaaaacagaaaaacaatagaatgtaggaaatacatcaatatgtataacaagtaacaataattaaacttaaagaatggtgggaaaatattcaaaaccattacaagtaaaatttaccgccgaaatttccataaattatttaagaagacagtttgtaatggatagttacccggaacaagtagttttctggagatagagacaacttttgcccattgccaaataccatatcaacttgtggaaatttttttgatagttgagtaatattcctgtagcagaattgcattgaatttttgaattgaaaataaaattaacaacaaaaaattggtaaaacacaagtaattcaggtttacaagaacataccttccagcacctgaaaaacaaatatcattataattagggtctggaccatgaatttgtttaagggaatgtagttccctcgtaatctgcacaattactgaacaaaattaacatgtcttgattgttcaatatgatagttcaacaatattattgtatcaaaaactaaaataagttctgtgtcaaaagaattaataatgaacacctcaatgctttataatagttagttaacaattcaaaagacagtgatatggctttgtggctcctgcagttaagaactcgtatcatgctttcatcgaatagatgaggttatacagagcattttatttaaaatcattgccctcacaaaaaggtgcctttggattaagctccaactattcaataatttaaagttgaaactagcatccacaacttttaatttaggaaaacagagacgataatatagtttaaaaagggtgtattcttgatgatttcttttaaaaaataacccgtcaaatcctagaattagcagattattgtctgtatgtgcgtataattttaaaatgactaacacaacacaacatttcgtaagtatcatcgttaggcctaatcatcgtagagtaactggctctgatatatgtgaaaatttccttctccgagcattgatttgtaatccctttattttggcaaaacttttctgggataatacaattcatttctttttatattaattcagttaatgaactgtgccttttattttattgttcattaagttctggcgtaaataaaacaaaaaagaaaagagaataaaactaagtgcattgtcttactgcccccttaaatgcataaaaagcttcttctggaagataagcatatgtagttccactatccaagacagttccatgctttctgtcgaagacctttgggcttaatttcaatggtttcccggccacatgtatttccttcaaatcaatattgtagtatggactgcagtcatccaaaaactaaagtatatgtgtgagatgcacaataatacctaatgatctacaattattgaggttgtctgaaattgtacctgcggtatgggtctgagtgggtaaataccatatcagggggagaagagattccaccaagaatcatagcacccccacctacacccatcccaccataacataatgagaacgagtcaccaataacacccttgtcaacaagctggtccatcacacttagccgtcctctacccaaaccgattattccatcagccctctggctatatagatcaccagtttccacattttcacacccaaaaaccgcacgctgaggtacaagttcactttcattaccaaaagaaataatatcctcaccaaggacaccactgcttgagctcatctcagcataccgccgctcataagtgcattgaaccccatccttatcgcaattacaattcatattacactttacaggttcgtacgtgctagatgaattcggctggaacctaggatcctgaatgacaaagaaataagtacagaaaatacttaataccaaaaaaattaacacaatgtgcatcaatgtgattgttctcacttccacaacaatttttttttattaaatataagtatatattttttcaaacaaaatgttctaactcgatatgggacaaagtagtcagactcttgtacatgctaattcataaaaaggcaaaatgacgcctcacctaaaagctatcctagttccaatgtcaagaattagaatcgtgtaatacaaaattgaccagaaaacaaattaggcagacatacttaaagaaacaacgaagacaaagacaaacctgatgcttcccgcactgttcacaatcagaacagggcacgtaagtcacagtgcttcccgtatcaacaatgagagcgaattcctggggaggagtcccaatccatagccgcgtcgtataatatctgcaaagagagatcacaaaaaatattagcaagtttcagacaaaataaaatcccaattttgtcattatcaaggcaaagatcaaagaaagaaatcgaaaaaaacccattggatagaaggtcgtcgtagagcctcatgtgagcattaggcctaggctggtccgatttatgaagacggcggccctcaaactctcggcgttgagaggacgatttaggaggcgatagatagagcggaaggaccatggggtgacgacgagagtcggaggaggcatggaaggcctcggaggatggtgaggcaaaggagtggtagaggagagtgaactggattaagcagtagaagatggagataaaagagggtggagccatgggagggagatggatgagtgagtctggggcagaggaactgagcaagaccaagggagaaagaatgaaagtagactgttgttaatggttgaaggcagaagaagaaaagtttgggtttaagaagaagtttcgtgtggggttctccttttatacgattttggcgctcacctcatctcatcgcatcgcatcgtagctctcttctctctctctctctctctgtggagcaggaatattcagacgacagacatatcatttaacacagcagaaactaactaaacggacacaaccccaaaccaaaaactctactttggtcaacggatactccaatctctctctctctctctctcttttaatgaataaataatttaaataaagcgttccttccttcaagataaataaataaataaagaatgaaaataaaaaataaataaatcataataacaaaagagaaaaaaaaaactataaataaatgaagtaaaattagatgcaacttcctacttcttcggtacatctatcacactctttagtcttcatctattttgatttttgagctgtttatattgtcattaaatacatttcgaaatttcttagatgggatagattttcttaatttacttaacaaaagatagggaatttaattaagggtttttttttaaaaaaaatttaactaaaaaaaagtaacgatattacaaaaatacttacaattggccaaataaataaatatacagcccaaataaaaaaaattacacaaatactatttacacatatcttcaaccaaagatttatgcttcctaggcaactatcgcacaaccatcgcgcaactacgtagcaaccaaatacaatcaaaacgaaaattcaaccagaaagagaaccaccattaattccgacgacttcacctgagaaaacgaccagaatcaatcaaaacagagactgtttctaattcataaaaaaaaaaaaatgcagaaaaactactacgaaattaaaggtcaaccgaaaatttagtttaatttgcataaaaactaatgtcctaactttaatttttagatccatatggtagatctcaaaaagttgaactagagttcccaaacaatctaattaaagtataatccaaaaaaaaaattacatcaatactatagtaaaatgtttatcctaatgtacttttgttgttttctatatttctaatggtgaatttgttcatattaaatcaaaaagagacatgtagatagagttacgtacgtggaaacactgtttctgatttttaatgtttcacaatagttgcattacagttacataaacattttgctaacagttanttcgtctgattgaaaccttcgtcttatgaaaccttcggccaaccacccagcagccacccagaaactttcttctgatgcaaccttcggccaaccacctagcaaccaccctgcaaccatcgtctgattgaaaccttcgttctgatgcaaccacgcagcaactactctgcaattatcgtctgattgtgtaagtgatagtataagtggtattttggtaattaaaatcacataaaaggtataaatattgtctttaccttatggatgtatttttgtaaataaaatgtcaatttatatttgtatgtaataattcgtttaatagatatatattttttttgtcaggaatttaataaaaatttagtttcttaatttaccttttttaagaagtttcttaatttacttaacatatttaacatacatttaaatttaattattgaaatctccaacatattaactatacgttatggagttttattatataatgatgatgatcactctgtaatttgttaaaaatgtttgataaattatgacttgttaacaacatcaacattatttgtttatgttttacttgcgataagtaatattataattaggtagtaaaattattagtataataattacaaaaggctaattaggatctttacctccaaactttgacatgtatcaaattatacctc

SEQ ID NO: 110763 - DNA, 4425 bp, Cannabis sativa
  modified_base (4247)..(4248): a, c, t, g, unknown or other
tagtataattacatcttatataattattggtattttaaataaagtgcacacacgtggcgtccctgttggacagggcgttacagtgtgtgtgtaatggttctttatcttccattctgacctgaatgctttgtatttgtatttgttcttcttttattgaaagttttcaggtttatcaaaaaataattaaaatcctaaaattattttttttaaaagcaactctaaaatcatttaatagagtaaaatttttaaattttatcaatggagatcacttaataacaacagtaaatttattatatatgtatttaatatttatcgttgtttttattatatattgtgttatcttaatctttacattatttttttttttgaatgaaagtttgatctttattaaataacgactttcgctaccaaactaggtagcaaaacagctggaacagactccaatctgaagctacaattaggatacaatgtagtcgccctagcaaaggaatgatccactacattagttgatcgcttaacaaaagaaacaaaaatattatttaaattagcaagcaaattcttacaatcttgagtaaccagtccaaagaacaaaattattctgtcgagcaatgaatagcttggaccaaattaaggcagtctttttccacatacacttccctccaaccgctgtctttgatccagcttaaggcctctcggacacctatggcctcagcaagcacgggttcaacttaaccaaagaacagtttaatgtgtctttcaatgagtagttccgacccattacgaacaacgagacctatgccataactatcaccattgttaaataaagttgtatccacattaatcttgatactatttccccaaggagcagtccagcactcaacaacgtttctagtctgtagcaaagaccataacgattccatctcggaactttgagcacacctccattgatcaagatagcagtttgcaaatgcaacaatatcttcaggatttatccctttccctttccaaactaactcatttcttgcaccccatatggcccaacaaattgttgcagctttgcaacacagatcaacagcagccaaattaaaaactgtcgtgcaccaatcaaaaaaagagctccctgctagtgtagccgtgcctatccccaccctttcccagcattttctagtaacaggacaactaaccaatatgtgcaaaatggtttcatcttcttcctggcacaaggggcaaattgaattgatggcaacatgcttggttcgcaactaaaccaaagtgagaaggcaatttttacaggttcgccaaatcagattaaggatttttgaaggtaccttcaagctccataacctctgccagaattttgaatctgctccctcataccattgtcccttcaagctttgcaaaagtgcataagcactcttgacagtataagtgcttaaaccatcttctgaccgaatgtagtgatcctcagccgaaaccaaattgagagaaattttggtgatcaaccaccaatttctctcatcaaagatatcatgcagtaagtccacatcccaattgagctcacctacagtcattaagttacacaaccgggtattaataagacttgggtaatctgttgtaatataaggatttaattcatttggaagccatggtttgccaataacagggatattgcatccatttcccaccaaccaatgtgtaccttttcgcaccaagtcttgagattccaagatacttcgccatataaagctcaaattggatccaagttgagcattcaaaaaactaccatgtggatataccgggccttaaacactctcgaagatagtgaattcagcctagtaagtaacctccatccttgcttgcttcgaagagcaatgttaaagtctcagaaattatgaaaacccattccccctcctttcttgtgcttgcaaagtctttcccaagccatccaattgatccctttgttgccatccttaaaggaatgccaccagaacttggttatgtattgttcaatgtctctactaatctccataggtaatagaaagacgttcattgcgtagcttggaaaggcttgaaccaccgatttaatgaggacttctttgccgcctttgaagagaaacctcccttcccatgtcttcaaacgattcctaactttatctcgaagatagccaagaatcatggtcttgttttggcttagagtgcttggaagacccaaatagaagctaccctcttctacaacagttatctctagcagcgaacaaagttgattgcgcaacaccatctcaatattactacaaaagaaaatagataatttgcgaagttaactctttgccccgaagccatttcaaatttcctcagcaattcttgaatacatatagcttcttgaatcatagctttgcaatagaggtaactgtcgtctacaaaaagaatatgagacaattgaggagctccattagcaaccttgcatccatgaatcaaaccactacgctcatatttctgaagcaatgctgaaagcttcttagcacaaatgataaacaagtaaggcgaaaggggatctccttgtctaatttcctgagttggaagaatcggacctacctcgtggctgccatgtatgatcttatatttttccaatgagacacaagacataatcaacctgatccagtgctctaagaaccccatcttacgtaacattgattccaagaagtgccattcaattttgtcatatgctttgctcatatcgagttttaaagccatgaagcctgttttgccttgtcttttccttctaaaataatgtaggatttcaaaggaaaccatcacgttgtcagatatcaaacgacccaggattaaagtgctttgagagtctgaaattattgaatccatgaaaggcttcattctatttgtcatgactttcgtaaccaccttgtataggacattacacagagaaatgggacgcaagtcttaaatatattgaggggactttttcttcgagattaagacaacatttgcatccctgcatgctttctcaaaggaaccagttgcaaagaattgttgcacaaggccgacaacattttttttttacaatggcccaacacttttgataaaaggcaggctcctccgaaactggcctagaaaattccaaatttgtagacttcgaaacagttctagtaacactatcgataacttcatggcatcaggaatttgaggcagcaagcaaagatgaaaattaatcagacatgaccgcagataaaccactatcccagtccacccagttatcttgaccatccttcaatttggatatttgattatggcgtttacgtttactagcagataagtgaaaatacttactatttttatctctacctttaagccaaaaatgctttgctctctgcttccaaaatatttccctttgatcaagaatctcaaataattcttttttaacatcattgtagagttgtatggattcagtatcacggttacctttgagtaaacgcagctagtccttgcaacgcttaatacagcctctaaaattaccagcgattttcttcccccactactccaaagttgaggcacacagttctaattttttagtaattcgcccaccaatacttctttcccagcaactttggatgatttggaaacacatcggttctcttaaccatgcggtttcaaagaaaaaacgatgacaggttgagaaatttgtatgacccacaagttctaacaataaaggacaatggtttgatgaagacgaaccgaggttgagaagcttcgatgcaggaaaaagtgcagcccacatactgttaataagtgctctgtccagccgaatttccacccaaagatcagtaccctgattcctttcccaagtgaaaggatagccaatcaactccatatcctccaaaccgcattcagcaaggcaatgattaaagccctccaatagccatcttgggtagggatggccaccccttttatcttcttgagtaagaacattattaattaacatcctttttgttgctgggctgtataaatgtttgtagggccagctcaatgtatttgtgtaatattttgggttgagatgcaaaatggccataaatttggtaactaagttagtaaatgtccacttttttaaaaaattaagaaaatggtcaaatctaataaattagctaataaaaaatacaaaaataaatttatcacatattttttaaaaaaactatataataataaaattaagttacataatttttttagtattgcannttattatattgtaacaaaaataaataaatatatttgatcatttaaatatatacaactagaaaaaaaagttttgaggtctgtggttcctttatgtttttctaagaggttatatctacttattgttttacatttgtttatgtgttgttttagtagttttttgttatgattttttaagat

SEQ ID NO: 110764 - DNA, 5202 bp, Cannabis sativa
  modified_base (1500)..(1500): a, c, t, g, unknown or other
  modified_base (5117)..(5128): a, c, t, g, unknown or other
aataaaaagtcactcatgaatttctcaaaaaccaagaattcggttatataggcagactttatatagaatagatatatatataatatttaattaattagttatacatctacaactttggcggtagcaatactcataatataatcaatctcctccgcaacttccttcatggaaggtctgttttgtctgcgttcctctaaacatcccacggccagaaaccccaatgccttcatagtatctctctctaaatcagtagtcccttctttgagaatcggatcaaccacatccatcaacctctcttcccctaccattctctgaacataaacagctaagttcacatcatccgattctctcgtgaaatctatagctttctgagaagtcaaaagctctaacaaaaccacaccaaaactataaacatcactcttgtctgtcaactgatagtttctatagtattctgggtcaaggtaacccagcgtgccttgagcacaagtcgaaacatggctcatatctgtatgagccagtcgagacagcccgaaatccgaaaccttggcgctcatcttgtagtctaataaaatgttacttgacttcacatctcggtggtatatgggtggtaccgccgagaagtgaaggtaggatagaccttctgcagtgtcatgagctacacgcagacggtttgtccatgttaaattttctcgtttttctcggaggtggtcaagaagagtgccattctctatgtactcgtaaaccatgatgggttgctcgagctcgacgcagcagcccaggagacgaacaaggttgcggtggttgacctggcagaggatccgaacctcattgaggatttggtctgtacctttggtgtttccgagcttagcgcatttgatggctacggtggttccgtccaagaggaaacctttatagacgtcaccgtagcctccggagccaaggaggcggtctttggagaagttgttggttgctcttttaatctctctgcctgtgaagactttggcggctcttcctccggcaccgttggcattcagtatctcttctcgctctttggttaggcggtcttgagcttctttgatgcgtctatgacgtttgtagaggatggcaacgatggtggctacaatcagagctcctccaataccggaagtcaaacctacatgcataatatttattagtactaatcaagtattgagtgaaacacttgttagaattagaatatccccacctaaatataagatacagtcaatatttaattaagtcccaaaatcccaattattacgatgaaagaaactgttatgtgagtccacctaaatttgggtgcatatcaacactcttaaatttaattacacccattaggtaaaattattgaaagaattataagaataacttttagaagatataataaagataaataagttttttcaaatatggggtacgtgtattaattaattatatgcatatcttcattagctatatacacccacacccacacccacaccnacacccacacccacacccacacccgtgtgatacaaaacaaaaccaatccctgcgtcaacccactcacaatgtaaaaaagttgaccgtacgttgtcaacattaaaatactgattaaattaagttaaatgctgtctctttcaagggtattaccaaatttctacccatttctgtcttatgtataatattatataaataaatgtatttataatatatatatatttaatattcattacgttcatagtttgcactatatatatacttggtaaaaatcccctgtccattgcgttcctagaaaaacagtccaaatagcgtacatacagaacatgtaaactaatattatcttcagcactaacccaacataacttcgactcaaaatacattatctttgtaaataatttaataataattagatttactcaaaaaaagaaattaataataattagatgaagaagaagaagtggcggctcaccggctatcagtgcagtccgctttgaattgctgcaaccgtcaagatcttgacacgtaacatctgtcaaaagaaaaaaattcaaagtcaaaacattaatttaattccaaaacgtcaaacaaaaatatgacacagcggtggaatagtgagaaaagaaaaaaaaaaaaaaaattttttaaaaaatgacaactcacttttagtacacaagccttgaataggatcccatacgagccccgtgttacaaaagcatcgattgacaccaccatctgacgtggcatcgggcccacaagtagacttccctccatccaccgcacaatcggactggcccccacacacgggttccctcggcgaaacccactggatctccaatcccgggtcgggccaccgacccacagggaaggtcgggtttaagttcacgaagctcgtgtaggcgctgcacccagactcgcggactcggatcatgtacgagttcgacgaacccccggctctgaacgtacaacacatgagagacctgtccctacacgtggcaaagcctccgccgtcggatgagttgaggaaagtgttgcagagactggaggaagaacaattgagaggggaacggaggagtgagtcggagcagttgaggtacatgatggtgttactgctggtcacgttgaatgggagagacgagttgagttggataccctggtgggaaatatcagatgtgacgcaggtggagggtaacaactgtgagggcgcgatgacgaggcgttgggctgaggcggagatggaggtgattgggtaggagttgttgagtgtgtcgaagatgagtgtgcctgtttcgcagcggatcttgtaggattggtccccacatgttgaggttgtgctgagtggatacggcaccgttttgttaccgcagttggggcactgctctatggaagttgctgagtcgatgatgagtgttagaattagtacggccgtgaagaggtagaggaacctaggcgttgccatattagaagatagagtagatagtaattaattttggagaaaagaagttgagacgttttggtttgcaggttggagtgttttatatccttttgtctttgactttgtgtgttattatgggaaagtttagggaaaacatggaagattcttttatttactttcttcttttctcctctgacttttatattaatttcttcatgtaaaactgaaatctttgaaaaatgtgaaatattttgttagattatgggatcatatttatctgctggactgacttttgagatcttacaaaatctctttatgtaaccttcttattaatgaactaattttcaatagaaatgctaaaaggtagtctatatattgtgccaataacattatgaattaagcgccgggttgacagaggtgtgctgtgctgtgaagaaaagcaactgtatcagaactgttgaaaaaaatttagctaagtgtttggtaaattataaattttaaagtgttgcgagttattaaaattttattatagtaataataatattttaatatattttattaaaatcacaaatatatatatgtataaattatgttatataaaatttttattttctatatatttttaattatttcttatagtataaatttatatgcatttaataaaaataatttttaagattattaaattatacttttatcaattgtaaaaaaattataatttataagaaacttaggttgatattgtctgttactaataaaaatataaatataaatataaaatatttttaaaacaaaataaaaaatttaaatatttaaatattttttattttaaatattttttctttcaaaaaaatatttttattttttgtaatatataataaataattaaataaatttttagtaaaaaataatttattatagtcttttaatcaaaacatctttttccaaaagttgggttatacctgctttagcttttagctgtagtttttccataaattgttcaataaactattttttaactgcttaccaaacactcttttgtcacagtttttttaagaagcagctttcagcatttccaaaaactgtgccaaactagccctaaatagtcattgtgagttgtcaaaaaaaaaattactaaatagtcattgtgtctatcatttatattagaaaatttttattattcatgcttaataatggtgtatggtgttttaaaataccactttaaaaaatataagaaaataatactccgaaaattcttaaacttaaaaatagtctccccatttaaaaagtctctttctttctattttccctctttctcagcgaactctccctctctctctctcactctctctctctaaatctcactgagaatatccaccaccaccggctccaccacccccactagacataacccacttgaaacctagccaccctgacgagacccacgacctccgacgataaaatctcaaccatgaaaaccagagagtcgcacaacgaaatcgtgaaacccaacaaaatcgagaaacccacaacgaaattaccaagaagaaagtatatttctaaacctttacttgattttaaatgggtttttgatcttaaatgcttgattgttaggaattagatcattttttttttatttcgggttgagtttgcatgttcacgattcaagatctacaattttgcttgttatcaacatttggcgactatgtgcgtgacgtttattgatttcttttccagatacagcaaaatgtagtagttgtttgttttttgcgatgtcaatcggcgacatgtttagtcttgatactatctaacatcgtaaatattgtcgcgagatatcataaaaaattttgttgtgtgtttggtattttttgttagtgttatactcgaaatttgactagcacttcagaggatgacacgtgtcaaccttggagaatacgaatcaacgaatataatgacaattatattaaaggatgttaaaattgaataactcattaaatgcgaaattgatagagtatatctatgactcgctgactgtaaagtcttaagcgagataaagatgtacgaactgattcatgcattgacgagaaatcatttcgcgtcagaagatacaatcataaggatgacatcaataatgtattgcgtgttggaatatattttactaggatctagatttactaccatgtannnnnnnnnnnntcctaaatatgaatctctaaaacaatataaataaacacatataaagtttcagaaactttacaatgggtgcagcg

SEQ ID NO: 110765 - DNA, 770 bp, Cannabis sativa
aaatatgaggttggatggttttttgcaagtaaattgatagttaagggggttttgccgcaaattactcaattttaaaattatgatattttacttaatcgacacgcatcactcaaaaaaaagtattaattgtcaaaatttaaaattgttgtgctaccttatggtagccctccctactgtctaattctcgcttcacccttgagtgttatgaaaatttaatttttttaggcaaaaatgatgcttgatgctataaaaatttgattttttaaggcaaaaacgatagtaaattgatgcttaacgatagtttacgataaaatttgataaaaaaaatggtgaaacataacttttcacatggttgttgttgttgatttgaggtgaaattttgttatttgaatttggtatattttcaaaacttacacgcttatatcttaaactttgagtgtacatttaagtcttaattttcattatggcaaacactctaagtttacaaccttaggattgattctacatgttttaaacatgtaaatcttcaaaatatgttatttaataaaaaatataaaaaattgctaactacttaaaatgcgtcatattattatgatgtttaacactttaaaataccaaatagcaatgctccatatagacatagttattataatttgcaagcagtggcggaaccagacgacgagataaggaggggccaaataaaatatattttcacctaattttttttagtatgtaatattttataaatcaatataaaaagttaattacct

SEQ ID NO: 110766 - DNA, 8423 bp, Cannabis sativa
cctcttttcatttttgcttcttcctgggttattttgatcttcgttatttatcaccatagattcttcattatttctttattttctctcaacaatttgtcttatattccccacataaaatagctattcaagttgtgcaagtgattcgttcttcaaaatctagttttttttttgttctttctttgggccgtgcaggtgtagcttagattgctgacctgttcatctgttttatttttgtcctaattcaaagggattctggtgataaaaattagggttttcttgttttatttacaatagttaattgcctgtcatatcttgtcgagtttgacgatcagggtttctttggggtggatgcatcatatgttgtttcgttgttattggtttgctgtgaataccaaattatcgtcttgatcccatatcaggttttgtatgccaatttgagtttgattcgagaagttgctttgatgacaccttcgttttaatcaacattgaggggtttcagtgaacattgagctccttcaacgatgaatggtcattgtgattcacaaaataatggcgaagtggatgaccatggcctccaggttactagatactctgcttatcagccctgtaataatttatcacctccttggtttgaattgagagtgttctatgtgagggttagtaattttaaggttgacgattcgtgcccggagtttctaactcttaaccatattcctctgagtcctgattcccttttggaagttaatggcactaaaactagcatttactctgatggattgtcatcccttcttagaagggatcgggcggataggaaatcagaagaagccacatttgtgagcacagacaatataaggttaacagggagtttgaaattcgaggtgtttgacgaagaagatctcattctctctggtgttcttgagatgtctaatagtaatggtttcactggggaatcaaaacacagtgccaagcgttggagcatgaattgtgattcggatattactgctgctgctggtttcttgaagggaaaacatcttggtggctctgatttgcccgcgcccacaatcgaggtctatgttgcaggctgcttctccggaaccccaattatcttaaccaagactttgcagctttgttttcgtaagaaacaaactaggaaaggcatgttggatgcaattccggagaatgaagcgactgaatcccagaaagatgaagctcccggccttgatctgcaggtattatactgcaacgtttttgaacattgaatgttgaattctgtgatgctcttttaggtttctctcataaccattctacatttactgattcatgttgtaaattaatgattcctgattatttatttttgcattcattgtcttttgtacacattacagtttctattttgtttggcggagatagaatgcattgcagatttattatttagagtcttaatctatcataaataaattaaaagaccttaaaggcgttttggttttggatttgaatattcatgcattatctttttgttatgacttcttttatgcttctggtttatgaacatgcttcctggtgcacaaaaatccaattttgtcttgaaggggagactgccaaaagaatcttatcttaaatgcgttatggggtatgggcaatgcaatgcacaggtttcaagtcttgggagagtactcatttacccttcttggtttgagttgcgttgttttcaaagtcattgctttgccagatacagatatggtgtgccctcatcagtttcattatggggcccacattgaacctgactgcttaggcttttccattatagagatgttcttcgcattagcatttcttaatcttgtgtttgtctttactttcttccaaagcactgctcttctcttcttctactcaagatatctgcagattggtgttactgtttatgaattatgttaaatggtgttgctctctagtgtcattgcaatctgtttgattttctgtttagtgtattttttcaaattgttttgtaagggaggacaaaaaatagaaaagtagttcgcaccttggtaacttgaaatggtaacaatgcctaaacccactagtaagggagcatggtctcataacgttggccttaagacttttcattctcactgttatcttggatttgcagttagcagcgtatcgaaactacaaaccagaaaatgaggaggaatacaatgataggtattggagaagaacagaatatatggatggtgaagatggtgagctctcgttttttaacgcgggagttagagtcggggttggaattggactcggcatatgtcttggcgttggtataggagttggtttgttggtccgtacttaccaatcaacaactcgtaactttaaaaggaggcttctgtgattccttttgtttagaaaagtgcaggaaactgtagtctcccaaaatccaaagtgcagctaacttggtctttttactttgacatcaaaaggtgcagattttgactgtgtgtagctgactgttgaaattttgtttgtcaattgtcatgtcttttgttacctttgtaatgagaaatgcttgtttagagaagggtgtgacagatttgattcctatacagtggaaataattaccagtcatgtggttctccaggttataactaatctaaagcttgtataagttgtactgtcatgtaaataaaactcttttttggtgagcttttagtgtctggaatttgattttttttttggtgaatagaatttgcaggcgttgtcatgtagaaatgtttttcttttatactcccccgttctttcgaaagtagtctaaaccataaaaaagggtcagaaacagcggttgctacagtcggcttttcaatggaaaagttaaatcgatggtggtgatctgatacatccaattcataaaatacattcatctcaaaaaaaaaaaaaaaaaaaatctagttactttcttctccataaatttattttagtttaaaaaattcaataagttaatttagtacaataatttatataatgaagagaggagctatgtggtacagagggtattggggtgtgtggggtcgaatgtaccttgaatactcattataatttatatagttattaggggagttatgtggtagagtagcctttttttcgtatgaatacgacataattattataggtatgtaaattaattatagtttcatatttttttattatgggagtgtttattgtaggtgttgacccaaattttgatcaactacgttgagtcaaataaaaaaataaaatagtatatgaaaattgatttaaggtaaaaaaaataaacgacattagtaatttatagaaattcgaccttaattatatggtaataacatatgtatttttttttttttttgtatttacatcttgaaatatcaagatcacgaaaattagaatcaagtgagtttttcaatattcctcaagggattacaaatgataattgtagtagtatcgtagcctttttgtttttgaaagtaggaattgggatcctcataaatagtgaaatgagccactatttatagaggtacaagtgaataaatgatatattgattatttcctcaatctcttgattttaggcaaccataaagacatggtcttttgggatttgggagctgatttcacggatcactaatctggaataagtcaaacatgttggtcaaatgattcaactaatatcttgcctcgcgcaaccaaagtgataaatcccgccaatgcatgccaattggatctactaggtcaagcaattagtaggaaagatgagttggacttgtaccagctgattcaacaactctaacatagtacgttgtacttccctgtcttccagtcattccgtccaaccattatccttcctacttcgtcatgtgacgactcgccttccatttaactccatgtgtcatcttattgcttgccacgtcactcgagtaatttttaggataacattttcccccaaatccacgtacgagcatctagttgtacatggacgtcttggcttcttcattgtacgtcctaatgacacgtatattttcccatgcaatccaccctttagggttttgtactagtctgatgcggattccctcaagtcttttcaaatctttcagctatcatcattacttgcatagaaaattacacgtgggaaagcgtgactgacggttacacgaattccaaggatgtttcttttaatgaaaagatgaggcttttgggtttgtgagggaaattttagtctttctttccattataaacagtcacctgatacttcatttatccctttattcatttcaacttttttagagaaaaattctttgttcttcaagtttctctgcagcgatctcagagtctttgtgctaatatccctggagttttcgggacttcacatctcggcttcctcgcgacttttaataatgagtaaatcttctttcctctttcttgcatgaatttctttgagttttgattcttgtattttgtattttctcagccaactagaatgtttgtgagaatcacaattatttatttgaaataaaaattctttgtaatgagaaatttgagatgattatgtcgtatgtttgggttaggatgactttaggtttagttaaacaaaattaaagtcataaggtattgtgaactgattagggtggagaaaacttttgttatgcaattcaaagattctttaagatcaatgattacattacaaatgtatcacctcaaacatatcaatacaaaaccaaattaattaagataaataaattttcaaaatttaaagtatattcctcaccaatatccttagaaaaactaaagatacaatttctctagtaattctacagtaattaggggtagggctgaacatttagacccgcaaacttgaaaactcgacctgttgccgaaaaaagccaaaaaattaaaaacccgtgtggtcgggtcgagtccaacctgaaaggctccacacgggtgtcgggttcaagttttaaaaaaatgcaaatattaattcgggtgtcaatccgaaacgcgaaaattaggcacagtcgcatatatttttataataacaaagctgaaggtacaattttttcatttattatgaaataagaatgtgtaagagaggctatcttcacctctgtaactgtgtcacctacaaaaataggccataatcatcatgccacgtgggtataaaaatagctactaaaaaaagttcaagtcattttctttgggaaactaagtttgttttactatttattttttaaattatatttttattaaaataaaaataaaaatattattataatattatttgtactttttttgttcgttgacagtagtttatatttgtacttttcattgacagtgaaatgacaaaaaaccatagaagttttttatgcaaatattgattcgggtgttaatccgaacccgaccatagcaaacccggcccgaaatctaatggacacgaccacccaaaaactgggtttggttacacattttaaacacttgaaattcgaatgcccgaacccgaccatccaaaaacccgaacatccgaccggtgtgtaggcctaattaggggtgggggatgattatcaactttctttaaccattagtaagtagaattattccatggatgttcaatcattatttacaatcgaatacgatatttacgttatctcatgtttgttgaaaacaactaaggcatctcctttacagtcatagtattttgaagtagtgggagggtttgtaaaaaccttactcactgttactaagaaaatactagtaatgacaaactatagtctagaggactatggtctaaacatttacatgattagaccttaatgcttaaagatttcaagataaaaaatatttttccaagataagtcaaatgacttgagaaaattattttagcattaaagactgtacaatgtgtttgatgtttctcatagatgatattcaaacattcaatgcaatgttaaattagaatcatcgaaaaacagaagagataaaaatattctttccatatgcatattactttgtaaaaggctaaagagtagttttaatggtaaaccctaaggaaataatttattatccatgattagaattttttgtcatcgtggaatagttgatactatttcaagaatgatgataaaccataaaagtaacttttaaaagagatcaatagtaagaggtcttaaatatgatttggcatactcaaacgaaagatctactattgagttggaggaataaggagtaaaagaatcttattcaagattggaaagtaaagacataaccagtcaattcttcagattttagatttgacctgttttaaacatagatttgtatttgttgcaagataatatataattaagaaagacctcattctaggggtggagcagttattcaaagttggtgtaaaagctatctttgaaagttctaaactccatcagtttgtctaaataatagtgttgcttagtgcaatcagaagattattaagacttacaaagattcaaatatagattttgaatttgttctagtgatggaacaactactatagtcaccaaaaggtaacacagatatagttacccaatattagagattttgaatcctaatatgaataaaagtctttgtaagtcttgaaaatagaaaagtttgatgatgaacacaaactttaggatctattgacaaagataaagacatgcattacaattgatttatacatcaagcttataagatttagagagatgcacttttgttttatgttagtgcaagtcggagtatgttggaattttatgctttaaataaaatccatctcatggtaatcttattgactattaaagaatgatatagaagtcaaactttatattacttagttcacatgattacttcgtgattatatatttaataaatttttatttaaatccaaaacttaaagataatcatgattattgtgttgtctacacattagaaaataatcgtgattataagcttcaaaattttagtcctatgatttatcagtgcacagaatttacactgacgtgataatcaacgatattatttactcatacttggataagtagaatgccttttccaagatattagtggagtaagctaagatcggatgtattggctatacatcggacttgaccgatatttataacagaagagatatcgtaaacttaccgtaatatcttttctaggtaaatctctaatatttgatcttaaatcaatgatcttaatcctgaaatgatcaggttctggtttaactgtgttattcttgttctttgatttgtgtgttcaaagcctatcagtaggtttggctcaatacttacatcttgggagcatatatttgagtgggagcgctaattatagacatggaatctatagcttctataactggatagaagtgaaatgatgtcttcttagagcttgactaatagacataaatgtaatagctcttattttgacaattatattagtttctcaaaatattatttataggaagccaagtattttagggataaaatacattgaagggtaacacgataattttagtccctattcaatgtagacaatctataaaggatcgttgattatttaaagtgaaataacggataattaatagcctgtctattcttggagaatagagcgttctatgtaatcataagtataatttcgaatctatagaagaatcaagaagaattaataagatagaacttactcactaaattctagaactatttattgagagcttgattatatagatccatggtccccacactacctaagatcatattttcttgtagactcaattaattggttttagataatcaattagaattctaaatgagactaggtcttatttgtgaattttactaagcaaatatgaatttgagactaaaaaggaaataaatagtttatttattaattaagaggctttactaaatctaattaataaataagttaaatgataattttattcaataattatttatgattataaaatagacaaaattaacatttaaaggtctagaataaaaaaatagtattattaaaaaaaagataagtataattaaaatagaaaatatgaaaccattgggctttcctatagggttcgaccaaggcttcaaattaaaggccattttatatcttttttaataacatttaattctagggcaatttttactaatataccaaattaacaaattaatattacacttaccgaataaaacaaaaatacattatatatgtatatttctaccgaaattaactaaaaatatttctaccgaaccagaaaaaatgggatcaaccctcatgcatattgtactgccaaaccaagccatttgagaacaaaaaagtcaaaaagaaaccttcgactattcaaacctccacaacccgtgccatcgaagctctgcaaaaatgtcgatcgaatctgcaaataaaaa

SEQ ID NO: 110767 - DNA, 1799 bp, Cannabis sativa
tagtatcagtccattattttaccacctttttagcatcttttgtgaaagtatcaaaattaaccactttatgatctaacaaaaaagagagaacactctattttaatttatttaagactcactcaatcccatcattgaaacctcccctaccatactatagtacatacacactggtttttttacgtgtgtcaacatgtcgatcaatgcccaaaattgatatatacgaaaagaccattctaaaattttgtataagttagggacttaaatcaacaattttcgattttgcgtcggtttaaaacaaatgctttagttttacaatttaaactgatgcagatgagattatttttataactctcttttactactcttactcactttctcattctctctctctctctcttgcaagtcatgctcagcttacaacgatcctcaaccctaaaggtcttgaccttcactggtcgtccctcacttggatttccactgtgttaaaatatattaaacttgatttactatggtttatttctagaattttcttctagtttctagagtgctcattcaattactaaaatttttagagtcttcatgtatttagtagagttttttttattaataagtcttgaattttctaaaactatttcatactagttagtaataggaatgatatatttgtagttagttattatggtatagttcctccaaacaaaaaggttttcgcaatcgttatctgcggttgtcagtcccaaaagagtcttgtgaaatgatagtcaagtcgggagggtgttctcgaatgtctatcatctccactctaggtcctgtcttcaggatagctaatcatttcctaaaaaggagttccagttagctagctatattcctcctaaaatgacaattccaaatagtcgactacaatgccttcatcctatgtagaagtaggcaaaggcctatggccctcgtatctgggagctcgtttatattcttgaaggtcattacacttaagctgacgtggagacttcgctcaaacaggagttggttaagttagttgtttttaactaacttaacaactttatttcttcctactactgactttaggatcttaatcctaagcctataaataccaccttcacttattatttaaggacacaatagaattttggagtttgagaactcaataggatgagattgagagtttgagaaagaaaagattgagaggtagagagattcttaggattatgtttgggttttgtaagaaaagtcttctgtatatgaagaagattattcggtgtaaagtgtgagagtcgaaacactttgtgagtactcaacaaagaatctcgtctcaattgttttgtacattttcttgctcaatcaataaagaaggattatgatggtgttccagaactggagtagagccatagatcacattgatctatcggtcttgaaccagtatatatcttggtgttaatttttttattttttgtattttttattgtctctagttttacatactctatttgcccttgtttttattcgattgttgttctagattgttaatcttgtcactactaattgtttgagtgtttaaagttttgttcatcttaattctgcactattagtcttaatttttcaacaattattttaattacatttctagaatgatctatgaaatcctataagggtgtgtttggaagtaactgtgtaattattaggtagtgtaattactacaatggtaattacacagtccagtaataacactatattttaaagtacaaggtgtgtatttagatatgaggtggtaattacatatgaat

SEQ ID NO: 110768 - DNA, 1117 bp, Cannabis sativa
tgagatactacttgattgcgtatacttgcgtaataaacataattttcgtaacatagcccttcaaaagatcttgaaaaataataatgttatgagttaataatctgtttttgattaaagctccttgattattattaatcatgcgaggtaacacatcaaataacctagagcagagcatcttcaagagagagatgacagtttatgaagagtgttacaacaagctatatgtctataatcactagcattagtaggattctcaattttaggagtaagagagataacagtttcattaaggtctggaagtaaattacgttcattgaaaaagttcaaaatagcttgagtaatctcatctcctatgtcttcccaaagccttttgaaaaaatccttaccaaagccatgtaaacccgaattttggtattatgtattccaaacaaagctttcttcaatcactctttttgaaaggtctcactaaaaggagctgttgttcaagacaattcaagttgacattcttcgaagtagaacttttccttcccattatatttttaaaatggtttaaaaaatgatccacgattttagaatagtcatcgataaccatatcattctcaatgtatgttgttattatgttttctagccttctcttcttcatacaagcatgaaaaaattgagtattctcatcaccacaattgattcaaataatcttgctctgctgtattaaaaaactagtgtatctcttcaccacatcacagtaagtaagcctattattagccagatcactttgaacattacctaaggaaacttttttgtaaatttaagattcccaattaatcacatttttaaaaataattatttacctacaatcgttaaatttttgttcctaaatctttgttagaaaactcaattttttaatcacaaaccaataaagcccatagttttttaaattttctgttgtagaactttgtctacttaaaaaggctataatcttccttttacatattaatgagaatcaaatattccaatagcgttgggaggaataaaaatatctatttctatataaagtgtgcctatataactgaaattcttactttatgagaaattcatgggtgacttttaatttttattt

SEQ ID NO: 110769 - DNA, 14914 bp, Cannabis sativa
ttctaccaaaatatactaacatccttctaaatgactctaaatgcatgattagtctttaaaatagcctaacaaattataatcaaactaattaataatttaaagaatcactttaagaatattattacataaattagtcatatttagaagataaatatggactcatcagcgcccaggttgacatctagcgcccatgttgacatcctcacatcaacctagatgctgtatgagtgaaaaacgtgccaaacttgtattttttgatgctttagtgatattttgacaccacttagtcaatttcttagttttggttaagtcgttcactatttttcggagatgtcactttttttttgcgaaatcgagtagactcgaaacttctcaattgaggactaatttgttgatatttcattttgtcaaaaggtgaaataccaaagtgtgaatttgacttgtcacaatttgtaactctcgtttaatacaaaaatttagtcagatacttaagacaaactataatcggatagttagaacccaacgcatcaggccatacaccaacctgggcgttaggtgcccatcccaggtcttcgggatgtcgttttggacatacgttagactatcattaataaaattggacaaaagtctttaaatctaaccatgttaatagttcagagaaattttttaacggtccaaaatttaaagtgtgattgataaatatcagagttaaaaggtaaaatcctaattagactactagttttttttgtttaaataataaatcatagcattacattaccaaattaaacaagtatgatttgatggaacataagatccaaatgttggtttacttaacataaaccattattaattacttgagggtaagaaagagaagggtaactattaatagaccccgtacgaaatttaagcaacaaggttagaaaaatcggtctcttttgcttatacgagagaaatgagaacatagaagaagcaaaggaagacctcctcttctttgcgcctcctcttttcgcttctctctcccctcattctcaattggggattctctccatctctctctgcctaatttaggtcttcattctttctcaacttcttcattctcaattctcaatcctcaatcctcaattctccaattcaaattatttctttatatctctctatctttcaactttttccatattcactcacacctctaattcttatgcagctctcttcaattcattgttagcatctaatgaaacaattaagttcattcttttggatttctaacgataaaagtctttgctttcttttttgtttttcgtttttcgtttttgggaacagggctgggttgggttcattgatggtattggttatctctcatgtcatgtcctttttactgtagtgattttttgtgcttttgtattgatgatgaatcctcacattcgatggctgttgtggtttttctttttttttttgaaatatttgaatgtggaagtatgctagggtttgtgcttaatttatgtttactaggttcaaactgtctaatcaaattactcatgttgtagagattttttgaatttcatcatttattggcaaattgtttttggattatcatcatttatgtcccaaaagtttgaggtggtataattttattcatacttgatatgtatattgtataacttgttaaaaactagatatagttgataggactgttcaattatgttttaatgatcttttaattcgagctagagtagtagcctgtattttcagaagatagtaatggatttttctagtttgaggaatatacattgttttttatggttattttagagagcagaactggtcagttcaagtatgccatgaatctatcattggttagttcctacaattgctattaggcaccaccagcactagcggcttagtaatgattagcgttattttatattaattattaaattaaaacatatgtatgagatccaatacttaattgtatcgtatgacacttggtgccttttagcatttctcgcgagttccttattgcttgaaagttgtaagaatcaaatacgtggtagcaagagagtcttttggctaaaaatagggtctaactgccaaaaaagggaaggtggaagaaaatgattagctggtgtatttgaggtctttcttttgctcgttgttgcctttaatagttgttgatcatacaacggttatgtgtctgacctttccattatttaatacggtcattttgcttaattgctttgcttgcttagtcattgcttttgtcatctgtggtttaatagaagcaagagattgtcaaaagtgtgtacttactaattttctgctgatatgctcaaaagcaagagattgtccaaggaagtcttgaaaaaaaaaattagaagaaacagcattttgggtttccctatatgtaagaaaaatgtgagttattagcattttgtgctgaaactttaaatgaatgacaaaaaggatagaaaggacatgaatctttcattctatcatcctcaacattcatagatagttaccgaggcaaatctaaaatttatttatatgataataaagtattaatttgagttctgcttctttcttttttcccatctattgtagtaatcctggaagaattttttacgttttgtttgatcttgaacatatgggatcgtctagtggatagcacagtctaaaagaaaagagaaaaggttaggtctttctttcatgttttgcttaaagatggatatataaacttctgttttgcttgaagttgagaaggtaacaatgaattgcaagatgggtgattttatagtcatttgggataatatttgagtttgtaattcagcatttgatccttctgtttgtaaataaggaaatctgttcttgtcatattgaatatacaagcactttcggtgttaaatgagaaatacaagcactggatctagatgaatgtacctccctactcagttaaatctttacttaaattattgcaatctgatcgtgttatttgattttctaaagtgtgatgtgaattttagtattagctatggtggttcttaaattcatcagtactaggctatgtgtggggtgaaattgtgttagcaaaagatttgacatgatgattagtccacttgcggaagatcatttggacagtttcacattaggatataatcattccaagttccaatatattttggaagattttgtgaaaccaagctggagttccaaggataaaaggcgttggttctgtttgcagccttttataaagtgcttaaagtaactacatgaactagtataaatttggctacttattcgtggtgccctttcaatgatttgtttccattcctttatatgaagcctcatatgtgtgtgtgtatattcttaatctttatggcccccaagtcttataataaatatatatataatcttatggagaatccaattctgcaggtttatagcaactatatattgaactgcaattaatttatccattaaagtgattttttttttttaagatcttgagaattattcatgacaaagctgacttttatttcattctttttgtattgtattcctactctttttcattctctatttcaatatagcttgagaagtttttgagaagttggctttttaaattcttttggttcatatatgtggaatttaaatgccctaaatctactttttcttaagcattatatatctgggcctactttgaagtttgcctttgaactgctggccgctccaagttaactaactctttgtattgaagaagtatctctttgcaatattattgtgctaataattgtggagacaggttaaattattggacatcccttttggactctaaatggatttctcaattcttatctcagactattgacattcatacactaaaatggtaagtattgaatacctttagtgattgaaaaggaggagagtccagtcatagtcattgtgacatgactggaccagactcccatacatttgatgctcctcttctattttacgatggtatttgctgtttatatctttgctttacacttaacactttatccataatttgccttaaactttgcattaaacatcacattactttggtatttatttgctagttcttcactcccttttattcatacatcttaagatatattccatcttaccatagcagtctgaatttttaatcttgaaattttatgttaaggaagtgaactgcagctgtaatggtataaggacatactcttcttccccctaatggtcaagaatattgaaaaacaattcatgatgaatgataaatgattatacttacgtagagtagagttctaatcaaattgttttaaaaattcttagtttcatgctttcctccatttacttttttgttattataagttaggtatcacagtaatcgaactttactgattgccccttagtttaagtacttgaagtggcattctatttctattgttaattatgcatctgtaaagccctgttctaatctccatgtgaatcaacactgtaatgcctacatcatatgtttgtttcttagctataactagtgcataactatttccaattgtttgaactagtaccaaacaatcatattctttgtatatgattactttatacgtgaacgtattataattgggttgagcatatactttatataagtgcactgttttggtgattatccattgaaaccagtattagaatattgagtgtgggcttggctgggtcaactggggtttaagtacattgtaagaggatgcttaagattgccccttatgatatatatttttatataacttttgctagtgattttggagtattagtcacggaaaatgagtgggggagatattgtcaccattattatgtgtaagtttggtttaagatctctgaggataagtatagaactctgttggatgtgacatggggtagagatttccatgatagtagggtgtcaaagcttttctttaaggcttactcattttataagctacattgtttcttctcttggccttgacttttgttatttattttttccttttttaataccaacttccttcatatctcactcttcttgtctggtttattaacatcatatattcatatggcttgtttaaaaaaacctatttttttctatgagttaattcaataattgtatgtatggtagttcctttacttttattttttgataattcccaaataaataaataaaagaaaaaagaaagtaagtcggtttccggttaaaaaaagaaaatacggtaaaatggttcctaaatttaagttttgacccttatttatttaatttttaacaaattaccgcgttctttctgatttacttttacctgttcaattttaatagattttcttaaatattaagtcttaattttactgaattaccgactttaattccgccttttctggtgtcagttcaacaaataaagtaaattaccttaaagcccccaattatattgcaccgtttaacaaccctcccaaacgtcacgtcgaagccctttatcgtcttttcacctcctggctccaaaacatgaacgaataaaatatcaggctcctctctttttttttcaaaattaattaattaattaaaaaggaaaaagaaaagctgaatactatctttctctctcttgctttggagcgaaccaatattcggaaaaggcaagatctagaccgtcaaatttaaagatctaacggctctcataagtcggcgagtagttaccccataacttctcactgtggatttttatcataaaccctagccgcgcgattcacagaaactcggtttccctccttttctcatcttcttcactctcactcactttctctccttccaaacaatctgtaagtcagtctcgattgctcgccgatcgtagatctttatctatctttatttttatctgtgtctctttccctgttagatctttagtctcaattttttttttcttttgtagatattttcaggacagacctttcttcttcttgtttttcatacgagtctttctaagattattgttgtatctttcagtttgtaaagtcctaaaagaattttataggaaaaagaaaagaaaataatagattgtttgtaagttataagtaagtttttgtatataggagtcgtattcaatctttatgagcttcgactagttagtcaagataatgacggactggagagcatcttggttgatttgcgtttccgattatgaggtctgttcgtgctgagcttttgggttcagggtggtttgggtctgtccacgcgtccgagttcgaggctgagttgactcgcaggtcgactcgaaggctcagtgagtccagcgatagggtagtaagtccacgagtcaaggcacttgggagcctgggccctgcggcaatgccatcggttggcatgagaaggaccacaagggtgtttggggtggtaaagggtgcagatggagcgagggtgttgaggtcagggaggcggctctcggccgaatctggtgagactaaactcaggaggcataacgatggggatgactggtttaacgttgttaagagcaatggtggcaaagggggtggtgggggaggcctcagctatagctggtctgacaatgataagcccatgagaagccccacagcggctgaatttgaggcgcctaaaaagcccccaaaggaaagttctgtggctgctttggctaaagtgcacgacacagataaaatgtatggaattgtgtacacccgaaagaggaagaaaagttgcgagagtcgagcaatatcggaggtttcgtgtgatggcaggtttgggcgtcttttcaaacgtcgacagagaaggaagctaaattgtggtgtgagctcagatgtggtagctggtcattctgatggacgagaggtgattaacgttgctgttgcttcatcccttgataggaatctttgtgctgttcgttttttgtattctgttttggtttacatgacgagggccagactgagattaaccgatctttttgagtttctcatctccgaacctttacgaagtgttcacacttcatctggcatgaccacttccttggtacggttttctatgtctttgcaattttttaaactatatttttgtagttggtgcacccatctatgttcttagaatatataatgggaatatagttggattgtaacatattttttttagtttctggatttactctaataagttttttggtgataattttatttcttttttattatttgtaatcatctttcaggagcatccttcgactgagcattttgcgagttgcaagatttttggatccatccaatttcagcctttattttgtgtggacttttctgcaattccgcattgttttattttcatgcattcatgcatgttttttagacacaatcagccatcatttgtgcgtaatgatgcaattctcgatggtgatgacagcatgtctgatgacgatgaaaatacaaatattttggaatctgctgcaattttccgacctgaattaagtcatactgataacaggtggttgtcacatccatctgttaaagcttccaagttggctagtcgaagcactcagtacaggggtggattaatttcacgaaaaaggcggagttcgctgaggagggcaagagctagaaatccttcattaaatagtgtacagaattttaatggagttttagtttctgatttaggtatctttaggaaaaatcaagttccttctgtgggatccaataacaagattcgaaggtcacttcgaaataatagatctggtggaagcttgaaagaattgaattctacaaaagcagtattaacaaagagtacggacgcagtctcctgctctgcaaatcttctggttattgaatcggacaagtgctacagggaagaaggagtatacattagtttagaaatgtcgtctttaggagagtggcttattgctgttaagaaaaatggaacaacaaaattcaccctcaaggcagacaagattatgaggccaaattcttttaaccgcttcacacatgctataacatggactgtggataatgcttggaagcttgagtttcctgataaaatggactggcttgtctacaaggatctttacaagcaatgttctgatagaaatgtgtcatctactggggttaagaatatacctatacctggggtaaaagatgtctcacttgattgggatggacgtagtgctccattttgcaggccaaattcatacatctccgtgagagacaatgaagtcaagagagccttggcaaataagaacgcaaattatgacatggatttagaggatgaggcatggctaaagaaattgaacagtgataatggaatacctgagcttgtttcagaggatatttttgaatcattgtttgataccttagagatagcctacttttataacgaagttgatatcactacggacattaatttagcaattcgtttatgtcaaaatttgggtgggagagaagtagttgtagccgtttatgaatattggttggaaaagcggaagcagaataaggcatcatcactgcttcgggtttttcaggtacaagttcaattactgatactctcttttttgatttttgggcatgtttattttggctggtttactcattgaattattgtgtggttatctgaagtgttaaatagtgtaattagttgtggtttattctagttgtaattgtttacctcaagtttacatatctacttttaaaaaattctatttctgatttggattatgttatatttagtgacttcctgttcgactgacagtgtctgttgaatttttgtaccgctactaattccatgtgttcgaatctgatgacagttaatttttctgtcatggatacaaaaaatttctttgagaaattcatgtgtcaatttgaacgcccttatccttcggttgttcatcatcttatttgactagtttaattttatttctgtgaatgtactataatgatagttgttttaacagggtaatgaaatgaaaagagcctcgacaaccataaagacttcatatcgcaggaagagatcctttaaacgacaaccaagccaactaggaagaggcaaacaatccagttttttgtttcacggtaattttaaattttaaggcatgaagttgatggtcttagtctgttttttcctttagatatttaataatagcttttgctgaattatatttgtttttctgtaacgatgtacagccatggtgtctgaaataggcagtgttgatgaacagaatgcctcacttactaaagctcaaatctcagcaaaaaggtgtatggaatcagcagtttgcaaacgtcgtagggctcagatgcttatgaacaatgcagatcttgctacatacaaggcaacaatggcgaggagaattgctgaagccatggctttatatcccaattgtgcttctgcttctgcttattttcttgattgagaatcaaattgctatgaccacaattacccaattttaaattcaaaggggggaaggaataatttctctgtggctggctggtttaaaggcccttcttttttttggcgaaatgcaagtattgtaattttgtatagcttttctattggtattcttgtacattctgtattaattattagtataacctcacaccaatagtgtacaagtggatttagttgatttccttaggcagaatatgatgggtaaaggagattacatttgggcccaaatgactttcttgctctatggtcttaatcgtcttttattggtgctgactcggtaacattctgcttggatagttttcatttctgcacgtgtgcagagggaaaaatgttgtgtaacttgactaaatgtgtttttagaaaaatcttggatttaactttctgtttcttaaggtttgctttagataatgttgggcgaattagaataggtgctttcacaataggtcactaaaacgaactcatttcctgctgctctagcagactccaaagttcataagtatctgcctcactaaggcaaagagggttttgcaaaaatttagtcatctcgtcattacccgaacaacttcaatacgttggtttcttacctgacagccattaagtcgtacgggaaggaggagatgatagttataagtagcataatctgaaaaataaaaaatatggaatcaatattgttgatcgagattaagagagtaaatgcaagtatttttaagtagttggggtattaatgagttttagtctacaagttactagtatttaatgtggaggtgtttctttatcgagaatattctactctattttttcagatttcccttcaaatgtggtaggaggtaattattgttgtttcaatagaggaaaaagacctctcttgtctcaagtatccaccttagccttacacaagttcctaaattagcgaaatagggtgtacatgtgtatgtagtaggttacatagggtttaggcgagataaatccttattattccttgattgatgtgacaatttagtatgtggccgtcacttacatccttgaatatgcgtaatcgccaaagaacaatttaattcggctgacatgtctttttatattcatccgtagacgtttcttctatgctgcatttaatgtcttttaatagttcacctttgggaccctggcctagtcatgctggactttgcccaactcccgaagatgaacaaaaggttgatcctcccggatcaagtcatagctccaagaggaaccatttgattatatctactgaaatcctaagtctacttaagatttccttgagcacctgcgagtcttatgctttagttgccacatgtccgatgatagagctgccacatatattgggataaaaacaggacaacaatataatgagataataggagcagactacccattaaaaacctcacatgaaaaggggagatgacagattagaaacaaaatattcggtaaaattttaaaaaattagaggatataatgcgagaaaggttttacaaaattatactagactttctcgtttctagccatccaaatagaatccactacttacatattacctctctcaattaaacccttatgaatgtagtccccaaaggaaattcacccaatcccaaacctaaacatcgttttctctattagacgttaaactctatggtgatgcacgtcaaaggtgctaagcagactcattatagtgaaataaatgatccattatatttcctctttcgagcaacacaaaggacatatagtgtcaaaaccaaaaattctagtcccaaaaattattttagcaggcaatgcatatgagagaatgcaccactgtaagatcttgtgatgctccaattggaattccacaacttgttccaaagtacgggcacaatcgaacaatggggagctaaagccacgacttggagaaggtaagtaaatttagttgtgaatttaccactgctttcactcgtcttagcccaaccatctttaccgaattctctcagtcttccaccctttaaaatagagctaaaaatatcatgatcaactacaatattatttttatttttagacaggtgatacatgtacttttagagttctaaaatcaaccaaaacggacccatggcccaattaagccagtgggtaagcctatgtcagagtccaaccacgactccgaatttagctataggtcaggtccttttggtcatgaaaggacatctcgctcagaaaaagaaaggcttacagaacacacatttattttttatttttaaaattaaaaaataaaagagattatagaacatatttttatttttcaaaaataaaatttttaaaaacaaaaatgtgattaaaaaattaaaaaacaaaaatttaacaactactcgttaggagtgtacgtcggtcgatttggtcggtttatgctagaatttatttaattcaatgtaaagatcgagtacaaaaattttagtgcaaccgatccaattaagaaaaaagaaaatagtaacctgcccaatgaaattgatcggttcagtcgggttaacccgcctaaaccagctattaatattttttttttttttttattttcacattcaattgttatattttagttaattataataataaaataaatatatatatacaaattgaattcaaaatttaactatactatattaatttaaattttataatttttaaatagttatataaattatattatatataaatatatataataaaaacatgtatatataaatcctattaatcagtttgatcggattagtttggttgattgagggagtttattttatttttaacctgctgaatataaagagtgaacatgttatattttcattgtattttttggtttgcatttttcatcatattatcttaatttaattagacaagagtttacaaaaatttatacacaaccttactactcgttccttccaaaataatcatattttccaaaccgatgtcgtttcacaagtttttattttaatattgtcaaatattataaaaaataaaaagttaaataagcaaccctacgaattatagaaagagtgggattgattgaggagaagagtagtgaaaactgaaatctgaaaactaaaagcaatgtcggattctcgagaagtggggaaggagaacgctaacttccgagacaaccatcgccggattcttgccgcccagttcgagctccggcggaggctctacaaagccatatccaacgatcccagccttcccgatgaggtccgagaggagaatcgctacaagcttgccaagcttcctagaaatagttccttcactcgaatcaggaaccgctgcgtcttcacaggccgcgctcgcggtgtctatgccgcctttcgcatgtctcgtctcgttttccgtgacttggctaacaagggcatgttgaatgggatcaagaaggcctcctggtagattagctgcctttgtcgcccgaaccggatttccttcttctcctttgccggtaatgtttatttatataatacgaattgagtagggaattgatttgatttgaatttgagaatgtaattcttgcaaatgctagggtttaaattgtggaaactaggctttagaaagaaatttgtaatgatatttcgctattttagtctagtagggattgaagaactaaataattatttgttttgctttggcgaagtggtttttcaagtagttgagataaacctcttaattaagcatagcattgtggatgttgagattccttctgattacatgataattgacatattgaactgagctcttaactacttgatgaataggtttttgtgtatgaaagaaggtctgccttcttgccagctttgaattaatgttgataacataatcctctgtatgtgattacttgttaggtaggctataagaatattgaaattgagttgatctgattcttttcttcgaaaagattgtatatgtgttggaggtaatgtatgcttcttcaactggatttcacatctggtttgttgattgctgagccagggtttcatactttcatgtgttttggctttaacaaaaagaatgagaaaaaatacacttcagttattagttgtccatgagaaatacaagcaattttgtttctgtagttttcagtagtaatatatattttagtttgagtattgagggtgtaataaattttatctgatatattatctttttgacccaattagacaattttagagtttagtttcacagaacaaataatcaacggagactattctagacataaaatttttagtatattttttcctctcagaacagcagaaaactagaaatggtagaacattgaattagtacaaatatgcagttattagtcttgtcttcggagcaagcaggaggatcaagggtaatgaagtttatagacgatttttatccaacaatattagtgctgtcagaagtaacacttttacacaagttattgccctgtggcaaaatgtaggcctaatgttcactttgtaaggctgtgaatggtactctatatagcgccttttgtatggtgactattacttctgttcttttgtagcttgggtgtttttcccgtgtcttctcatacattagctgttacatttcttggctgttccacacagctttagctgttagacttgtcatttaaacagttttgattggtctttccttgccgttatcaacctgttaaaaaaagttctttctacttcagcatacttcctatcatcattaagttggaagttcgcgaagcatactttacattttgtttggtttgcttttcttggatagactatataaccatgatctgaactttgtgctcgtttttcccttgcagatgatactccgattacagcgaacaattcgtatgataaattttggttgaattcttctcaaagtataacagaatagaacacctttttaattgttgtggtgttcagcgttgaacaacccttcttatataaagattttggaaactatgaattttagtgccgtttgttgtagctaggggatatttttcattgggctacttcttatttattgcataaagataacacaagataaacaaaccatttggcaatgaacaggtattggtgtttgcatgatgggaaagccttgtgggggtttttgttcactagcatgaatataagtatctgcttaccaacttcgcatgataatttttctagtaaaactattgctagcacagtcgacaacgatatattgctatcttttgattaatgattatgttttgctaaattggaggaaaatttccctaaataaaagttaaagggctcttgtgcttgtactacccagaagaggtaacttaaatgcttagtcgcaagattggattggattacattctaattaaataagaatggaagatagattacgttataaaattctaattaaaaatctatccaatttaatctattatttatattctacacttaattatatataaaaaaaaaaaaaaaaaaaaaactttaaaaatggtaaaataatattatataa

SEQ ID NO: 110770 - DNA, 6863 bp, Cannabis sativa
atcaacatacttgtgagttgatctaagatcctggtaaaataaatttccaacatgtacttggtgagctcaagttcttgaattctttgctatgaagaggagataaacaatttccgttagaagaaccagaggttgaaggccacattggatggtatggaaaacttattgagggcatactcgggggaaaactcaagtattgctctctaagtgcgaaagaaaataagaagaatggagaattcattgcacgtgttaatagagtgaactctatgatctcaactaatgatatcccttaagatagctgtagaaaaaacacgtcgctagatggacctcctacgggttagtagaggcaactagagctaattctctattagaaggtctcaccgaggggaacaccccataaacttgagaagaaactttatccaaaaagtttcatggtaggtgacacctcacctatggcttacttccaagagagaagaaaatgtaaggccgtatccccaaactatgttgagaagtcaaagaaagacagaacgagagaggtacctcacacacctcccatgaaaacaatgaagaaatttaaagtttcacccgctaacctcagaggtagaatgagggaaaagattaaggaactagaagcaaagatgctagagatacgttgaagaattacaattgcctcaaaagcaggcttggatgatgatgatgaaattgatgaagaatcccttttctcaagagagattcaagtagaaccacttccacccaattttaaagagctacaaatgacaacatatgatggtactactgacccaaagtacaatctcagtgcttttaatgaactaatgaagataaaaaaagtctctaacaaggcaagatgccgatgcttcacgaccacgttaaaaggagatgcatacaagtagttcaaacaactagaaccgggaacaagcaattctcagaagagttcctccaacaacatcaagatgcatgaaattacatcatgcacatcataataattaccaatgtgaagcaaggcaaataagaaagtttgagaagctacattcgatgcttcaacactgaaattgcaaaaaattaagaaggcatcaaaagatgaactcaagatggccatagccataggaatatgccccgaaagctaactatggagaaacatgtttaaagatgagttgaacagtcttgatgacttatacgaaagagcggagaagtatatccatgtggaagaaggtaacagacacttagaagatgacatgggtgacaactcattggacctctacaaggtctgttaggcgacataccctaggactcgccgattgatacgcctaaaagacaccttcatctatgaatccatggacatccatcatccaagaaatcctaagaaggggaactaccacatttaccacaaccaataagaaaatattctctaggttggcttccagaagtaatagcgagcctatcttatgtcttttactcgtttagtatgtctcgttaaatcaaagaggacacttaagttgacctctaatagtagcgagtgtacctagaaacttacctgtgaatatatctttattaataaaatgttagattttcattgcaaagtaataaaaatggtggaacgatcaaaagtgttgagcaacacaaacacaaatgataagtatctacaaaaaaaaatatcttctgtaaaaattagatacccttacagtccaagagagtaacaacgaggtggcaccaaagcaacctcatgaaaataagcctagaacaacttgagtcagctagccaaaaagggtcttgaagagacgcttgcaaagatagtactatgcctaaaaatgagaaggatgtttctcaatcaaaaattataaactaataagaggatgactagcaaatagggccgatacgtccttagccataccaacaaatatgaggatggctggcccatatatagggccaatacgtccttagccatactaaaaaataagaggatggctggcccatagggtcgatgtgtccttagccgttaggtacaaataaatatttaaaagtgtgcatatgaatgtaaagaataataatccctcaaggaaatggtaacaacacgtcaaaaagttgaaaaaaattcaagatacaaaacactctcttacacccaaatataaagagtggtaattgagaagagatcgagactactctaagagccaatacttattcgtctagcagtagaggtcgagactactcgcatctctcaacagtgttgaaaaatagcaagttgcattttgcgagacgctagttaagatatttattcttgctatagcttttcacgaaaacttttggacttaatcttttaagattctaaaataagttacactttgcttatttcccttaatctttcaacacactcacaggtatgtaggtcaataagttgaagctcttaaagaactcattatctaccttttctagtgatacaatttcgatttgttacacatgggaagacttctatctttatcatctcgctggatcttactgctaatgcgtaatgcgagattgatattactcattatgaattatctctccgagacaattcatatatcaccgagttttttataatttctgtgtctaattttccacgtgttatgtccatatttatggctcaaaatatggtcataacaggtacaattaagtatcgagtcctataatatcctttaaagaatatcactaaccaatcgtagggcgctacgtacctctagaaggtgatggatactattagtgtccaataacaatgctctaaaattataatatgtggaacctaatacttaatcacaccaatattaatataatgggttagtagtcaccactaatgtatttttatttctaaatcttctcttgaatccactaaataaacaaaacaattaattaataatttttacatgtactaattggatacatcgggatgacttgtaaattataaagtacatgattttcttcttttagaatgtaatgattacataagtaatttatacaacaaaacattttttgcaagctcatattttttataattgcaatttgcaatcattatattttatactattcatatataagaacaattttagcactattatatatataccttttctacaaaaagagcagctatcctccaaataaaaatagatagaagttataaattgaaggagagaataatcttaattaaggtttcataattaggaacaaacatagagaacatacaaagttagaacgagtatataactttgtagatactctattatattgtgcgtttacatacatctaaatttaaaacacataaacaatgtattatatatattataaccttacaaaaaaaccttatttaaaaccgatgaacaatatattatattatattatattatatttagatgtattacctttaatttcttcctttcttgtatgtttttctctttccttatctctctttatttggtttatttttattttattcattataattaatctaatgagaagtggaggctcaacttttttatttatttgttaatatggtaaatataattttggaccatgtgttttataaaattaattaattagaatttctgttttattaaatgataaaatttaccctatatttttcaaaatagtaaaatacgacactgagctcaatttttaacaatattatttttaatataacctattacgacagaaaatataaccagttttatcataacatctctagatcagattattattaagttttattttgacaaaaaatcagtccatttgtacaattttagaaaaaatacataatggtctattttatcatttaacaaaatagaagatccaattagtaactttgacaaaatacatgatccaagatatagatagtatttaccgttgttaataaacattatacgaaaacttttatacatgtatttctttcaaaattttctttatatattaatttttgttttagattttaaaagctaaagaagccatggccacctcctaataattttctaactcggtcatttatattggttcgtccttaaatataagatttgtgtctatctataatagggaagtttacacaaaattacttaaaactaaaaaaaactataaaattatataaaaatgtattttttttttgtcattttgggtatttatgaaataataatcccaatgtaataagaacgcattttttttttaatgtttttgaaatgatggacaattttttcaaaccaataggtttaattattttatttttaagctaattataatggatagatggtgtgtatgttagtttccctagaattggcggcatggaatatctttttttaaaaaacaatgacttgaattaatgttggttgaggaggaaaatattcagtcaattcaaacttgaaaagaaatgagtactacatgtttaagttgagaacataaaaaaaaaatcacaaaaagccaataacataatgcttgttaatttgcggcgcatttagatttcttaaaatatatatcatgtgatattttattttttgataataatatgatgtattattttataaatttaaattatctctatttatcaatcttttccaaagaatgttcaagtaattacaattgtatagaatatttggaattttccaaaatttattagagagttataaactacattgtaccatcatataatatgttatttttttatatatatgccgacaagctattgcgatacatattttttaatattgtaataatgttatacatataagggtttaatagtgaataaattattcaaattttcttgaaaactagtaagctccctacgtactatataataactataataatatacattgttatatttttatgtaaaaatatattttttacatattaaaattcagaaaaagttaattctcactaataagtgtaaatactctaatttataaataattatgaattaatggatttagattattcggctcctcacataggctaccaacaagagtactgttggcacaaggtagttaattaatttcatattaggtagaaaacaatattatgttaaaaattaagctaagttaagttaatttcgtacgtatttgtttgtattatattatattatattaaactaaattatatattatataatattaggttaaatttaatttatattaaagtattttatatttatatattatttaaaaatattatataaaatataatttaatataatatctacagtgtatcaaatcaaccgttaatgttataaatttgtattagaagtctaataatatatagtactttaattgtttctaactcaaatatacaaagtgattattatattaatatgaatcaaacacacatatatagacgcgccaagtactatatatcaattctgtttcaaaaaaaaaaaggtatatatatcaattaataagagaatattattgttggttttagacagtacctacatgttaattaaagacataacctttataattaactattcaaatcagtacataagatcctatacaccttaattgttcatccctaaatggtgtacaaaagaatgaataaaaaaaaaaaactaaagacaaattaatattaagaaatggtaaggcattacaaatgataacgtcatgtttgattattatatatctcaatcttaatctagacagcctagcagatagtgttcatattaatttaatatgatacatatgcatagagttagtttgtagtgtgattagtactatacatatatacattacaatactataaaacaagtgattaaaatatatgaaaaatttgtatacacttaattttttatttttttattttttttggtgacaaaatttctttaagtttattttgctttataaatttgacacgtgccaattaaatattatcgttaaatattaactggatgatgactactgtatatacctgtgtatatgtaataataaaacctcgaagtcgatacaatagtaatcgaataccttaaatttttaaaaaaaaattaaagggattttgtccaaaaaaataaataaattaagtgtataaaaattgaaacataagtactcaaagttttaagtttgtaaatggcataatcctaatgtttatttttattgacataagttttcaatgtttatttttagtgacataaactctattattttcttaaacaggccacaaataaggtctagattcttgatcattaagtctagacagaaacatgtagtataaattatttctaaatgttcttttaataaattcaaaacagaatttgtattgacaaaactggaggaaaattacagttttacaaatattaaatacttatgccgctaaaaataattattgagtttatgccgttaacaaacttaaaattgtgggtgccgccatttaacctatatatataattagaaagaaagagtgatgaggtggtggtggtgggtagggctagctagggcatagtattgcgtgttgtagggtatggccggtctagtggcccactcagctttttgtgtggggccactaattttttgttagtttgtgaacagacaaaagcagagaagcttcttatcctcctcctcagttttcacacacatagaatctctcaaaaactcaaactcaccatcatcttattatatttaaaacaaaatttccttctatatatatttttctcattaataccctccttttgttacattattacaatctttaccactcttcatacccacctttaccccaaaccaaaacagtcatttcattttggtcccccaacagtggcatatatatatataacccattgtcgtacaaccaattttagttcacatattctacagttttgttttcttctaccattactctctctctctctctct

SEQ ID NO: 110771 - DNA, 8872 bp, Cannabis sativa
  modified_base (2481)..(2487): a, c, t, g, unknown or other
tattaagagttagtctcacattgctaatgtgtagaaataaattgtgatatataagatgaatgggctactcctcccattaccaattggttttgagatgaagtctcattcatcttatcccaaattctaccaatatttctttgaggatctcaacgtttagaatgtaacattttcaacattatgaacaaaaaaaatttaattattaaagtctttatcatggcctcaaacaagccgatctcataatttgttgttctacaccccaaattctaggttctacacattctaaaacctataagtttaaataaagtaattaataataataaatctcaaaccaacaaagttaaaaattatggctcaccaaaggtttcgtaatgttttatcgcaaactatcgcaaaatcatggttaaaatatcgttttccctggaaaacatgtcatcattgtagatggtaccattattaaagcatcctcaatgtttttttcctccttaaaaattaagttataatgtgatttataaatatagtatttattttgcaccagagttaatttataagtatcatatttaaaatgtcaattaatttttttcttgcaaaaaaattaatagtggttatcaaattaattatatttatattattttttcaattaatagttgtatcatatttagtagctagtttgtgctatattgagtggctggtttgcgctatatttggaggtggctataatttgtatcttaacattaacgtttttcatttattctgaagaattaaattgtactaatttttttaatctatatattttaattaattttattagttttataatttttctccactaatcatattaaattaattattttttccatatatatttacattctttttcattttcattcttaccatatatttaaaattttagttgtttgatgttttctaaaaaacataagttttagtcatgtaattttctaagtttaatcttttaggtataccctttggttagttacttagttacctatataggcttatatactctatagttttttaatttcttttctctcagttgtaattattaagatcaaacgataagaaagtcttttggttgagttatattttctaaaattattttatttttaatatatatgttttttttttgacaatgaactttcattgaatataaaattaaatttttgaaatcatctttacatatcttatttggctatacaataaattttcaagtgtggtctctcttcaattatactctattgcttattcaataatgataaaaaaaataaaagaaaagacaaattacatatacaagttattttaataaatgagacccattttaaataaaaataattagttagaatttttttgaaccaaaaaattaaatattattaaatcaaataagctactaagttagtttccaaatctgcagggacaaaacccttgtgggaaatacggccataaataaaaccagaaaaacgagctgaaaagttagccgcctggttcccagaccgtttaacaaaattatttgaaataggaaacaaaagagaggattgcataagagcaacacaatccgaaattagttagaattaattgttacataactgtattaattgcttattaataaaaatcattagttagaattacttgttatataattgtattaataattctaactaatttttttaatgatttaaaatttaaactcatgtcaattatcactaagacattaattcatgcatctcaaacagatgtgggcataatttttggaatttttttgtatgattttttaattttatttatttatttaagatttgaaactatgaaatctgcaaaaattcgattgtgcttaatgggcactcaatgttgctcgatgtctaactcgacggagccttaaaaatcaaaagttttatgaaaagaataattttggtcaatagggggttgatactgctcgattttattcaatgcaattattacaagagacataaattttaatttaagtgtatgtttcagatgattattattttgaatttgtgcatgttttcaagatatacacatttaagatatttgtagatacaatttctgaaagtatataatttgaaaccccgatcaaaagattcatttttatgtcaatgaggcttagtattatctaatatgtcatatcccagtttttagtacgcaactaaatatcgagtctcatataagtagtgacttttattaaatatcgctaactaattgcagtatgtgtaccttataccaatgttctttccaagagtgtatttacatatcttaaatgtatagatcttaaaaaataatacttaaatttaacaaaagaaaaagaaataattacataaaacacaatttttgtaaaattatatttttacgttttaagaattttttttatatttttacggtttttcataaaaacaatacaaaaataataaaaaactatataaaaataatatctaaataacatcaaaacaacannnnnnnataacatacaaataacaaaaaaataacaataaatttacaaaaatacaacataaaaagactgtattttctgtaaatatgaaactgaatttttgtaacttttttgttgtttttgtgaatgtgtgaaataatcccaaagaaaaatcatcttaaacggacacctgaataaataaataaaattatgtatttttgcaagacatcaggcagtatcgaacaccaaacttttttttcacatatatatatatatatataaaatgatttttatggtccgtcaagctgggcataaatcatccatggaattattgaaaatttaagagttttagatgaggttgggcagggagggtggctgctcttttgatagatttttcatagaagagtgagagagagagagacgatgatgatgaagaattggttatgataattcaataagatattaactacaaaataaaaaactagcttagatcttgttggttagtggtgaagtagtctaaaaacataccttaacatatatatcgatgcatatatccaaacaatcattggcagccagagtctgtgaaattcttctaagagcttcaacctccattttagtaccaagattatcggaacccccatttgccaccatcatatcatcctcatctccattcatctcattattattattatcaactaggtgttccaaggtttgatgctttatttggtgcaacaggctctcatactcgtcctgcatattcaacagagcttgatcaagtgacccctcaaacctcatggcatcaacctctgtttcgtacagagccttgagagtgaccacagtctctcttaaccgatgagtcctgtactgatcagtggccttggtccggctcaagaactccaccacctcctggagcctctgaatcactgcctcaccatcttcactgatcgagctcaccgcctcgttaagctggtcaacacagtcaacgtacttgatcagcttcttcaatcgtttcttcttggtcgtgacaactgatctctcggccgacaactcttcggagatgtctaggagcttttgctggagagtgtcggagattttgaagctgtcgaggagcgagagagcgggagtgacagctctgttgattctggtttccagagcttttgcggccatggatagagactgcaaaggagctactctctttgaggctgttgagagagcctcgtctataagatcaaacttcttgtccatcatgcccagactttctcctattctggccgagttttttagtacgcttctcaaatctgagcaggcttcctcgagcttaaagaggtagaaatcttcttcaaattccttggaccccattaatggtgaatttagttgtgcaaactctaataatcttttaagtccttgtgacttaaggatgaaaattaagggtaatgatgatgaggaccaagagtaataaatattaatttcatatttgtataattacttaggacaagagaaatgctttcagatgacaggcacaacatgacagtaagaaacaatcttcaatggaatctagggtcgattagaactatgaaacaaatggcagttgtacgtcgaaaaccaacaaattgcggtaatattatattatacaaaacatataatatatataacatattatataatatattatatatcaatgttggcctgcttagcaatttagttttcatggatcaatgttgacatctatagtctaaccaatgatgacataggtttagtgtttatgatgaccttcttaacaatttagttaattgtaactagcctgtttagaaatttaaagttaatcttcatagatcaagtgtttatggcctccttaccaattatatattataatatattatgaaattttatattttataattaacgattaattaattaaatacggaataataaaattagtactgaagtcgatattctcaaaatcgtgttatgtaaatattgcagaatagaataccaacaaagaataaaagtgtagaaaaataaaaatataagatttttatacgtggtatcaataatctttacagatttctactagtccatagggccacgcccagagataatattcattaataagatctcaataatataatatttttgacttatgcataaatcaactctatcttattatatgtcgcaagcatggagaattccaccgtgatgtatgaaccttgttgaaacttcaaatgttcgaattctcttcgaactacttgaaaagtgcttggttctactcgaggcaagacttgaaacaccttctctcgaaggttcacaattttgtttttcttctttgctgacttgtttacaaactcaaaaaaattagaaatctataaatagacttagagtcaaatacaatctcctctacaaaacaaagacactcttcttacaaaataagaatgaaatacaaagagatgaaagagatagaaaactctagctaccaatatgagtatttatagacaatatactcacattagatagcgtatacatggactcaatcgtccacaactcataggaagactttcctaaaatatttcttcaatcaacctagaatttcctattctacacttgcagaatcgcaagtagttgatgcaaagtttcttatatagaaatgaaaaacttccaattcaattttctaattaatacttgatcaaatctttaataaatggtgagatcaaacacaatacacagttggacaagatagaacacataaatttgattttatttcattaaatacatactatgtttgttcagcttttctaaaataaaaaacctagacaacaaaaatacttttaataataaaatcaattaaaatatatatatgtgaaaagtataattatactcaatccatatatataaatattataaaatatctttgtcaattaaatatgccaaaaattgaattaacaatcttaccctttgactctttaattgacaaaatattttataaaaaagcaaacaaggagaaaacatgcacaaagtgttagaaacaaaataatgagtaaaaaaatactcccatgcatgaatactttagagtttatgccctaaaattaagtatttaatggataatatattagagaatatatgaaatacaagtataagataaatgaaaatattaattatagaaatataattaataaatatctgaaaattctattatcatatagagtgggcatgatcttgtaaggaaatacaagagaattaagatcatacaatatgaataaaacaagtcggtagttgtttaccaagattttcaaaaaacgaattatttaatatttagaactaaagaaaatgggattaatgagccttattccatgagttagtattattatcaaataagctagaaatgtctaagggattacaatgaatatgaacactctattctcttctcaagcttgtgagttaagtaattataaccctttacataaatgattcaatgcgtatttatagagtaatagaggtcatacttagttaccatttttctctaatggggtgtttacagataatacattactttgggcttatcaagcaaagcctaacccatgagcaatgattgtatgctaacttctcatgttaatcacgctcacagctgttgttaccgtgtcctattattgcgggtaattagttatatattaattacttaaccttcaactatctaatttcctattttaacttgatattattctctatctgaggtttaaggagagtgaattccttcttttgcacaaaatagtaagcgggaaaactacaactggcttcaagatacacactggagggttcttctggctacacagagctaggatccttctgcatatagactagccttggcagagactcgtttgagcaagaagtgtgactgccttcccggaaggccaagtttgtattaggctcggcccagttcatgttctttaggacccactaatgggctttaaatagttgccttgagtccacgtgtcccttgctagaaatacagataatatttaccccccaagctttcgaaatattgtgaattgtggaagcttgcttcagtctacataggtggacaggtggaggctaaaggtgaaatctttacaattatccaaatataactgaatgtgtaggataatcttcgtttatttgcttttgagatctggcgtggcatttcttctttggctctcaaggcatctattcaaatgatgaggcgtgcgtggaaaaataagtgaattgatgactatttatttctagatgaacttcaaggagaattttatcatgtgattttgcctcaattcttgacaatgcattaaatgatgaatggatggccttcccggatgttggatctattttgtgtttttggaggttcaggcttgaccgttgatcttggctttatacggactgtcttttgtaggtatgaataccttcaaatgccacgttttacaacttttacctaaatttttgaatttttctatctcaaacccataaccttcgagagcacataaccagaattagaatcatgcccaaattgagccactctggagcgtgatattgatttttgcattcaacttcttcttcgaattaaagctcaaaaattcctaggcacaccacccctagtgatcttaactgcatcgctagagaaagttgcaaatttggatattaatactgaaattgactcccttattgaccaagccaatgccattgtatagaggcttgatcgactcaaagatcctctggttaagagagtttccatacaaccatcctttgacgttagccatgtcatatttttactcgagtccagagttatcgctaatttatcatgaagtaaattttctccattttgattttcaaactttgttgcatgtcaacatacaatgattacatttgacttatttgctgtttgagaactaggactttaggcttttggctaggatattgttgctgataagagtaggatgttctgaatagctttaagtattagtaggaagtaaattcctttgttgcactattctgaaaaaatatattttgatgctaaaatgctagcaaaatttttactcccttgtttggaaccctcatggttttggatagtatgtgagcttttcttgtttctcttactctcgtgttcctgtttctattacctggaacaaattccccttgaggattttgtttctagatagcaaatttggtggggacctctccaaacagttatgggagaggattcccctacacccttactatcttagttagtctaagtaactaactgcttggtattttttttttagcttccataatgtctaagagagctcagcgaagagtagtggaagtggatgaagaagatatagtggtggagcaagcccctactccaaatttagtattgaattcatcttcatgggggatggatcagttcaaaaactgagccaatgtacaagacattaagaggacttgaaagtgttccaagactattttggaacaggttgtctgtcatgggcgaaaattcgagccaatatgctgaaggaggtttcggtgtctagagttggggctatgtggaaatgggcatccatattcctttaagatgctactttgtggagttctacgcagtagctggagtggctccttatcaatttattccccaagtgtattgtctatttgtcgggtgatacattttatgcttctagaagaagaaggtggctccaactctagaagagatcttgtatttttataagatcaaggcataaaatatgagaaaacacaaagagaaagttgctttctatatgctggaaaggcattccaaggattcggtgtgccccactagctctgttaagtatgtatacgacatccaggactattccttctacacttttggcttcccaataaaaagagtcttgacacttactctcaactttaatatcgcaagtaagtgtcactagttgtttggtcgttttcttgccttcttgacgtcttcttctcgctttctgaattgatcttattcttctctttcctttctttcagattctatcccttgaccgccttttcactctagagtcagaggaaaatcttttatgaatcattgttagaagaagagtcacaagttggggagcttgtgaccactaaaaatcttcaggaggttggcctattagctcctcactagagcattgataatcttgctgtgaaagatccagttagagttcttttccatggtgaccctgttgatgttaaggaagccattactgttatcaccgtggaagaggccttaaaggccgttaaatttgatgaagaatcattaaaagattggcatcgtcaattcccagagtagttgagagcttgccattcatttcaaagatgttgtccagaacgagagtactccaagagcgagtactgttgggaatattttactaggatttagatttactaacaagt

SEQ ID NO: 110772 - DNA, 3470 bp, Cannabis sativa
  modified_base (34)..(62): a, c, t, g, unknown or other
ttttagaaagtttatatttagggtgttaatcaannnnnnnnnnnnnnnnnnnnnnnnnnnnntaaaataatttccaacaacttattcatctacaagtttccaattcggatggtaagaattttcttatcacatttgtatatacttttaatgatgaaaaaggtaggaaagaactatggcagagtctaagagaaattgttgtacaagatgcttggacagtaatgagagatttaattgatatactagaacaagaagaaagagttggcaatagggttaaagattacaattctcatgaattcaaggattgtgtctcctactgccaactagaagatgtgaagtttagtggtaatttcttcacttggtgcaataaacaacaagatggagatagagtttactaaaaaatagatagagtgcttgcaaattccagatggatagacacctttcctggaactgaagctattttttttaaacgaaggcatttttgaccactccccagcactcctcacctttcataatatctcacagagtggtaaaaagccttttcgttactttcaaatgtggatttcacatccagattatgcagcaaaggtgtagtacacatggaaacaaaacttttctggcaccaagatgtatcaggtgatatccaaactcaaagcatttaagagtgtttttaaggaaatcaacaagaatggattctcagatttacaagcagtagtaatataggcaaaggagaccatggatacctgttaagacaaactgcgtcatgatccactcgattagaacctatagaaagagaaattggaggctagaaaggccttcactcgggcacacaaaacttaccaactattcctacaccaaaaagttaaaattatctggattcatgatggtgatgataatactgcagtgtttcactccagcatcaaagcaagaagaaaccagaacaaaatcctctctattttggattcacaggagaatagagttgataaaccttgcatgatcattgagatatttctcacctactaccaatagctacttggaactaaaataaacaataggaggagggtaataccaagtgtgattaaaaatgggccaactgtcactgatcagcaggctacaatccttttagcacctgttacgaatgatgaaataaaaagagcaatttttgctatactcggctccaaagctccagggcccgaaggctattcaagctatttttatcaagaaaattgggatctaataggagaagatctttgtgatgcaatgagatccttccttcacacaggaaaaattctcaaggaaatcaattctacagctctaactattatccccaaaatcagatgccttaatacaccaggtgattttagaccaatttcctgttgcaatgtggtctacaaggcagctacaaaagttatatgttctagactcaaaggcatacttcctgatctagtggcacaaaaccaaggcagttttattaaaggaagactcattgcccatcacataatgatctgccaagatttggtcagacactatgcgagaaagtaaaaaaaagccaattgcatgatcaagcttgatctgcaaaagtcttatgacacaattgaataggactttatcgaagaggtgcttaggggtttactgttttcaaacaagttcaccaccttggtgatgaattgtgttcgaactccaaaattctatctcttattcaatggtaccttacatggtttttttgaatccaagagaggattacgacaaggtgaccccctctcaccacttctctttgtcattggtattgaatatatgacccgaatcatgaatagagtaggttgcataaaagatttcagatttcatgaaagatgtgaagctatgaagctcaactatttaagctttgcagatgatgtatttctcttttgctaaggagactataaaagtatcattctactgctccaaggccttaaacatttctctaacacaccgggcttgcaacccaacaaggcaaaattagctacatattgcagcaatatggctaatcaagatattagcaaggtcctggatgcatcaggctttactagacaacacacacccttcaaatatttgggtgttcctatatgcaccaagaagatctctagctaggaatgaaacattcttgctgaaaaaatgacagctcgaattcgaacttaatgcactagaaacttatcatttgttggcagggctctgctcattaactctatacttactgcaatacattcctactggtgtcaactcctaaagcttccaaagaaggtgatcaatgtgcttgaagccatatgcagggcattcctatggaaaggtcaatatataatgcaaggtgctggtttaattgcttgggataaagtgtgtcaggaaagagcagttgggggtataggtcttaaaaggactgctgaatggaacactctcaagtatgtttggaccttagaaaataaaaaggataatctttcggtcaaatggatccacaatgtctatctcaaagatgaagagtggtgggactacaaggcacatccatggaagtttgtactggaaacaaattgtggcagctaagaatcaactcaaacttgtaactgatacacaacaatttactcaaaagacgtacacaatttcttctggatataacatgctttgtcctacccacaacaaagtcccatggtgcaatgagttatgggggagattcaatatccctaaacatagcttcatcctctagttatcagtccaaactagacttaaaactagagagagattacaaaagttcaacctaactggtgatggtgtttgaagtctctgttcgcagcaggaagagatagttgaacattttttttttcagatgttctttttcacaacaatatctcttgaagatgaaaggatggctggcttggggtgcacagacgatagagctgtccaagctactcaaatggatacacaaagctcgaatcggcaagtttaaaaaaaagctaatggcagcaatcattgcaaacttagtatactctatttggcatgtgagaaatgacaaaatatggaacaagaatgtagaaaatactgatgtaattgtacaaagaattcaaaacaatatcaaacatagagtaaaattattttggccaaaaaaatgtgcctacatgatagagaatggtaccaaacattataaaaatgaaaaatacttgaggtcttttgataaaagatgcactttcattgtaatagttttggtggagtaataatatcttactgatttataaaaaagaaataacaactaataaaaataaaaatatataggatgctaataaaattacatatcatgtcaataaaagtacaatagaaaatagaactttaatattatgtaaaacgatgatataccgtataacaaaaaacacatatatcattcaccaaaatatatatactaacaataataataataaaaatatatatgtatactatactaatcaaattatata

SEQ ID NO: 110773 - DNA, 8011 bp, Cannabis sativa
atgtggattttgggcaccaatgtggagggtgtggctgtttttccttcgtggtatagtacctcttttggaacggtggttagggaatttacttgcacgacaatttgaagggcgtcactcaaagggggtggctaaaactgtaactaagcagcgtgtcgaaagtcattttgatttggagcttcgagctgctgtcatgcatgatgttcttgatgccatgccaggttagtctctcttaaatttattttgattttgacttgcaacagtgttctatggctgttttgtacattgcttttcttttgagttatgtgtttgtgttataaattttattcaatattgacagagggaataaaacaaaataaagcgagaactatattgcaacatctgagtgaggcttggcgttgttggaaggcaaatattccttggaaggtaataaatttggcttcatttattatatataatgttaatattaataaataagttacatttcttttgtgtgcccttcatatttctaactacaataacttgtaggttcctggtttgccggttccaattgagaatatgattcttcgttatgtgaagtcaaaggcagactggtggacaaacgttgctcattacaatcgtgaacgtataagaagaggtgcaacagttgataagacagtctgcagaaagaatctaggaagattgactcgcctttggctaaaggctgagcaggtatttaattttcaattaatacagagtggcgtttctactagtgtgctgcattatttttgctaattttagcgaagaacaccaatttactttatcttctaacatgctttttttaacttttaacccaccgtaggaacggcaacacaattatttgaaggatggtccttatgtcacacccgaagaagctgttgccatttatactacaactgtgcattggttggaatcaagaaagttcactcccattccattccctccattgtcgtacaagcatgacacaaagctacttattcttgcactggagaggttaaaggaatcgtatagtgtggctgttagattaaaccaacttcaaagagaagaacttggtctcattgaacaagcatatgacaacccacatgaagcattatcacgaattaagcgtcatttgcttactcaacgtgccttcaaagaagtagggtttctttttactttaataatgaacagtttggttttgacctcgagattcctgactgttgtagtatatagatttggactaattggtttaattggcaggttggaattgagttcatggatttatacagttatcttattccagtgtatgagatcgagccacttgaaaagattacagatgcatatcttgaccagtatttatggtatgaaggtgataagcgccacctcttcccgaactggattaagcctgcagattcagagcctcccccgcttctggtttacaaatggtgtcaaggcatcaacaacttgcaagatgtatgggacacaggtgatgggcagtgcgtggtgatgcttcagacaaagtttgagaaattctttgagaagattgacttgactatgttgaataggtaaatgtgcttcgaaatttctctgtatacatttggcggtatcacaaactttgaattgacatgttatgtaacaaactattgcaggcttctacggttggttcttgatcacaatattgctgattatgtcactgctaaaaataatgtggtattgtcttacaaggacatgagtcatacaaattcttatggcctgatacgtggccttcaatttgcatcttttgttgtccaatattatggactcgtgctggatctgttgcttttgggtttgactcgtgccagtgaaattgctggtccaccccagatgcccaatgagttcatcacctactgggacactaaagttgaaacaaggcatcctattcggttatattctcgatacatagacagggtgcatatattgttccgctttactcatgaggaggctcgggaccttattcagagatatcttactgaacatccagatcccaacaatgaaaatatggtaggatataataataagaagtgttggccaagagatgccagaatgaggctaatgaagcatgatggtaagggtttcattttttagttggcttgttaaatcctcctctcgtttgattctgtaactaattttatttatatttgttcagtcaatctggggaggagtgtgttctgggacatgaagaatcgtcttcctcgaagtatcacaactttggaatgggagaacagttttgtttctgtttacagcaaggacaatccaaaccttctcttcagcatgtacaacatctcacttgcttcagctggattttattattttttatctagttgtatatttatttattttttggcatgtgtcatgtctttgttctttcaatactataatatggcctgagaccagtacatctccacctagtttgaattgcattcagtatgctatgaacagaagagttgtatgatttgttttcttgaatctccaggtgtgggtttgaaataaggattcttcctaaaataagaatgactcaggaagcattcagcaatacaagagatggagtttggaatttgcagaatgaacagactaaagaacgaacagcagttgcattcttacgagttgatgatgaacacatgaaggtgtttgagaatcgtgtcagacagattcttatgtcttcagggtcgacaacatttacaaaaattgtcaataaatggaatactgcccttattggtattgttattattataaaatatttcttttatctactttgcttaacctttattttatattatacgactacactctcagtcttactctagcgttttctttgtttattggcttccacttttccattgataggtctgatgacttacttccgtgaagcaactgtgcatacacaagagttgttggatctgcttgtcaaatgtgagaataagattcagacacgtatcaagattgggttgaactcaaaaatgcctagcaggtatgtgctttcctttcgcattactttgtttagtaaatatttaaagtatttatacctaaactgaaatttttttttttcattcagatttccccctgtgatcttctacacaccaaaagaaattggaggacttggtatgttgagtatgggtcacatattgattccacagagtgacctcagatacagccaacagactgatgttggggtgacccattttaggagtggaatgagtcatgaagaggaccagctgattcctaatctctaccgttacattcaagtaagtttgatttcatatgccactatcactatatgccttgctcttattttctgttgtgtcctcaccttacggtttcttgacagccctgggaaagtgagttcatagattcacagcgtgtttgggcagaatatgcattgaagaggcaagaagctcaggcacaaaatagacgtctaacccttgaagatttggaggtgggtgttttgattttgctgttttgtttggaataacataggaaattacctcgtaggttttgagcacatgtataaactgctgactccattgaatttgacaggattcttgggatagaggaattcctcgaataaatacactgtttcagaaggacagacacacactggcatatgataaaggttggagggttcgaacagatttcaagcagtaccaagtactgaagcaaaatcctttctggtggacacatcagaggcacgatggtaaactatggaacttgaacaactacagaacagatgttattcaagctcttggaggtgtggagggaattctggagcatacgttgttcaaaggaacatagtaagtttatcatctctcagttgtctaaatgatttcccgttcttgtgatcactttcttaattcttgttcacataaaaaattgttcacaggatatgctacacttacttaatatcctaaattttgttagttttgagcgtgaaaaaaaatgaataatattttgctgacagtatagctaaaggattataaaaacaaaattgaaaagtactctggatgagtaattattatattcttagcttttttgtaatagatttgttgtaaattctaaaactgataaaagatagattcattccttaaacttgtaattatgcaatcaagttttatatatagaatgtacaactaaattgtgttttgcaaatacagttttccaacatgggaaggtctcttttgggagaaggcttctggttttgaggagtccatgaagtacaaaaagttgactaatgcacagagatctggtctcaaccaaattccaaaccgtagatttactctttggtggtcgcctactataaatcgagccaatgtttacgttggttttcaagtgcagttggatttgactggaattttcatgcatgggaagattcccactttgaagatatcattgattcagatattccgtgctcacttgtggcagaagattcatgagagtgttgtcatggatctttgtcaggttttagatcaggagctggatgccttggaaattgaaactgtgcaaaaggagactattcatcctaggaagagttacaaaatgaacagttcttgtgctgacattcttctctttgcagcccacagatggccaatgtcaaaacctagtcttgttgctgagccaaaagatgtttttgatcagaaggccagcaataaatactggattgatgtacaacttcgctggggagattatgattctcatgatattgagcgttacacaagggccaagttcatggattacacaactgacaacatgtctatttatccttcacctactggtatggctcttcctcttcttgtttttccttcatctttgtctatttgttcagctaatgatcatagttgaatctttcaggtgtgatgattggtcttgacttggcatataatctgcactctgcatttggtaactggttccctggttcgaaaccactcatccagcaagcaatgaacaaaatcatgaaggtaattcagacttataatccttagtacttttgtaagcttgttttggagttcgtgattagaattcacgttgagcttattctgtttcttatgcagtcaaaccctgctttatatgtgttgagggagcgtataaggaaaggattgcaattgtattcttcagagcctacagaaccgtacttgtcctcacaaaactacggtgagatctttagcaatcagatcatatggtttgtggatgatacaaatgtgtaccgtgtcacaattcacaagacatttgaaggaaatctgacaacaaaacccattaatggtgctatttttatatttaatccaaggactgggcagctattcttgaaggtttgtcttttatcttgtggtaatgatattatactcttaataaaggttctgtgtttgatctcatggcattgtttgtttcaggtcatccacactagtgtatgggcgggtcaaaaacgtctaggccagctggccaagtggaaaactgctgaagaagttgctgctcttgtacgttctttgccagttgaggagcagccgaagcaaattattgtgactcgtaaaggaatgcttgatcctttagaggttcatttgcttgattttccaaacattgttataaaaggaagtgaactgcagcttccattccaagcttgcttgaagattgagaaatttggggatcttatcttgaaggcaactgaaccacagatggttctttttaacatctatgatgattggttgaagagtatttcatcttacactgcattctccagactcattttgattttaagagcacttcacgtgaacaatgagaaggcaaagatgttgctgaagcctgacaaaacaattgttacagaggcacaccacatatggccttctctcactgatgatcaatggatgaaggtatttttagaacatttttcttttcctttttcggggttattatttttaagtcgatcaattatcttaatactctcagagcagacgctttgctagaattgtctttttgagaatgtagattgtcggtgtttaacatctgtagtaatgtaatttgtgctcacttatagattttagttgcaattttaaagctgtactgatttattgtgtggcacaggttgaggttgctttaagggatctcatactatcagactacgccaagaagaacaatgtgaatacttcagcccttacacagtctgagattcgtgatatcatacttggtgctgaaattactccaccttctcaacaaagacaacagatagcagagattgaaaaacaagtaagcggtcctttttcttttccttttgtttttttttttggaactttctcgaagtagctgtagactagattcgttttaatttacattactgattctttttggttgctaatttggtttaacaggcaaaagaagcaagtcaactgaccgcagtgacaacaaggacaacaaatgttcatggtgatgagctcatagtaactactacaagtccctacgaacaatctgcttttggctctaaaactgactggcgtgtgagggcaatatcagctacaaatctttatctccgtgtcaatcacatttatgtgaattcagaggatataaaggtagagaggtcttctctaagcgttacaaactaatcatctgcaaattcttttttcgtctatttgctaacatttggagctgtgatgatgttttcaggaaacggggtatacttacattatgccaaagaacatcttgaagaaatttatttgcatagcagatttgcgtactcaaattgctggatacttgtatggtgtaagcccacctgacaacccccaggtcaaggaaattcgttgcattgccatgcctccacagtggggtactcaccagcaagttcaccttccctctatgctcccagagcatgatttcctaactgatttggaacctttgggatggatgcacacgcagccaaacgagcttcctcagctatccccacaggttcttaacttcttcagtcttttaagttccttcttcttgtagcatgtggtttagaattataggaagttaacattcacttgtttttattgtgtaggatcttacctcccatgctaaggtccttgagaacaacaagcagtgggacggggagaagtgcatcattttaacatgcagtttcacgcctggttcctgttccttgactgcctacaagcttactccatctggatacgagtggggacggatcaacaaggacaccggaagcaatcctcacgggtacctcccaactcactacgagaaagtccagatgcttctcagtgaccgcttcctcggtttctatatggtaaagcttctccactctgtctctttctaacacttagtttactattgtatttgtggtttttacttaaagttgaagaaaataaatgcttatatctttattattgtggccttttgctttcaggtgccagatactggtccatggaattacaactttatgggtgttaagcatacccccagcatgaagtttggcgtcaagcttggtacgccgagggagtactatcacgaggaccacagaccaactcatttcttggaattcagcaacttagaggagggtgatatagctgagggagatcgtgaggatacattctcatgatttttttacaagattaagctttatgctgaatctaatttcgtttcgggatagactcgtaaccgtttctgtaacatcagatttgaaaagctcatttcacaagtgttggtacatttttgttgtagctattatgacgtttttggcctatttgtaaagtttgtacaatacttacgaaagccttcaaattttgtaaatatacaatgctctagaagccaattttacgccttgcagtatggtacatcgtcttgcacaataaaattaatggcatcatcaaaacttaacatgaaattgaaaatttgcttagtaaagtggatcataagttttagctaattagtaattttttcccctgaattttgacatgtactaaattgtgcccctaaacttttttagtcgttaaaaatttcctttgaacta

SEQ ID NO: 110774 - DNA, 801 bp, Cannabis sativa
ggctagggttaatctaagagtaattagggttaaaaaatggtaacgtatcctgagacccatctaatgtaccctaacacctatctaatataccacaaaatacattccgtgaaagtacatcacgggacaaaatcgtatctgtatatttgtaatactgtaatattcttttaattttgtcatttttagtataagactctattttaaatttattaaaataagatttaaaagtaattgatactacatccaaattcaatgatctacaatttaagtcttatataggtattctatttaaggcaataatagagtgtactgataaaactacaagaaaattactgttttacaatatttatgtcgttaatttttttaaaaaaattataccacttacaaattcaaaattttcattattatttatatcgatatttattcttttataaaataaaacattatttaatcatttatttttgtggtgcatgtatgctactacacccaataactatatatgaaacgagtcagccatgactaacaagatatgatcattaatataataatgcatggctataatataatctattaaaataaaaattttaagggctaaaccctttcaattatcgttttacttatatttaatttttataaagtttaaattttggtggtaaaatattctaaattactgaatcattagcaaatttaaggtgtcattcggctaactaccatcatgaattacttatgtgtatacgtgatacttttatattaatacacctaatattattattttaaaattatataaaattataaaaataaaaa

SEQ ID NO: 110775 - DNA, 3163 bp, Cannabis sativa
ccatcttgtgatgattgtaaggccttaaatgagggtaacaagcacaattaaaagatatcatcacagtgtaatcaggaacttgttgaaatgaacactcatatggattgatatggtaaagcatgacattcgattgataatataggtagcactttaaaaatcataccacgtgtatgtcagatccaaaccagaatgagccaagagagttaatcttgttttaatgatttacctatagatccttcaactcgtctattttaaggatgagtgtgggacaaggatactaaaataagagttcttgatatcacctaaaaatttctcaaaagacctgtaatcttctccaccatctgcttgaaaaaaaattatcggcatattaaattattttcaactaaacgcttgaatctgataaagtttaaaatgcgtgagacttgagagttaattgaaaatccaagagaacctgttgtaatcatcaacaaagaccatataatatttaaaattatccttcgatgtaacatgagaacgatttcataaatcagtatgcacaagttcaagaggttgttaccaggatattaacacaaagaaaaggaaagtctacgacttctacccccgtgacaagccttacaaaattgtaaatttttgagcgaatgaggtatattgaatgtacttaagattttgtttaatgttacaggtatgatcaagttgacatcaaatgataaattggtaaatgcagtaggagataacatgaaaaaataaagagaacttgaatttttattaatagaattgtcaatacatggggaaacaaattaaatctaattttcataacaagatataaaacaatgagtacaattcttgtgacaagaattagaattacattcagaaacttgaaagatgaatagtagtcaaatgacactcagaaagtgttgaaaatactagaatgttcatctcctagaaggtagagaccacatttaagcttccctttgagtagaactacacccaatttttttccttaacaaaataacaatatttgtgaaattctaaggaaacatcattttctagcagtaagtttagatacactaactagatttttagttatagaagaaaattgtaaaaaaaaatttaagtgcaaggggtgagaagaaggggaagaaatggtagctttaccaatgtgagacatcacaagtttcttactattttcaactacaatttttttttacgagaataaggaatagaattctcaagattatccatggtaaaagcagctccagtgtcaagattaccagaataccattgaaagatgttataagattcatggttatcctcacagcaaaacaaacctaaggattccaacacaaaccaggttcagaccaataaggacatcacttccaaccctatagaaagtcacacatatatgttgccccaattggctgcaactcagtactagcagttgctcaacttgcttgcctctcaacaacctggtatgaacacttcagaaccagcacttcgacaggtaatttaggtattgttctatcacacaattttaaccttcttttaaatgattattggatcattgactcagaaactacataacatatttgttctaatattagactctttcaatgtataagcaagataccaaccactaagcttatcttacccaataataacttcttatttgtccatgaaagtggcacaattgccataattgaaaatcttatcttaactgatgaactttatgctctaaattttaagtacaatataatctcaataagttacttgaccaacaatgtccctatcaccataaagttcaattctaacaatttttatatgtgggacaatgtcagcaagaagatgattgaaaaggataaaattgtagatgatctctaaatccttgtgtcacaccaacatcatctcatgttatgctgaaacttggcactcccaactaggccacacttgtcataaacatttagatttgcttaaggatactctgcattgtaacatatctactttacatagaactaatcctttttacatttctcccatgaaaaaaaagaaactacctttgccaaataatatcaagtttgttgaacaaatttttaatttaatttattgtgatattcggggtccctaacacattatttcatacattaatcacaaatactttcttacactagcttgttgacgatcactcgatgtttactaggatttatttatcacaacaaaaatctaatgcacttactattatccctcaatttctctcttatgttcaaactcattttggacgaatttttaaaacctttagattagataatgcgcctggtattcatttttaaaaatctatttgcacaacatggtataatgcatggatgacttcacttgcattgagacacctgaacaaaatacaattgttaaaagaaaacatcaacacttgcttaatgttgcacatgcactatattttcaagctaaaataccaattcaatgttggtcttaatgtatccttgttacaacatacttgattaataaggttcccacaccactcttatacaataaaatactatatgaattaattttcaataaagcgctgaaatatgttcaactaaggtcatttggctatcttgtgtttgcttttactttgtctgctcagaggacaaaattttccccaagagcacgaacatttgtattcacgggatacccttaaggagtcaaaggttgcaaattctatgacattaacaatcatcaattctttgtttcgagaaatgtggtatttcatgaaaatatatttcattttcacacttaaacactgataattctagtaccaatctattttctcagttggttctccctaatcacattgtttctaacacactagtttctgattttcttatagaaaatgctgcatctactcactcccccattgtctaagaaggtcaagttgagtctctcaactacaaagagctatttgtgcaactttatgtgttactctactatccaggatcactctttcacaccacactatctaaaaaaattcctttcctattatcaattatctaatactcacaaagccttcatctttgcagttagttctcaaaaagaaccacaaacatatgttgaatgtaaaactatatgtggtattaattttatagacacctaaatatataatattttagtataa

SEQ ID NO: 110776 - DNA, 14481 bp, Cannabis sativa
aacaaacaattagatatcaagaatccttagggcacaccaatagggaaaaaaaatcaatgtgggtttgtcatatttcaagttgcctacaatgaaaattgttttatttaagtagatgaaatcgtagaaaattatatttgtattataaggaaagttccatttttttccctaaagagaataatatgacaagcatgatgcatttgctgcagatgaaagaaataagtaacaaacacaatacaaacaatataaaactggtaaaattaaaatatgaagggcataacttgcatttgcaagatgaccagaatccagtttaactctagtcactggacgaagaagaattatacaataaacaatgtttatacagagcataaaacgtacaaaatttctcaagaacaaaactcaattggatgaaagataagcctactactgaaaatataattttaatttatacaggatgagctattattgatctccaagtatacacgaatgggaacacgccaggagcattctttagtctttacttctacatcatctccctatagttgccccaatttctcctgtcaaaccataattatatatcagagaagcataaaatgtaaagtacaacacattatgaagagtcctcaaaagatgaccatctaagattttgattatgagaagcaaaaaaatgaaatggggaagactaaagagggagaacaaggggaaagtgatacagaaagttgtacaactaagataacatgatcaagaaattaaatgaaagaaagttgtacagttaattacttatcattcatcaaaatcactagcaatcctgagaaaagggaaaatatacaagggaaatacctgaagcatctgcattaacttggggtgctgctccaaaagctggcagagtttgtctctgtcactcaataaagactgccaacaaaatgtgtaagtaatggggaaattataacaggggattctgatcaaacagaattgaagattttttagcatataaacaaattcaaaatacctgaatagcttcgggtgatttgaaaaactcctgtaatgacattgctggatcttgttgctgctgtgaagcagtatccataagtgggtttatcatttgtggatgagcatgttcaacttgatgctgcagctgcacatgagaaaagtcttgttgctgctgctgctgataaaatgtattcatatgagaagcctgttgtggttgctgtagcatctgtaaggaatgcatttgcatgtgaccaggactttgcaaagacacgccttggtccaactgctgtgaagcttgcataggtggcctaaggtggtggggaggctgcggaggacgttggagctgaggtggctgaagtggctgcaactgagaaagggaatgaattgactgaatggaagactgagtaatggagagattctgcaagacatttggtggattatcaacctgctgagttgggaagtttccatagagatttgcaggcattgaccctggcctactgaaacccaagtgtgacaaatggggagcaggtgcataggcatttgctctcgtccctgaagcagttgaagatgtcatctccatctggttgtgtgctaaaggttgggaggaagaatttttattagaagttatattatatggaccagatgagaaaggaggtggagtaggaggaagtggtggtggtggcctaacagatccaccgggagaagagatggaattcctcgagaacttggcatctatccctaatgatgcagaactgttgttaaacatgtactctgaatgaacctgcaaaataaagggatcaccaagttattacatagatgcgcataaactagctaaaggtagcaaatacagggaaacttattgaaaaataaaatcatgaaaagccctattttctcatacttggaaagatgatagagatggattctggacatcagtcaaagaattcataaatgaggatggttggcttgaaactagatcagaactctgagatatcacaggtgcaactgttggaggcggtggcattggaggcaagggaggttgacttagcagatacctctggtcataatgcccttgagaccctgtaggtacaggtacattcatagagggaaattgaatgttcttttgatgtaaattttgtggagtcaacctagtatccactggtaatggtgccaatgatggtgatgcatgactataaatagaaccaggaaacccaggattgtttgatgctaccacagaatcaaacccaccagaattcttgactgtaattgcatttttcatgtcatcagactgctccatatacttcttatccgaagtaacactctgttctctagttaatgacttttcaggacgcgaaatcgacatccttgaagaaaattcactctgtgtattttcatcaatgttagctgctaaaggtgtgcccaaacgagaaaattggctactctcatgaacatcactgtctgtctcttcaacaatagagtggggagaattttgctcgacaataagaggggagggctgctgcagattatcatctggctgaggaaagggtaatttgtcatcagtttcggactcctcgccatcaaaaactatatcaatcccatgaagatcatcatccagatctgtcttcaattgcttaggtttgctggacttctctgaagctatttcacccatggaagttgcattcttgacctgtgttgtatccactccgactactgcagacatgggattctggcgctccctctgtctagccataaattcatccacatgaattgaaggaggccttccaccagttgctcctactcgctgaacagcaatcacgttagaatttgtaaccccatcaacatttctttcccttgcaacatagtcatccacgtgcatggacggaggcctgctagtattcggtttgcgctgcctaaaagtatccctccgagtaggagctgaagaggtagtagatggcccaagtcctcgtgcaaatgcattttgagctgcattctcagctggagaattttctcctctagcacgcctatttgatccttctacagaaggcatttttcgtttggcagaaagtgttgtctgaggaaatctatcaggtaatgtttctggacattcccacagaaacttgtctccgagtccttggaaaagataatcttcagacctttcagcttcaccatctgacatcagatgggcttttgaagaaaacagatctgatgaaacccgaccactggaaattatgtcatttgctgttactgaaccagcagggttttgcagtattgacagcaacaattttgcagaatctaaaacctgtaaatagtcaataacatcatgaattaacagaaattataacaaaagaaataaacttataaacacaatttcaaataagtatgcctgataaaaagcagtttgaatatcgtagttggtcaaatattcatcatcttcaatctttgaactcaacagagatactaatttgtgtatgtaatttatctgttcttcaggagcaccatctgctccttcttttgtatcctgaatgccaaaaagaaacttcacagcaaccacctggtccttcaaactaagcaacgaaacaacatttagtttccaaatcaaacattgtaaacaactaaagaaaaattgaacaatctaaagtcccacatgagtcaacttcactccaagtcgacaaaaacaacctctagcaacagacgtatagcctttcagtaaagaattgtgatatgtgtacccaaatattacattagtgtcagctttatcaatcaatcacattcatctaaacaagggcccaatgtttaaaaaagagtagtttcatatcactgtgtaatgtttgagtgcatatttagggtgcacatatcattactctaaagcaattggaaaaaaaggaagcagaaagcaaagagcaaatacttgaaatagcattacagctaaatcaatgacatgctgaaaattatatggtgaataacatacacaatgaaaaataaaggggcagtaaagatgatgttcctgcagagaaacaactaaataaaggcatgaaaactaacctctccccatccatacaaaaggatgaagaacccaaacacaacgcattaatagactcaatggcataatctgaaaacccgtctttactatctatagattgtaacaacttcttccagcagcatagcaaagggggctgttttctccattcaaattcatcaacattgccataatctccattgtcatccctttcctgtgctctatgtgatccaatttcctcagttcgggatagaacacggttgaaaataacaactaaagtattttggcctacattgtcagaacccagttctttaaaaacagtaagacacgccaacaactcttttccaactggtagaacctgaaaaattaaaaataaaataatcacacgattttgacactgataacttttttccttttgatatgatgaaataaatagaattttttatccttacattcagtcaaagcaccaaaaaatagttattatcttacttgaatcccagaattttagtgttattattttatttttcgactactttttcttctttgattataaattataattgtcacaaacaaagggtcggtttggtagcattatcgcttagacaaacatttaatatgttggaataacatgaaattgttgtgtatttggtaatttataatttataatttaaaaagttgtgaattggaaaaacaaaagcatggcaattgataatctataatcaaagtatgaattaaatacaaaattattaaaataaatatcattttaatatatatctaataaaatataagcagcaaaaatacttttttaaacaaaataaaaaatatataatttttattattattaattttatatatatttatattggtttattcagatatttttatcatatatgataattttttttcaggcaataaataaataaatatatatattagcaatgaataatacatgttttttttcctagcatgaatgatgcatgttacagcaagtaaatatataaaatgattacagattctcttataagccataatttgaagttcggttgtgtagcttcaaattttagctttagctattatacttcttaaataagttgttacttaaataagtactgaacaatttatttgataattatattattaaaagaaaaagagagatttttctttttgataaattcaatcacaccaaacacgcaattagccaattaccaaaaccctatcatggaagagaaaattttcaataagcaacatttaacttttataaaagcttcatcaaattgggcccaaggatagttataaaagaaaatttagtaaatatagctaaaaaaatccttttggtatttttcctaaaaacttctcccaacagaacctaccatcccaaaacaaggtccaaaacaagttcaaacatagagaacgaaacattcttaagtacgcttcatagttcatatacagagataagcttgagtatatttcataaataaaaaacatgatgctgcagtattaaaagagaaacacatacacacaatctacttaaaaagaatatatattttaattttctcacaagttacaaacataaagttatagcatggaaaagaaaaacacagaactaaatgctacctgacagaatttgaggagatacgataagatcacagcacagtcctcagcactgatttcaaagccgtgcctaatgaaccaccaaagtattttaggaaatgcagagagagactaagaaagagaaagaaaagagagaaacagggatacttacaaatcatgttttccagcacggtgaacagatgttcgagaactacataataatgagaaggacttgaatacaggaacacaccagctaagaatagcaaccccacatttagttgaactcgtagtgtctaaaacttgttttccatctgaatcaataacagttaaacaccttcccagcactctagtaagcatctgaatgaaaccctcctttaacaaaaatgcctgaaagaagaaagcccatacttgaatctgtttctgatatagaagaaatgaaaaagaggtccaaacataaaaacaaaaaaacatttaatcgacaagcctgcaatagataagaacctgggcatgtggatgttccaataggctggcaagaaaatcaagatatctgtaaacctgaaaagtgcatgaataaaacgtttaattctggaaaattagatatcaatatcaagattttagagttagaaagggaaaaaaaaaagttaccttgaaactgtccatttcagatagagatgacacatcagagacatgctcgcttatccaggagaggataggttgaagaaggacagagcaagtttcaacctttaggcatccaatgcgtactataaaaacgcgtagcatgtcctgaatcactaccaattcctgtaagagaaacatcattcagtcatacagaacaatacaagcagataaattttcagaaacacctccccctagttgaataaaaggcaataatggtataatgtaaataaacaaataaaggaaataactcctaaggccaaagggtaagtcacatacagaaatagcataatgctggataatatgggcaattttgtcaagctgtggcatcaattgagcaagcaacttctccagatgcacaggctgaagataccaattgacctgcttttccttcctgggccccaataatgtaccaacagacaactttctaagggcactcaacaagggcaatccatttctccaaagccagaaacctccttcgggaaataaatcattctagcattgcaagagtgataaagaaagacattaaactaaactcaatgtttaagtgtgaagcttatagcagcttcagcatgcaaaatgcatagtttccacagcaataatcattagctgcagaaaatacaataatataacacatattcaaatggaccgatatagcagctaaacagacaaatatatgagtgcacaagcattactgctttttataattataaacagattattatctaaactctggtgctttcaaaaattgtttaaaataaaaaggatgctaactactgttttgtaaaaacaacttgcattacaatagactcactagttgctgctagttaagcttagcaagctgaacatttaacgtaatacaatttaaattttagctaaagcagtatctaaaccaaataaaagaaatagcataccaaaagaaagagcaaactgcaggtttccttaggacccaaagccagcactgaagtagattgaacactagcaaggagggaatggaagagaccaggagtccaaccatatactggccaacaagcaagtgcagatgcaacaagatgacaaatagctccaaaaccaagcgcagaatcaggataagatgaggataagtccgctgcacatgctgctaattttggactgattacagaatccgatcagataagtataaaaaggaacattaaataatgtaggctgcaataaaataaaaaaggaagtattgccaacctaacttctcgatgcagtcgaagaagcgcattcattaatttggtatttctatgctgctcctcagcttcctataataaataatgaaacaactcaagattgagtgtaacggaagtgctcaacatgatataacaatacaatacaaatacacataaatgcactaaaagttttttccacaacatccaaaccagcggagtcagtgcttcaaaaatgaacaaagtgatcatttcactgtagatttaggttttaacttcaagaaccaaaatatgaaggaatagaaaatcaattatagactccggtccctactaacacccctagcccttccatgtaacttccctttcttaataaattcattcttctataattcataaggaaaaatacatacatttatgtatggcatgtacacacgccaacacaatttctcatcgctgttttacatttaacataatagaatgtttattcaaaaaaaaacataatagaatgtaaaattgctccactccaataagaaacaaattttctgaatacacaagtaacaattatattgacaattaacactaacacaataacaaaattcttaataccactcttctcatccaaacaaatcatatgaataacatgaaatcaattcaataaatatatatatgcataaaaaactaataattaaaaaaaaaaacctgtagtttctgcaagaggttgatcaacaacacaagggaaggaaccaaaagatcaattaaactctgttcacgataacgttctagtagtaaatctgacgtagaattgcattctgtgccatcatcaacaaggtaatctgtccaaggccaaaatatctcatttccataaatatattagatgacagccaaaaggacaatagtatctttagtaaacaactaaaaattgcacaaactagtaacataagacaaacataatatccagcaacaaaagatgtaaaacaattatacaagcaacggactacaaaatccatgtcccatgattaaaaataataataataattaaataggcaaaaacatttctcttctgattgttcttgtgagaagtgcttaactgtcatattcctgccgatacatgataataattatattttaaagaagaagaagaaaaacatgataagaagaagaactgtacaacataccataactgtttgatgacctttcaagcatgaacctacagttcaccagaagtgtgaatatgactgttatggcaccttcatcatacagagcagcagcaacagactatattcaaacaaaacattgtaagcagcatacaaaatcacaatcgtaaactagctgatagatacagttacatactgagttctctgaaatgaaagctaaaattcttatagctgttgttaactgtgctatagatgagtcacgaaggatcactccatcaaaagtcttctcagagacaatttttccaagattctccataacattaacatcagaaccactagaggaatctccaataatgttttctacatctgttagatctgacactactgtggttgttgaacttaagttggcatctcctccagaagctaagacagcagcataccgcaaaatcccaatacccccatttttatgatagattacaccagcatctatccattccaacagcctcgtaggagcatcttttcgattggatcctggagacgaggaatgcaatgctctatggagttctacagcaagtccaatccaagaaccaagagaagatgcagttgaatcagtaacaattacttcaaaaatctcagccgccgagtgaaatatggcaagatttagaggcaaagctcctgaatatccagaataacaagtaagtaaatgcataactaaaacggtgtgaacaagatatttcatcgaattccagactcaattagaggagttcattaccactaattttggcaactggatctggttcctttgcagaatgcagcgcttcaatcaaaattttcatagcctataaatgataaaaaataattgagattcaaaagtaaagaatgtaaccaaacatgactaaataaaaatgacaacacgatcatgaagactaatactgaagaaataccatattgctatcaaccatctaggccataaaaacatctattaaagtagattctacatcatgattactcgtgataaattgtaaccatgttaagaatagcaaaaactcttcaaagcataatacatatttgacaacatttcactaaaaaaaatacaaataagagttacttaatttacaggtaatcattaaattagtttacacagtgacataaaagaaaaaataaagaaacaaaaaaatatcataataatttgttcccctaatacaaaagaaccatttaaaataaacttcaagatggcatatacctctggaaagtatcccaaagccaacaaagcatgtcgtccacaatcagacctgtagacaataagaaatcacaatcatgaacattgtatagcattccaaaatcacattttaactaaatagtaccaccttgcaaaaccacatagctcccacaggacccataaaaactcttccgagtttggggatgatttcagcaaacgatctattgcattaacctgcataacaacacaataatctgatctctcagcaaccagttattagcaaaaaaaattttgaaaaagaaaaagaaatagcaggcataagcttggatgaagcaaagcactaaccaccctcaagtgcatcccaataatcatcccaacttcttgagaatcacacaagaatccatttgctattaaaacagatgcataacgcagaggaagacagacatccttattcacacccctagctccctttagagcatctattagtgtcacacaatgatcaggttgttgtagcaagaaaatgagacctggatataataacgtatgttgagaatcacgagatcttagaaaaatcattaagtaaagagaaatgatgacagtgaagacctgaacgactaaagagaagcgaaataattatggcttcaatagaggatgcaatatccacgtatacatccatagcatgtcccacttctgaaggtaaagtagatgatgataacaatgcaattgatagaggtagaaagcccatgtcctgcttcaagaaaacatatatgtataaatatattaatatatatttgacggcataaagcatggtacaatttatttttaagaaaccacagaaaagaagaatataatgtccattaccataaatctgtgtgtgtgtgtgtgtgtgcattcaaaaatagcctcccaggctaaccttatgatatatggagactagaaaattatagcaattgctatgtaggtagacacctagaaaggggctaaaacctctaatcatataagagcaaaccacaagcctgacaattttagctaagcatctcacatagaaatgggtattatatgagtaaacaaatcaatcctaatcaaatcagcgttcatataaaagaaaatttaagaataaatgttggcataattttctgggaacagtattaataaagcataattagtgttaaccttacaatcgtacatcgacaaaagaatcataattatcacacaagaaaaataagatatagttaacaaactaaacagagtacggtccatgatacacgtaaatatgtatatccatcttttacacacatattacaagctaaaagaaaaatgtaccttaagaagtgccaaaagatgcaaattgacatcccaatttgagaaataatccgatgatccaatcaagctactggatgccttatatgacagcaaaccttctgtttgcccaatattcagtgatctggttgcacaggctaccggagaagggtcttcgattgagctacatgaagtaatcaatttctgcagaataattgtcagcaaagagaacctaagaattagaaattcaaatctctcacatcgagatcacaaatttaaaataagaccagaaaagaaagttaaactgaccaagagttttttaagttgcaattttgcagtgataagcatgtccacattagcacttgtaatcctctctatagtggaaacttcttccagaacagatagaactgcaaactacaaaatccaaactactataggataccgattccaataatttagagaaattcagaaagaaaaaaaaaagaaattcatcttgaaaggcattacctcatatctagaaacaacttcatagaatcttaagcgatggagaacatgagttgcaagagaagcgacagcatgtcgtggtttttgcaataaaagattcaacaatttactataaccttcactgataccatttggaatgtttccttcttcacgaggccaccagcctaaaaatccttcacaaccaaaagagaatcgagtagcctgctcaacaactttaagtaacagtaatgttgtcgcagtagatttctgtctgtcatagcagaaaacatgagcaagctcatccattcccccaccactaacaaagttaaagcagctatctctaccagagcacaatagaagagccacactcaatcccataatgacatatgtactctgaaaagaaagataagtattagaaatataacttgagcaacctatatgcactgtcttagaatgagcagcctttctgcaactgcctaggctgtaatacagacgataccctatcatcttatacaatgcactcttcttttatatcatataaatatatatacatataatttgagcaagcaaaggaagaagaaagtgagaaagacataatctattctgattgttacaagagtatcagtaatttaacaaaaatgtgattgcatgaataatagcacaagcagtacttaacttacatgtgtgatctggtgttgcccaacatgcaaggactccctcttaaaagagaagtaatgtttcaacatatccaccaactgcttaccagttaagtcagcctcagatccaaagaaggagccatcttctaacaatttggctgatgcattctctgtttcacattgatagagatcaaaaagaccctttaaggcttcactagtaacattctgcagctcttcatagctgttgggtttatccaaaacatcagcataggacgatgctactgagactaaaatgctaacaactttacttacgccattccctaaattcggcaactcccaaatcttaaccaacatctgtagaagttgcttagcttcaatggacatatctgatgcaggaagaggtagtgataaagccttcaaagctgaaataggttcttcaattgttatattagttgaacgcaatgccaacggaaggtcttcaagtgttccatcagcagacctaacaagattagttatcgagctatcaccaaattcaatgttaaactgccccaaatcctctgctgtgtttccatatatgaccaaactcaaactacgataactgcccctgacaacaagatgattggtgacgacagcctgcaagtcatgtgatatgactcctataagcaataggcccaacaaaaacttaaaaattaactacaaacaagcctaggctgaatttttttttattacaaaaaaaagtgagcactttaaataaggcaagcctgcatgaatagtctttccccaaaaacatattgatcactctgtatataaagaatgacaccaattcattgatgagtgctggcagttcacatttaaaaaatacagtaagaccgcacttgacattgaacaggaatgtaatgaaaaatagcacaattaattacctctacttcaagcacatttgacgatgaatgagaatacaggaaaggctgacaaagacgcctgaaccttgtctctccctcacactgaacaaatacctctaaagcaaaagaaggaggcaatgtagccctataacagaaaacataccaacaataacgttaaatgttactcgggcatcatgaattaaacacttgaactttttctttccacaaatcttgatagaaccacatcaaccaggcaatataacactgctctataaattctctaagattttgcataaacaaaagctcttctattccaagaatgaggatgatgaataaaagagtgtgcaaaccctaacacgagaaaatcagcataaatgacataatcgccaaaccattctcatcatctaagacaaaatagcactttgaagtattataagtataaaacaatatcagaagaagcgtttaactgatataatttccagaattcagtgcaagaaacattaaactagtgattttaattatcaatgccacttacccaacaagtgctactgattgagatgttgaagaagcgttctgttctagaaactcacaagcagtaatgacaactggttcagcaaataacacctgaagaagacaattgcaaaattatgatcactaatacttctcaaataaataacagtaacaaatgtaagttttaaattaacaagaataccccaaaaaattaaagaaagcaattcctctaagtgaaacttcgaaacaaagagaaaatcaacacaacagtaatcgaacaaggagaatcgagacttgagattaagaaaatgaatctatataaatatatgtgtacgaatcattaaactggaaaagaaattaagcaaaaacgaagtaagacaggaaattgcctcgtcgacatattcatcgagatggggatggacgaatgtctgagcgaacaaaacgcaaggctccggccgacccatggggcaatttcggtgaccctcgactgaaatttagatttgtaaagaagacatgtagtggagtgtctccaagttgaggttctagggtttgagcagcactgaactgtatggaggctaaatggcaggcagtattggggattctttttctggtttatcgtcggccaaagcgaacgacggagagggaagggatggatggagggaagacattttgaggtatttatatttatgtgatttttttcttttcttttcttcaatgtcatttttaaaaaattagtaaaattaagactactttttttttttttttttttgaaataaagtaattcattagatagcaatatccgctat

SEQ ID NO: 110777 - DNA, 5248 bp, Cannabis sativa
  modified_base (5222)..(5222): a, c, t, g, unknown or other
tttttttttttttttgaatgaaggagaggctacttttattatttatttatttaaaataaaaaaaagggaaaaaacacaaatatttaaaaatatttggcagaaaagaataatacacaaatatatggaactaatactctctcaagggtccattcaaaaaaaaaaaaaaaaaaaaactctctcaagggttaataatagaaaaaaaattaggatttctcgttcttaaatctttagctatcggaggctgtcttttttctctggccatgcttgttggccttccttgtgttttgctattgcaattcgattttttttattgcaattaatcttatcgtgacatgattttaagtattttagccttgtctctacgacatgattttaagtattttagtcttgtatgtgtgaaatggttttgttttattttgtttccttgttggttcttctttgttcttcgatggctcgacatcaaatcattgttagtggttggtaataacaagttctctgcgactaaaggagttgttattagtgcagttacgtaccttacacaatagttgagtactcaagcaacaaggttgaatgaaccagctgcaacagtctttactgatatatctcctgagcgatggatgaaacggagtagagtaaggttaattgtgatgctgcaatcctcatctgattttattttagttttttttgtcaaacgagctaagaattaggtggctgattatttgactcgtttttctaattctaattctggtcgtgtctctaatggagaagatgtcccgatcgaattgcaagctattattgtagttgattgtcattaataaaattcaatgatttattcaaaaaataataaatagataaacaaatttaccaaaaatatagtctgtataaatagaattagcataaaaacttagtaaaatcacaaaaatttctctaccattttctcacgcaactctccttctcaccttcgactaaattttaagattcttcttcctaaacttattctttattaatcacacattgttgattgttcttctacaactcggttgtcgatgatcttttccaactacggtgacctgaaactctggttctctaatcacgatctacaactctagtcatgcaagaccttctctgattataaccatcatctaacactaagaaaaagtgtcgcaataataatcattaacaaaatagcatctacctcacaaccacaaccaagaattcttgatcaaaacctctaacacaacagaaaatattttaaaataaaaaaattaaaaaaccaagaacatttatatatatatatatattattttagagtcaatccaaaaactaaataaattttaatgatatctgtatgtatatatatactttatttaattctcaatatatataatcgagtttgatactattatctttaattgtcttaatgttagttcttgaatcaatgttattagttttaactattatttggtaaaaatattttgattataagtataagtataataatttgatatatatttgaatgttaaattattaatattttatgtttagtaatttatatatagatatcaaaaaattccttattcatatatgaggttatgacttgtattacatagagaactaagattgtcattcatgtttctgaacaggtgacacgaggcataaaaagaaagggataatctcactaattaaaatcccccaatataacccagtcgctgagaagcttcactaatccaataataggtcaagaccaagacatatgcggatgtctaccttacctgacctcggcttcgtgaacacgaaagacatattaccactccggaacccagagtggcccaaactggaagtctgtccaactaatacccagatggatacttgaaaggcttatcacagacattgattgcccaaaagtatcacagacgtgtaccttggatactacaaccgaaatcgcccagcgacagttatgttttttctaatatagaattagatcttgtcccctgtgttagaacatggtagtgcacacacctcatacacctttttgccaaaaggttattctaggcatctacttttaaaggttgaaccttttggcgacacatgtccactacgtacagttgtcctctattgtctagctgctgcaacacacgagcacaattccttccaaggcacccaacaatcatttcttttttgcatgtatgccaccccattagtgggctttttgtaggaaccctaggcagaccacgagcatgtccatacccgccctacaccctataagtacccttctattcccatatgaggacaggatgataacctagatagttgaagctctactcatattattctaagcattcctcttcttcaagagaaacaattatacagagttagagtttcttacaaaatattataaacacatcaaatgtgcccttagaggccaatatattgactcatggactaaggttaatcaacacctaaaccatgtaaaattctctattttatttatttttgcatttcattacttaagctcttaaaaattttgataaatattttggtgcttttgctgaaagttgaagaaagacctaaacccatagtgttgctaaaaccattgtgtttacccaaaagacaattcctaaaaagactcctccaagtgaccttgacactatcatggagtaagtaaaccctctcttgccagagcatgcccagctgggtgatgcgagaggtggagatatgtccaacattgacaatcgagaggataacttgaacaaccagcacgaaaaatttgacgatgagagagttattgaaaatgaggaggaagactatgatggataatatgttaaagattgatattacaaagatggctaccattacgagcatgaccctgaagtagtttgagtgtccaaagagttgctcaagaccaaacaaaagttggcccatcaagagaaattttatcaaagaatggagagaatgatggctcgcttctgagctaagtttggagatctggacgagggagattcagacgatgacccctcggtggaatgtgttagaggaaataacaaggaaaaccctactaacactggaatctttgctcttgtacaagacaagggaaaagctaaagtaggtgacccacaaaaccctacagctctcgtacaagaaaaatagctaagtttacaagctctaatttctagagaaagaaattagaaagagatgctctaaccttgtagatacttttctgaatgtgaaaaataagttagaggagctctcttttcatagggaaagatgttatattaaaataataataaaatattccaaaaatatggaaaaacatatttaggatatttttgacagatgatgatgatctaatagtgaaattaacctcgaaggtctatcgtcaattttttaaaaattaagtagtgtccgcgggacccgtaagtaagttgtagcttaaatttgtaactctcttgaggctgaaatttaaagttgaagtcttcaaaatttggattagagtgtgcgatatgacatgatagagcattgaaatatcatcgaaattcaagttgaattgtgtcaatcaaattaatatttagtgagttatgactaatttactataggtttctctgataccaatgcccaggttaacatatgacgtcaacttagacgctgggccaaggaaaaaacatgttgaagatgtaattcgatgcctaatttatattttgacatcacttagctattttatgtgctctagtgaagccattcactagttctcgaagatgttgctatttcatagaatagggaaactcaaaaccactcgattcgcgactaagtcactagtttgccgaaaaaaatgaaaatatgaagttatgaatttgacttgtataatttcatatctctcatttaccatgaaaaactagacaaacacttgagacggaattaaaattggataagtagaacctagcgcactaggtcacctgtgaacctaggcattggttgctccttctagagcttccaggatgcagtttttatattttcaaagttcttgaaatcaaggatgaggttccataccccatttttgaccatccggagagaatgcttagagcataatttgtatttggatgattgaaactagcgcaccaggttgattgtcaacttgggcgcttggcccagcaacatgagcttagttttttgccccttgggattcccgttttctcctcgagtttacttatatcttcgttatttcattatatccagaacactttttcaaaaacatggttgtatcagtgaagtcgatgcaagtcctccacttttcgttttgtttagcaccaaaacagggttggatacctaaatttggtagaaatcttccttcatgaatttgttctctcgcaaactttcaacttcttccttgagagatttagagtgctctttgtcaaggagtctgcatttttgttgcatgggtctaaagttttctttttctatgttgagggcatgacaaatgaccttggaatcgatcccgatcatatcctcatgcagccaagcaaagatgtcttggtttttcctatggtaagccatgagacttattcttaaagcctccgtcaagttcttatcaatcttcaccatcttggttaagtccatcatgttgaggggaattttctcaagttcctcagttggactaacttccgagtcaatttccccaaaatgatggtcgttgtcctccacgtctttggaacaccttcaagtggttttaagtgttgtctccatcctctccttggttacaaacttagaggtcttaattgtcaggctgaccttcgtgggagaggtcttgctcatccccttggatgttggaacaatagaggaggtcttctttgcaagagttagtgaatcgttgtaacacttcagggtcgttcactgattaccaaggaggaaacccatactagttgctgtcaaaaacttgatagtaaagtggtatattgacaagatggctcgaagattgcatagagttggacttttaagcatcacgttgtatgaagacttcatgtccaccactatgaacatggccatgatggtggtcttccttagggtagtggctatagtaagtggtagcttgatcttaccatatgaagctatacctgctacgttgaatctatacatcaattatttgcatggctttaactctttaagtaacaaacctatctgctctagggtttgtttaaacaaggatgtttgtgttgggttttataccctanataaaactctttacaatctgattagt

SEQ ID NO: 110778 - DNA, 2256 bp, Cannabis sativa
tattaggtctacaaatataaacatgtcacgtgtagagtgtatacataagcatagtgattattaatcggatcacactaaatttgaacttagaaagttaagtgcaagtgaaataataattgagaggtaaataataacataagtatttaaagttttgaatttataagcgccataaatttaaatgatttttttagcgagataaatatctaatgtttataactgtaattattttccaattttgtcagtatatactcaattattatgttaaacaaaatacatgtaaaactcaaattctataacattaacattgggtctgtacaaaaacaataaaatttataaacatttgattaaatagcggcataagtacctaaaattttaagtttgtaagtggcataattccaatgtttatttttaacgacataagtacctaatgtttgtaaaactgtaattattctctaatttcgtccgtacaaatcctgttattttcttaaacatgccacatataaggtctaaattcttaatcattgggtctagatagaaacatgtagtatcagttacttctaaatgttcctttaataaatataaaacgaagactgacaaaactgaagaaaaattacagttttacaaacattgaatacttatgccgctaaaaataaacattaaatttatgccgcttacaaatttaaaactttgagtactcatgcctaaacattttataaacattgattggttatatgtcagaaccttcgagaacatctttaacaaaccaacaaaactggtagcatagggccaacaggcgcccatagaaatttccttttcctttttccttttttaattatttaaaaaaaaaaaattgaagagaagagaaccatccaataatttgtattctaatatagctctttctttcccttcctctcaaaaaataataatattaataaattaataaaaaaaaaagagtgaatcttgttctctcatccattgttttgtttttagcaaacactgtaaatatattgttacataaatattttcccagaattaaagaaacaaacttcacccaaattcattgtccaagatcaagtttttacgatggattttcgattttttcttcttcttcttctcgcccttgtatgcttctttcctcatctctccctttctgctgttcgagttccaaaatggcttgttgaaaataaagggtacgcactgttatcttcttctttttcattttctttttatttctaatctttttgtatttgattgaattgattgtctgcattttttttaatagagatgaatcagtgatacggatgaaaacgggggcttcttctgtttcgtttgatccaactcgggttactcagctctcttggaaccctaggtttttaattctatatcttaattatcatttttgtaatttatgttatttgttgctttctacattttatattataaccaatttgctttttctgtataaaatcagagcttttttgtacaaaggatttctatctgaggaagagtgtgatcacctaatccatttggtaagtttagtttttttaattgtgtgacttgataatccattgggtattgacctgggttttgattaattaggctaaggataagcttgaaaaatctatggtggctgataatgaatcgggtaagagtattatgagtgaagttagaacgagctctggaatgtttcttcaaaagtctcaggtatgaaatatagtttcaccattttaaattgcattgaatgatcttaagatgtttgatcttgaataagcttaggttatttatttatttatttatctatttttcaattgtaggataaaatagttgctaacattgaggccagaattgcagcatggactttccttccacaaggtaaccccataaattaatttctttttccaatcttttaagatgtttgatctttgattaaatatgggtttattatgattatcagaaaatggggagtcgatgcagatattgcattatgagaatggtgagaagtatgaaccacattttgattattttcatgataaggcgaatcaagaattgggtggtcaccgggttgccactgtgttgatgtatttgtctaacattgaaaagggtggggaaactatatttcccaattcagaggtgatcattttcttacaacactgaaaatgcattcttgtttatgcttcctgatttattcttgtatatttaaaaggcagtttcattttgttgtgccaacaggcgaaattaacgcaacataaagatgat

SEQ ID NO: 110779 - DNA, 10845 bp, Cannabis sativa
tgggggggagggggggtaataggaatgctaagcctcctatatgattcacctattctagaaagaagattggacaaataggtcaaggatagattgagtcttttagctggtgagtttgttagagggtagtttgggaattggggtaattgttgttggccttttagtgccataggaagctatttttttctgttatgcaagtactgagaagtttctctgcatcacgagaactcttctttctattgtatgagactatagtctctttttttgcttacaattcaataaagttcccaggaattcttcttcatctgtgttgttgcattttattttactgctataattgttattcaattacccaggtgattatcattatcttgatttcatcttaacttatttcgtctataaatgaattaaaaattgaaaaggctaattgtttgcatacacttttatagattttgttcaggaactactcataaggaaatcaaacacaaataagaccagaaaagccataccctctgctgaaatgcacaagccaaaaagcattgtgttaaaattgattacatacagttacattaagaaaaacaaatggtgaaagggtagtttaatacataaaacagagggaggtttggatggggataagtgctgccagcctcaagttctacgacgaagaactgtgctgtatgcaaattattcaaactgacagacttgagacagtttccccatatcagtcttggtttcttaaggcttgttcgaactgagcatttcttcttgcacactctaagatggttttatcagcagtgatgaagtatgaagcaattgatgctgtcaacaataaattggcacaacatgagaaatcaaccacaatgaagaactcttggaataagatgcaactgttaaaatttaatgttattccagtatcttaggtttactaagtattaagtgatgggcatacataccagcagaaataattagcgcctgagctgtatagttgaggtttgcctttgcccaaggaactttccgaacagcgatcaactaagaacaagaaccaacacaaatcatcagatccattcgaaatatagtagaccaagtatgaatgaagatgacagtcacccaaataatttgagattatgaaggtcttcattaacttttcttttttaaaaaataggatgctctactagatactttttcaggaatgtttaactggttaatgcctacactcatggctgaaagatccaaaggtgaaggacaactaatgactcttgattctgatatggaaactacaatcattgaatcaaattagaagtgaaagccatgacatctcagttcatttttctctattaagttgcttagtatagtatctaatactttcgtcataggcctcttttgcctgttcatcatttcttcaaagaagagaagcacagtaagggtctttactggagagtgggctgtacacaaaattaaaaattaaggcaaagaactagacaaagtcgtaaaaggtaacagtgcctgtaagaactaatgaacaaaagagagagatgtaagaaaaacctctcagaaggtttgttaaaagttaaccccttaacagagagagctctttatttatagaccaatcctaacaaggagtaattagacagagctaaacaagattgggaaagctgttgaaagaaaacaagaaaaatagaagaacaaacctagctaaataagctaatgctatcagtgtcaaaagaaggaaattctattccatggaattctaatactttgtcataagaaaagtaagcaaaccctctcaagaaatcacatcttctcttcaaatgggataagaatttaaaacagttgggagaaggggttcccaaaaataagcagcagaatggaccaaatactgtaacgaaattccttctaccccattcctagttaaactaatatcaaacaaaggaaatggaatgaaaatcgtaataaagatccacttgagaaaaaactaaaacatacagtgggaacggcagtagcaacacacgcaatggaagctgccttgaatccagcacgcacaccttctgcaaaatcatgtaaccaataataaacaagagatgatggcattcttatcatatttcataccaacaatttcggtttgggtctcagattggttggttggttgctaagaaaatgccaataaaatgggcatacgaggcaacagattggagagataaaataaagtcaattgggtatttcagaaattgcatttaaaaagagatttttaagtaaaaggcaagcttaattcattattctcatctaaatccagaaaagaaaactataaaaatgtgaattaggcaaccaaccaaacaaacatttttatagtttcaatctaaatcattcgaattgaaaggtttactaaaacaatttattgatcaaatcacgttttgtattccttttttttttcttcaagaatgaatggtaattaagaagatgaagatgatgtgatcgaacgtaccttgagtgcaatgcttggcgttgaaaatcttgcgttcttcagctggcgaagcaatgagtaaggcaggttctctttgactacgtttgacccaaaaatccctcatttccgaaggaatacccatttcactaaacttattattttttttttttttgtaatttattcttagctttcaataaaaggtttcactttgccaaaaagaagagagagagacaggagtgaagaagaagaagaagaagaagaatcgaattgtaattgcttctctgatttttaataataataataataatttattaaaaaaaaaaaagaagaagaataaatgaatgaatcccctaagcagcgaggtgaggtatacagcacccggtttacgaaacaacaagaaagaccaagtgcgccgcccctcccctctggcgccacataaataagaattttatatttctctttcataatttttgtataaattatttaattttactaattttgtgtttatttatgtactaaatcatactccttactttgatatctatcaaatcacactccttgaattttaacatgtaccaaattatactctaaacttttatccatgttaaatttttgttattaaaattagacaaaagttcttaaatctaacaagctcaataatttacgggggatttttaacgtttttaaatgttcagaaacataatttgatgtatgttaaagttcatgaacaaaaatcataattagtcttttaaaaaaaatatataaaataataccatgaactcgtcaaactacctttttaacacatgaagtagttttcaacacgaatagatgcaaataaatataatcagtctagtcataaatactttgaggtcaagttagctattaagttttattttgattaaagttaaacttgatatttgttgttagaggaatttagacaacaccaaatatctactaagaatatttaataaaaagtcgcgagtactcaacctagaatggcgagtatttaaagttctagcacacagacaaacaggaaaactaatatagacaatgaacacaggagaattatagtggttcagtcagatcatggtctgcttagtccactgttgtaaggattttctgtctgtccttattcatattgaatcactcctttatatacaaagcaagtgtccttttgtttacacaacttaattactaaaccgttttacattgaatgtcaacattaaattaaaaaaaacgttaatagaataaatgaagaatagtttcgatccgatttactaaatacaacaacgtacgcgacctctatggtgcgagttgtctgttcacattcttgcacaagctcgcggacctagggtgcatgtaggactaatgagcctttgtgttaagatatttgcgtcctaaccgagtcgcatatacggataccctattagtgttgataactcaggacgcgagagtcctcaccgggtcatcaagcgcatcaggtcattcggaccagctcgctaagtgaagaatcaatctttaatccacaggagaagcctttacaaacatcgcatatatcttggtatacgcgagtcttgaacacggtcttcttgatcctgcatcatgcgaggtgtaatatgcgccttggttctatcaaggatcacatcatctcgctgactttggctcaggcgaggtttatccccgagtggtctctttttgacacctcagtaatcctcgaggagagtgagtccatgtgtcatctttttaggagcctgttctcgagtttctaggtgaaatttttcaccctataacacatgcccctagttttgcgatcgacagccatgtcataagggaaactatgagagagaggcaggcgagtggttgtcacgagatggtgattgttgggtgtcacgtcgagggttttgaaaagacggttataattattactttattcctttgaggtgccacatcatcagaatcctttggggtacgtgcagacgtgattattggtaactgttagattaagagaccttaggcattcctttgccacgtgtctccatcccaataaatgagggatactagtatttaaaccttttgatacaaaacgatcctttacccatttttctctcatttttgttttcccctctttctctactcagaatttcgaattcacaaaacttctttcaactgggaacaaattcaagggctgcattactcacagaattacccaggaaaaactacatttcaaggttagtgattttactttctatgtaaccgttttgagaatttgcatgtgttctgattttctatgggtaggaaatgcatgaaatagtaggatttgttacttattctttgtaagatagaaaaacactatatttttctagaaaatacagccctgaaacttaagtaatcataggtttcagggagagcattttgaatgtttgcaggtttttcgatgggtactccggataactgcattcaaccaatagctaagctttttgtttctacgtattagagtccccaactcttagaccctttaatttcttgattacttacatttttatttatgaaaactatctgggttctcgaaatggtgggagtgtcccattaccacaatgttcatgcaatcttcgcatgccccttgggacactgggatacgcccaaccatttccttagacatgcggttagttttcattttgctctcattttattcattgtaggaactggctagattctcgaaatggtgggtgtttctctgtgacttaatgttcatgtatcgacatgacccttatgacactgagaaacccccagccatttctagagatacatggccaattctatgaacttttatgttttaatttttgcacgggtgagggcactttgttaaaattgcactttcaccacactgaaaagatcttctatcttttagatgagtgacctgtcagatagtcagagatatgattctggagaaggggcattcgcaaatgaataaaaaataagcaacagcttcatacccacctcgatgtctgaggacaaagttcctgcagccagaacccgtgaggacttgctgtctactaatgagttagataggatggtttaggaactagctgaactagtgacgatagaagtacgtgacaacgagtctacggtgtggccctagggttatttggtccactcgtgacatgccccagacaccgaagttgaagagatgggcgaggacttcaaggtgccaaaccttggtactgaggacgaggaggatggtgaaggaagcgagacggattctgtcaataatacctgactaaacaaacctttctcatgtgaagatctagtctcgcaagtcaagaagtccgagttgtccacatttgcgaggttgaacttggttcatacaacgacctcaaaacccttgcccacgcaatgacctcatctcccctttacggatcctgcgattatccctaccctaaacgtcatggtttcaattcccatccttcgatgcagagtgacgctacctttccacccctttgtgaaatatctttcctattatgacgtctcacctttttagttaactccgaatagttatcgcataatcttagggttttatgcgatgtatatggagtatgctcaaggggagccaacagtaaaagactttggtttcttttacgatataaagagtgttcgccatgacaatgacttttactgctttagcaaatgggctaattctgaaattaatggggtagaaggcacaattttcaatatgggagattagaaatcgaagtggttctacgcatttaagatgtcggggtcaggattgacttcaatcgccgaccttgtgcgtcgcacacttccatacttagcatttattttcattattttttgtagatgctaatttctgtttccttttatcgcagataaaccagctcgatctgtgttggaccttgcttgtctaaaaatcactgaagttttgagtagccttctcattcaagaccgcgactggcatttattgtgtactactgcaaagctgcgagaacacaagcttatctcagaggacgctaaacttcagcgagaaccagggtacaaggagccttctgataagcaaaagaaaagaatagacaagcgtctacccaaacagactttcaggccaacctcgagtaatataatctagtatggtaaatattcttttttacctcatcaaaaaattttacttatggttttccttccagacatgactttcttgaagcacgctcctgctttcaaccataaacccaaggccagtattgcgacgccatctcatgcgattccctagaagagaaagagcgacgttgttcctactcaggcgactgactcgtcaaagaagcagcaaaaagttgctcatgacaagggaaagaaagtgatgattgatcccgctctcaaggctcgcaatgtcatggctcttcaggagaagttcgtgagcgacgaattcatttctaaaattaagaggattcctaccgatgacctaatgcctcgctcaactgaattggcatcgcaatttatgtcaatattcttgcgggcttttgttgcaggttctaaagatctcgatcttctgaagaagcagaactcgtcactttaagagggtctgaagaaagtgaagttaaaagcagttgtcaaggataaggagatcaaagatcttggaaaagccaaggaactgggggaggaaaaagtcaagactttgaaatcacgagtccctgaacttggtcgcgaccttgagaatgaaaaagagattgggaagaaacaatatgatcaggccgtctccgaatacatctacatgactttgaccaagctgcctgattttgacttcgcgatttttggtcctgaggtagtggaaatggccgatgcatttcgcgccatgtcacctaccgagacccaaggacttggtggaaatctatttcccgacgatgctgaaaatgcgaatgttgctgaagtcgcggagggtacaagcaaagttgtggatgatcccagcactcatgtcacttagttccttcctcttactttattgaactttcttttgagcgttacatgggtactcacgttttgtatttcaaacaacttattatggtatgttattcgaacaatgtatcctgtcggggatacttcttttattaagtatttcttcgtcgctgaattgacgtgcatttttagttgaagttgcttttatcctcacataatttttcgttgatctgttcacagcttggtgtgatgaatgaatatgcgataatactaacacttcgaaaattttagaaattctaatattcgagatttcattaaataataaatagtacaatatcaatggttacaccccctttacttagtacatttatgaagtaaattgactaagtatttatacatgctagtactattgataataatattttaaactttctccattccaagctcgatcaagaactgagccgtcaagattggataatcggtaagttgcattaccaatttttttcagcgatgagatatggtccttcccaattgtcgctgaatacgtcatgcacagaattgcatatatttggaataactttgcgcaataccaaatctcctactcacaggcttctttctttaatctttaagttaaaatagcaagttgtacattgttgataggatgcattttttaaatgagcctaatcacgcttttcttctagaaaatcaagttgaatcaactgattctctttattactttcaatattgaaaacatctcttcttaacgacccggctccaacctcgactggtaccatggcttcacatctgtacgagagtgagaagggggtttcaccagttgttgagtgaggagtcatgttgtatgaccatagaacttgcagaatctcttctggccacacgcctttcctttcttcaagcttaccttttatagtatgcttgatgatcttattgactgcttctgtttgtccattacttgaggatatgcgaccgttgaaaaagcattttgaatccccagatcatcgcagagtttacacaattttttacaatcgaattgttttccattatcagagattaacttgtaaggaatgccaaactttcaaatgagagcacgatagacgaactcgcataattttgcagttgttattgttgcgagagcctcagcttcgaccaactttgtgatatagtccacaacgaccatgacatattttaccctcctttccctttggtaattcaccaattaaatctataccccagaccataaatggccaaggactagtgatacagtttaattggctaggtggcctgttaacataggtcgcaattcattggcacttatcacattttttagtgaaactggttgtgtctgctcgcaaggtaggccaataatatccttgtcgcatgatcttcaagacaagggaattacctccggtgtgatttctacaaataccactatgcacttctcagagtatatactcgcactcatccccatcaatgcatttaagcaatggttggctaaaactcctgcgatacagctttcgtcataaatgacgtatcaagcagctcgatatcacaattttttagactcaactttgtcttcaaggagtttaccagttgttaaatatgtaatgattggaatcatccaagtgatttgcttagttgcatcgacttgcataacctcctcgcgatcaatagtcggatgggctaacacatcgacaggacttacattgagtaattctacttctcttgttgaggccaaatgggccaaagcatctgcatgataattataagcacgaggtattctattgacaataactttttttgaatttatgtagcaactcacaagtataggaaatgtactttgctaagcgtcctcctctggccagatattcctcattgacctgacaaaccacaatttacaaatcactaaatgcctcgaggtatttgacttttattttaagagcaagctttaatctcgtgattaatgcttcgtacttggcttcattatttaaggtagggaattcaaatcttagggccgcgtgtactttgaatttattagggcttatcagtattattccaccacttgatccttcattgtttgatgcccccatcaacatacaacgtccacccttccccggatggcactttagggtcaactcgttcttctgtaataatcgctacttcgtcatttggaaattcgagaacaaaatcagtgaaggcatgtcccttgattactgatcgtggcttgtacttaatgtcaattggcttagctcaactgaccatttaagtaaccttcccgatgcttctgacttcgctaatacttgttgcagaggatagtttgttagtacttcaatactgtgtgcttgaaaatatggtcgtaactttcgagaagcaaccacaagtgcgaattctaaccgctccatttgcggataatgagtttcagcgtctaacaggcgtttactcacgtagtacaccagatgctatctactaggggtgttcaacaaaatttacaaactgcccaatccgaataaaccgcccaaactaaaccgaataaatcgacaaaaaattacaacccgaaataatataataaaaattcaaaccgcctaatgaatacattgggtggtttataacttattctaaaccgcccaattaacccgaataaaccgaattaaactgatttatttattttttaataaaagtgtacagaatatattacataaattatatttattagtgaaactattttgtatttaaagtttaactaataaatggtccggggctagaaatggttcgtgtctgagtctgatgccagggtctgggtttggctccaggggtcgaggtcctagttcgggttaggtactgaggtccaggtccgtggacgggcttcaggtccaagaccagggcccgagtctaggtttgagtccaggtctgagactgaggtcggttggggtcttgttcataacaagctctcaaagtattgaactgttttttttttttaaataataaaaataaaaaatattttaagaaaacataaaccaaacacgacttatgttttaaaaacttcaaaaactatattttttgttcttatttctaaaaacacaattttaaaaataaaaaataaaaaataataccaaacatgctttaaggttctcaaaattttttgtccattagatgacaaacttggtgaaggacttgaattttttctcattattaagttcaactaatgctatataagaaaataaaagggataattacataatatattatttttaaaaaaatttacatttttacattcaaaaaagattttttttttttttaacatttttactgtattttatgaaaagaacaacaaaactatataaaaataacatgaaataatataaaagcaacaacaaaaaaataacatataaataacaaaaaaatcaacaacaaattaa

SEQ ID NO: 110780 - DNA, 10569 bp, Cannabis sativa
  modified_base (9290)..(9290): a, c, t, g, unknown or other
  modified_base (10470)..(10478): a, c, t, g, unknown or other
gaactatccaatcaacccaagttttattaaaaccaataaaagttaatgtaagcccaaataaaaagtctaacagataaaagactactattgtcgtgtataattacaccatgcttagcataatttctcaaatttgatgtaagacataacgacttatcttacaatggggatttagaccgtctataggagtttgatgggattaatttttttcttatttatgacttcacgactcatttatacagttatcgattgatgtattggggctggtgaaatcagggaataattggtttaaactcttaaacacgtttgtcagagtaaagtatttgtcagtcttacccatgatgcatttaatgcatgtacaacgtcataatccttgaatatcacatcatattttgttagtcctctcattctatgctccgcctatactacactcgtagtgcgaaagggacgaggattgctcgagaaacaattggatccttttggaggtgactaatctcgttattcttgtgaaataataggctttgggagtaattaaggcgtggtgtcctgtagcgtgggtttactaccatctggcttcctcctgagctgccatgtgttttgggataattcttaggaaaaatttatcctccaagtcctttcatgcgatctggcaagatggacttgcgatgtgcctcctggaacaataacgtcacgttgtgcatgaccgttttatacactgctcattaatttcctttaattttgatgaaaaacaattcagtttttaaatcaaatatgactccattaacaatatggcattagaaaaacactctgattagtgcaactgtcctttcagaatttttccataggcctgttaccacccaaaccgtcagatcatgaagcttttaatcataaggttaggatcattgaatgactaacgatgatgttatcctccctggtgtataaaaatccctcactttttttctttgaggtttttacctttcatgttttttagatgcttcaatctaaccaaaattccaaggagcccaaatttccttttgcttttcctccaccattgtcaagcttgaaactaccagcattttgtaccagcgaccgttcttattcagtcttttgctattggtaagttactaaccatactaacttctctctagtttatctttgtaattttaatttaaaattttcttgtacaaatgtgttaatgggtactacgtctgagattttgtgccatttttctagtttagcctttatttttcctcttgtggcaagatattctcgtgttagggctagtgggattttccctttatcttttctttcctctgcaccattttttattcatggtgtagtttgcacccaatgcataacacataaaattttcatttctgggtttgcttgcatccaaaggggttctcttctcagtagttaggggacccccattcccttttttattttgggtttaatgtgagggctaactgttgagttaattgttgccttttcatatgagtgacattttgaaggatctccacaaacacgacttcaacacttttgacaaagaaattctagaacttcactcctaaaccaagatgtcaaaccctgaagcccctacccaaatttttactcaagatgcggtatcacagcaccaagtggtgccactagatgtggtgatatagggtctagttccggtcacaccttatgtacacaaagctactagctgggaagctgaggagttacactcatccatggggtgtgtccatcatttagggaccattgtggatgagaatggaattagaccccaagagcaaggtattttccactacttggactaagaaaaaaaacccctaaccacaactatggagggttcagggcatggagcgaaacacatctcatttcttgggaaatgctctcatatcaagattaccttgtaaatttcttagtttttgtaggactagctccgtatgagttgataccataaggataccgccaattgtcaagcttattcattttttatgctttatggggctgacctactcccagccctgcttcaatattatttttttatgaactcttttttgccccaaagatgggaaatagatggaagggtggtttttactccctccaagctcatctgggcaataagacagctgtcttgttcaactctcagaacaacgtcaaagactgtctccatcggttcttcttctcctttaattttgaagtatttgagcatccagatctcttaacagagtggactaaaattcccccattactctggacaactcccacaaaactcttcttgagctacgctcctgttattgcgactcttaccaaggaaaggctcaacgtgggagatgtagttacaaccactaactgccagagaatcggactcattcaaggccatgaatttttcaatgacactaacttgtcaaaggtaacatgtctgaatgcatggaataaggaggccgagaggaagctccaggcagagtatatccaagaggctaaaaaataaatatcaagcttattggaggaggaaagagtaggaggacctttttgctcacacctagagtgtagtagatcgaaagacacagaagaaggcgaagaagaagttggtggttcccagaccttcatttcctttcctagttcccaatttcgtcgctcgtggagccagtacctttggtgtccgcaagtctcctctattttttcattatgttccttctgccaaacgttatgctcattctaggccagttgcctttgatagaagattacttaggttgcaaattctccattcccggtggggttatagggaaaaagagtggtacttctccaacattggacatcttttaggtatgtcccaaatgggatctggtcctccagtactgatacctcttgaccactcattttatctcacctcaagctggtttcttcatttggatagtttcttaggagacaatgataccaacaacattatttatgagtttgctaggaaagaattaggccacctgggtaggattagtttttttgcatgtcttatctttatgatccttttgtaaatattccttacatttatttcatttctttttgtagctagaccaatggatgccatatttgcctctatggatactctgagtcccacagaaggtaacgccatccctcccgctaatttttcaagggtcatagtgacttctagagcttcagaccgaaaggttgtatgtgtagatgttgtggatgagttacccccactggagcgaaagaggaagaataaggctggagactctgcatcttcaaagaaacttaagacagccaaaactccttcccatagtactagggagtcgggaatccctcctaaagctcatactttcccaggtgtaccatccattcccctaactcctattcatctggatatgtcccatcaacagcttaggattgctaagcataactatgttgtaaatgaaaaaaaccaaagggaatgccaagttgaaggttttgcagaagtggttgatggagaaccaagatggtctgttctaggtggattatagcggtgcaattcatgaccttagcatggatgcaatgaaagattgattttcaagcttcctcaggtttatcttggttcccttcgcttctgtgatgatgggtcactttgcttctgaattggtttagcttccaaccaagaggttcatcatttgtgcctcctttaacctaatttaccaggtttaggatgtgagcatggctttgacctcggtaagtccctaatcatgcttgtttaatttattcctccactaacacttttttgataatcttaacgcgtgaaattggccagattactgttgaagttggtcgcctatccaagaccttgattgatcaagggtttgcattagctgaatatggtggcatcgatgaggctctaaggaagctcaaggatgtggacaagcgcgctgaagctctcaaggatgaggtcctggtggtgaaggctttgtagtagcaggaccaacgggtggccggagagtccttgaagatagcttaggaggagatctaggagctttaggacaaggtaaagaaacttgaggaactccaccagaaggatctcaagactgtagccagcgtgtctgtggagctcaatgagcttcgtgactttcaaaataagactaatttgaaggctaccaaagctgccaagcaagctctcctggctctggtcacgtgtgaaaattgcgtaaggcgctttaagcacagcgtcttcatgacctgcaggtccaacaattatgagcttaaattcaactttctacctaattctgaggctattttggctcattttctatagtagaacaagaatttggaggccaagctcgtggagaccttgggtcctcatcttcctcccatagccgactggtctgccatttatctatacttaattaatttttatttatttttggaagacatttatttagcctatccttgaggctttcttttacattagggtagacactttattggcctatgcccaaggctctcgtttttttttattatatatatactcttttcttggcattcatttatattctagcctcttttattttttgagcaatatatatttttatgagttattatgtttataccctactaccccttaagtgactaaatattttattacattttttactttgcatgaatataaaagaatagtgtattacataaagggtattaatttaaactaagttctctttaattgaaaatttaaagattaaattaaatactgaacttctaattattgttagtatttgcaaaaatgttcaacattccatgctcttagaattaaggaaccatcaattcgtttatgtttgtaggtgccagagccaatttcatcttcaatctcataaggtccttccaaatttgggcccaacaccctcaatcaagggatcttgtgaagctggaaagacccttcttaagaccacgtctcctatggagaattttttgtttttcactttataatgaaagtgtttttccactttcctcaggtgcgtagccagtcaaatttttgccttctcctggagctcttctatgagatccagcgattcttgcaacaatggctggttggtgactgaattgtggttggttcttctattggagggaatggtgttttctacaaagatcattgcttcacatctatatactgttgagaacggagagtgtcttatggtggtccaagaagtagttctataagccttgagtactcgtggttattctttaggtcaattaattttgcaagccaagagcttttttgagtgtgacttttaatatcttattcacgatttttttttaatgaataaccaaacttacatcacagcttacatcacagttttataatgtttacaactattcaatcaccaagtataatcatgtacaattttaagtttccagtatccaatctatgtcttcttcctttgcttttttaggcggccatgcttggattcttagcttacttacatgtttagccttctgtactgtcttgttggtgagccactgttgctggttccatagtgcttcgtttcttgccttccatatgtgatacacaagacttgctatgactgtgttcactatgctcttccttgctgcagaaaacctttttgtttgatggcaggattgcagcaccttgacaatgtcacctgctggtgtgttccattgcaggaacactttaatttcttgcaagcattttgaactgtattcacactgaaaaaacagatgctcaatggtttcatcacctttaccacacaagacacatgttgtgtctatgttttggttgaacttgcttactctttcctttgtgtttaatcttttccaaaacactaaccataaaataaatctatgtttgggaatgacaagtctgtcccaaaccagattacaccatgggattttaggatgctcagggaaaagatcttgatatccttgcttaactcgatatctctgttttataaagttgtccatgtctcctctttgttgaaacttatccttcacagtaactatttttttacatgccaaactacagtcttgtggagtaacataactccaccagttctgatccttcaagtagaccatgtgtatccatttgacgaaaaggcagtccttcttgcttgctatatccagacatatctccccaaggctgcaatattccattgttggttatttcaaaatcccaagccaccagcagatttaggcctgcaaataaattcccatgccactagaccaggtccggatccctctagagtacccttccaaagaaaggacctacaagttgcttcaatatctttcaagagtttcttgggcaaaatgaaaatctgtacccaatatgtgtgtatggcaagcaaaactgagttgatcaaagtgaccctacccatgtaagatagattctttgtactccaactttgaattcttctagtcattttttctaacaaacactgacattcagctctagatatcttccttgaacaaattgggataacaaggtatcgaattggtaaggagcttctcttgtaattggatgcctcaagaattctagatacttcattttctggcattcctgaacagtagattgctttttttttttttctgatcatttggcattaagcccgatgtagaggagaacaatttaatgccattaagaagcagcattatagagatgaaatcaccattgtagaaaactaacaaatcatttgcaaagcacaaatgattcagttttatttggccacatttatcatgaaatttaaatcctggccaatctcccaccttagtgaagattctcgaaatatactccattcccaatacaaagaggaggggagacatcgaatctccttgtcttaaccctctctttgagttgaagaatccacacatagcaccattcagaaggaaggaaaacttaggtgtacatatgcattccataatgagatttataaacttactaggaaatccgagtgctctcatcatctcctcaatgaagtcccattctattgtgtcatatgccttcctcaggtcaattttgatcatactacttggtttgcaattcttcctcccatatagccttaccatgtcctgacaaattattcactaatttttcttaaccatataattatggtcttacaactatggagaagcttttcatgacactgtacttttcgcaaaactctatgaatatgtcactgtcaaattacttgtcattctccgagactatcttatgaggcagtccatactgagaaacaatgttttcatcacataatctaggcttttcttagttcattggttctacttctatccatttcgtgagataatccacagcgactatagaatgtttgactccactcttttccattgggagggacccaatcagatctataccccacactttaaatggccatgggcttctcatgaacatgatttcatttcgtgaggccctcaggatgtttaaaaacctttggcatgggtcacacttccggacgtaatcaatgcaatcctttttcattgtatgccaaaaatatccttatctttttatactggctaatttcatggatttcttccattatttgcttagcttcgggattaaaaacataccttaagtagggcatactaaagcttctccagtataaggtgttgtcaatcatgagatagtgaggggcttggtattgaaccttccgggaggtagccgaatcttgggataactctcccttagtcaaatactagactatagggtctatctagctaggctcttggttggtgactgcaacctctgccttggccagaatgcttggatccagaaggtattcaatgggtaccaccccaagtctttctacttctttgtccaaagccaacttcactaagcggtctgcgtgaaatttcttctcccttacgatttccttaattttacagcctttgaactcctaaagcagctctcttatagcagcaacataagaattcattctttctctacgagttcggtattctccaagtatttggttaacaaccaattgcgaattgttgaagacttctgtcttttgagctcttacgccttttgatagtcttaacccaaccagtggagctcatactttgccttgttgttagaggtagggaatttaaattgcaaatttgtttgaagcctcaagcatttgcatgacaccatcactatcctagctcctgatccattcttatttgaagccccattcacatatattttctaagtgggggcgcatattttaggttcatgagcagttgcttcagtttccttacattccataataaagtcttctagggcttgccctttgattgagatacgcaggacatactgtatgttgaactgattgagctccattgcccatttgagcattctcccagtagcttctagcttttgtaggacctgtagtagtggatggttcatctggaccttaatcgaatgtgcttggaaataaggttgtagcttttgagaagctatcattagacaaaaggctagtttctctattgaaaggtaccagacttctgctcctaccatccttttactgacataatagatagggtgatggacttttccttcttcctggactaaggttgcactaaatgcattttcagagatagccaagtataggtaaagatcctctctttggattagtttagacagaactggtgtcttgtccatatgctccttcaattatttgaatgcttccttgcattcatcgatccactcaaatttttgacttttcttcaatatattgaagaatgggatacatttgtcaatagaacatgaggtgaagcaactcagggctattattttccctgtcaagctttgcacatccttgtgtttctttggagatagaatttcgagcaacgcttttagggttagcctctatccctcgttgacttactatgaatcccaagaattttcatgactttagtttgattattttattattaaactaaatcaaattaaattaattaattatcttttaattagcgaattaaatatactattagataatctatttaattaaaaatgcaatattcaaataaaaaaatttaattgatttctgttaatcagttatattatatttatatttagatttaaattatgaatttgaactaaattaaatattatcttttatttcagaggattaaataaagggtttgcttgtaacgttatatataatatatataagtataacaaacaacataagaaaataagtggattgagcgatacttttagtgagaaaataagattgaaaaataagatttatttttcactctctctctctcacgctctctctctctctctctcnctctctctctctctctatacatctcacacaccacacacacaatagtgtgttgtgagatttatgttctttcttatctcatgagttgagaatataccgtgattataaaattatacttactaattgaatctaatagcccactctatttctcactgttgagattggcttagaagatcgtggtttgaacttttcagctagttcttagattggatgttcgataataatacgaaaagattacaagaatcccctaagagactacaagaggtattacttttcttttcattagtctaatttaatatgtacatattatgttgatatccttgagattatggttcatattggattaaattattttttaattgaatctgcttctacttttttaacacacgctggccagccataggggtcttgttcaagacctggttagccatagggtcttctcatggaagttggctagccataaggggtaccctaaagtctattcggcatatgcctgggcttaaggtccctggctggcccttgactgggtcttggaacactggtcggcccttgactacgtcatgtaacactggctggccaaggcctaggttctaagtgggggaccaagattttattttcttttgaccttagcaatggttttgtcaaggccttatagacatatacaactataatctcatacttggttcccttggaaaatctggacaacttaagactcaccatttgtctaagttggtatacttgtgatagtacttttttaatacctaaccttgtataatttagtttatctcgcaagtaaccttgggtacaattggccagaattttgtctatactttgtagctttgtcaagtcggtcacctccccttatctcttctatgtaggtgattttgagtattggtctggggaggtgacaaccatgttgtcataggttcagtcactcttgcctttgtgagaaaacatccaatctgttctctagcaactatttgagtgatctcgaggttgatattgatacattatggcaaaaactaattagtcttaccgtagagtgccaccttttaaccctcacattgccaggctggcaacaataggtagggtcagaatggtagaggaggacaacccttgaataggcttggtcagccttcggtgatcagtgttgaccatgttcttgttggatattattttaccnnnnnnnnngatctactcacaagtatgttggttaacaccctaaatatgaaatttctaaaacgataaattaaacacatataaatttaagaaaaccttacat

SEQ ID NO: 110781 - DNA, 7754 bp, Cannabis sativa
tgtgctgatgactcacgatgcgaaagttgaattcactaagtgtttggccattctgtgcggattactgaatactttgctctgggcatgccagtgaggcatcccgctcggactgtgctccccgagcagatgttccaagtggattccacgtgtcacaattcatgtgatgccacgtcagagtgcaaaaattgggataacaattatagtttttaaaataatttttttttaataaaaggataaaattttgtattggtcaaagttcaaggggtaaaaagactaatttttaacggtaaaagaaacaaaacctaatagaaagagcataattatgtaattattgtattttaaggaaaatttttaacaaaccgtatattttagggggcagaatcaagtagtgttaaaaatttaaggaacaaaattgttaattattctatattaaataatttgttttctaaaaatttcagtaaatatttaccgtatattaataataattttttttagatatatatatgtatatattttccaataaaatattagaacatcaataacaattgagttttttatttagtttacatcttttgtattagaactcaattggaaatactaaatagtgctaaatatagggcaagctcaacttttgtacaatatttagcacaaaaattatatcttgcatataacatacttcaaggggcaagaatcttaaataaccaaaataaaaaaggatattggcagcaaaattacttaaacgatatatttttttaacacttcactacaaaaattgaaattttaacgataaaacttactgaacccaggttctattttgctcttcacacttccatccaaaaatcttagttaagtgctacactggactgcctacgtgtacactagtgtacatgtggcacgtttttaggggtacactaatattaattgtttaaatattataagattttgtaaaaaatatctaaaatttagacattaattttaatgaataaaataaattacaaaaaaaaaatcaaaaaataaaaaaaaaatcttttctttttctttttttccccttattctctagaagcatcaagacattcctcctcctcctcctccttctacccaaaaccagatctccatggagcatagtaccaccataaccaccaccaccaccacttcttgaatcctaaaatcaaaaataaaagaaaacaccacaaccaccacccaaaatcacaaaacaaaacctaaaccaccacccaaaatcacaaaacaaaacctaaaccaccaccgtaaaacacaaacaaaatcaaactccaaaactacaaacaaaacctaaaactaatatcacaaccaaatcaaaatcccgaacccaaggtaaaaaagacttacacttgagcgatgatagttctctgcttaaaccatcaccactttcgggaacaccatctatccatctccaatcccctttgccggagcagtaatcccaacaagaagtgactcactgaggcaacacgatcctgtggtcctgttggaccacctacgaccgtggacgactgtctagcctggccgttgttgcacctgaaaaatggaagagaaggagcgagggaaagatggctaggaggagagagggggtcgagttcttaggttttcgaaagtagagaactgagttttggggtcccctgggaccatcgacgccaacaacagtcaattttcggtcttgagagagagagagaggctgaaattagggttctagagaaagtgagaaaaaaaggagaaaaggaattttttttttttattattattgttttattttttataatttttaaattattttttttataataattaaataattaatattacgtgaaccattaaaaatttagaacatatacatttgttatttgtgtacacgtaagcagtctaatataccaatttttggatgaaagtgtgaagaacaaaataaaatctaaataaattttaccattaaaattctaatttttgtgagttcaagtaattttaccgccaatatcccaaataaaaacatatttgaaaagtttgaaaaaaaatatcaatatttaatttctacctatgatgtagtcagagttatttaaaaagttgccatatgcttgtaaaaatagatattaattaatccaatagaaaagcttcccaaataattttaggtagaaaactgaaattttaattaatactcgaaagaaaaaaaaacttagataacttttccccctaaaacttcatttcactactaaattcctgttaaaagtaaagaaacacagccagctagagcttcaaattctttaagcaaaagattaaattttcactaaaaaaagaatcaattgtgtacacagacaaacatggaaactgtggacaaactagttgtaacgagagaacaacaaaatttctctgatattggttatggggaaaattttgatagattacagtacttgacatgcttcagaacacaaggcacaggacccctagtgttaacatccagcaaaaacgaagggatagataatgccgaactctgcatctcactcaaagactgcaaacactgtgtcatcgacaaatggttttatgtcccaaataagtgtttgtgtattggtggagcttcaaggtttttaaccacttccatccaaggtttgtctatgatcaagatagaattattcgaaaggggtccaataaataaaatagggtctctgaaactaacaaagtcgaaattctttctaccaaggagtttcgtttggtagtctcttagtttacgtttcaaactcccactaggaggacctaaactctttactgctccatcctgaccatttactatcccactttcatcctcttgatccacgggcaacccaaagtctatccggcaaagtgccctaaaatatcagaaaatgaagaatattagagtataagggagcacaaaattgtcaaaagtatgatcaaactcccccatttgtatgaacaaaataaaataaaaagaagaatatacaatctcaatagatgtaacaaggacccaaagctgtcaattagagtaagtttagatttaccagtattgagattagttaattcagaaaatttacacataatggtaagcttatgataattgtcgttcttaaaatggttttctagctgttcaagaaataccatgtttttttcttaaaactaggattcacgtctaaccctacaatatttggggactaataacaattgctatgtaggttctcaggagggactcgaacctcagagttagccacatgcctgaccattcgagctacccgcttacttcccgcatgattatgcaagttacttcccgttcaagaaatactttcaaatgtatgattatgcaagttacttcccgtatttatactactgcgcttacaccatttaaatttttataccataactattcttaaatggaaatccaaattaggcaaaattaaaatgaaattaggtaaaaggagcacctggcactataaacaatcacagttggtgattttgatggtgggaaacatagactaatgacttccccaggaaactcctggaatcttcgaggtagaacatgtgaatttcgcctggaccaatcccccaatttcttctcctccacatctaatgcatagacttgatttgaagaagttgtaactataagcacattattattaagtggaggaaaacccccagctgtaatagaggcaccatctagtcttgcgataaaccagtgctgtctgtttttgagagggcaaacaacagttacattgcaattgcaaaaaagatgaaacgatatctttattaaaaatagttgtttgatgtttacaatactgctcattacaacaaatagatgcagaaaagatccatacctcattatctccagattgaaaatatatacatctccaaagcagttgatggcagctagccattgcccatcagaactggtgaacattttagtaatgggaggctcgctaggtggcaatccttcatcatgtggatcattgcaaggagtgaatacatttattatttctgagttgaccacatctacaacctacagaataaggatcaagaaaccaaagtaaatgagaaacaaaacacattgccaaataaataaaattatagagacaaagtagtagcttacataaatttttctatcatgcccggctatcatcaactgagaagaatcaaaattgaaaaccatggaatgggcatatggtaggtttcgaggaagttgttttttatccacagtccaaccactcttaccaattttacgtttcagttcgaataggttgggtttcacatggtcagaataagcaaaaagggtccctgaattagaaatggtgctacaaataattctccgagatcccttactcttaattcgagcaagcagatctgtagccactgggtttccagaaggaccataagccatatcaggaggcgcaccattttttgttcgaacacaacatatatccaaccaagaagcagcctggacaagaagtaatgatgattcattgaatgctgtatttactaccagctgaataggcactctctgaggtgcaggacaaatatcatgtggagcaaacattgtgaattccttagctgagtaggcatagagcttggtatcatcaccggcggaaataagcataggaacacccaaatgtgcccacttatggtaactaaagtcaaccggcttttccttacgtcgaagttttttcacatcttgatctggtaatggatctgcaaatgtaaataaaaaataaaattaacaaatgattttatgaacatactatatgacaaaagcatgcactatgacagaaaacaagtagtagcaacagcttgtatattgttaaaatgaccttctcggctgataggcacagccaccgtcaaagccctaacatcatgagaatgagctcttgtataaccaacgtaggtccatctcttcattgaattagaagaatcaccatcagtggattctattatctcgcttgagagcttataaagaataacctacaagtgaaagcaggtaaatgaccattaaaccaagatgaacatagaacacagacaaaaatgagacagttttacataggcacgacactaaatccagtcaaacaatgaacccttgcatagtccaactatattgcattctaaccttaaactagtaacctaatctcaattttacttgatactgaaacttcatataaaaacgactttctactcaagtacattggatacaaatccaatcttaatgaataggactgaggacaacaatgacacctgtgaactcagatagctttgttgtgggccaaactaggggtttctaaacttgtattgagaaggtgaaccaagggactttctaatcttatattggagaaggtgatgttatatgaaagcatgtaaggtcttattgggcaagcatacgtgaacatcatttacaagtgcttcactaagctcatagctacggtaatcaaccaactaaaaacttaactgagttgaataaaatataatgctaaaaaatagatcatctgcagagcctgatgttattatcaatcaagaaaacatagttgttaaacttcttaactattaaaagcaagacattgattggttaacctttaatattttgtttgtcacttaaacatgacaaatggtaagctcttaaagactattttggttttgaaatattgatatgacggagaaatacaattatacacgacttctactgaaacaagcaagtttgttcactaatacaaccatgaaaattgcataaacggataaatgttaaaatagttcatttattattatttccttttcaattattacatatggaaatttatccatattccacaaaggagaaaaaatgtatacctgaccatcagaacctgcagaaaacaccctgttatgtcctggagcagctgccagtgcattcacatcacctttatgatatgaatgtgcctgcaacagagtcccatgcttactgtcccaaaattgtacactaccagtactatccgcacttacaagtgtcccagacctggtgtcaacaaatcaccacataagcaatgtagtcgcatgatgattaccattttcgaaaaataaatgatgattcaacgtaatagatacctcaatgaaagtaatgaccacacacaaagatcgggtccactgcccaaacctcctagtccaactgtaatcctataaatttcatgacccaatattggattccagcatcttataaacctgagggaaagaaaaaaaccaatattgagacaattattactgtttaaggctttaaagcaccttcacatatgtagtgaaacatgaatacgaagtaggcatgcagaagaagaaactcaagtaaatgaacattcatacgcacccatcactgcttcccgcaaatatccttttagcatcaggactccatgtcacgcttaaaattcgtcctgaaaataacaatttcaacatgtcatcaaaataaagtccatattaaatttatccttctctcctcccaggaagaagaacaagcgtacggagcaatcaaataaaaatttgagagcaagaatggcgatagagagtagatatctcaccactgaccctgggcaacgttttagtgtaaataagtttatcttcaataacactgtatattcgcacacaaccatcatcacaagctaatgctacccgtggattctcaataactgactgcacatgaagctcagcagaatctgagtcatcttcactatcactactttcctcatttaagttattacttaaatatccatttcctaaatgctgcgtccccggctctgtattttgattacagggagccgcagacatctgccatattgacacgcctgttgaatctaaaagagtctgcgaattcaagttatttcagtcaaacatcagggtttaaaacactttgaactagaataacacaaactacatagttcaggaaacgttctataataaaagaagcaactgaacctttttcttgaggagggaaatatcccactcggaaactgagccatcaatgctagacgataatagccggccacaaggcaagtcctttgagccaccccgacaccacacaagcgacgagactcttgaatcagggtcgccatgaacagtctacccacaagaagaaggattgaaaaagaacccaaaaagaaaattagaagctacaattaaatgaaatatatatacaaatataagcatgtatatcttcatgtatgttcttttgtgggtttgtaccagctgacagtgccagccaacagagccgggtgagacgagccaaatctcaagagatccgtcctcgcgagctgcagcaacctgagagtcgtcgacgctggtggctagggctactactggagatggcttccaatcaattgtgctgttcctgtaataataagcttcaaccatgtcgataccctaagaagtaaaagtggctccgatttgagtcgattcgactacgaagcttagtgtgagatgagagagcatccgaagagaacaacagctaagacagtggaattgagaagaggcggtgtgaagtgtgaagtgtgaagtcaggttaggtttttgagggtttaagcgcggcgctattaattgaagtaccctatcagtttctttctgcaatttactcaatgggccgaatctttattttttaaataaatactaaagccctttagaaattgggcccctttttctcttttgggctttttaattattgttgcacacaattggagttgggaaaattacatgaaatatgggatttcataacaaagttagaaaaatatggc

SEQ ID NO: 110782 - DNA, 6608 bp, Cannabis sativa
  modified_base (202)..(210): a, c, t, g, unknown or other
gtaaaatagaatttacttgtgatgtgttggaaaaagggaattgacaaatcaatgttggtattagaatttttgccagcataaaataaaaagcgctgacaaaaatcacttttcccaacacgcaaatgtgttggtaaaagttagattttagccactgttaatatacactggtaaaactttgacttctttgccagcgcagtttgcnnnnnnnnntggtaaaagttacttttaccatcgcagtaacgaattgtgctagtaaaaatgacatttcttgtagtgatcaatctgacctaaagtgcatgattgcctataaataatcattgtatcaccaaaataaaattgaaacttaggatttcaaagagcaaaaactctacaaatttataaactccattgttaccaaaagctaaaaagctcaatatatatagtaatttggggactaagacttattaagagtctaatcatataaaaaatacatgtctctaatctttcatttctttctaatctagctctaaatctcaataatatttagtttctaaaaaacttaatcatataggataaccattgaaagatatcatgctatccatgataaccttggcatgtagtggaaaaaccaaccactctccaccaagtgagtgatgttgtaacgctagggttgtatatacaggttttgatttttgatgtggcacgaaacttgtacgaggttgggaggtacgagcacgagttgacccaaattaattaaatgtaagtttgggtatgacaccgtgcaatattacaattgtacgatctaatacgaaaaatgtgagcttaagtatgacacaacacaataattctaatagacatgattacacttaagctcgaagattagatgaatatttaagttctaatcattataattattttttttatataatcatatataattattattgaaaaattgtaattaaaactatgaaaatatttaactcattgctataataaaagtatgaaaatgcatgtgcaacacgaatttgagtacgcgcgcagaagataattgactgacttattcaataaaaaaaagaccaatcaatctaattaaaagtacaaattcgagcacaacataaaatatcgggattatggattgtattgggtcgaatctgccctatattagtacaacatgatagaactcatatttatttatgacccagaataatacaaactataactttacaatttttttaaatacagacagaactaacacgacacacatatatttacagctctgtttagtaccaatgtgctgaaatatgttaatttgacactaaattgagctgagctctcaaatttgtgtgttttgcttatcctagtcagcagcatagccaaaatggaatcatcatcatcatcatcattgattcaatgatcaatattcacatgggtaagccactaaggttagcttagtggtgagagaggggtgggaaaaagggagaggtcatgggttcgaacctaggaccttaaagctattaagctattagcgaattgtaaaataccattacgctacactcaaaaaaaaatattcacatgggtaaatttgtcattttcaccatctccataaatataaaataaaataataaaaaaaaaaggttcctttcttgagatagagattctattccattgtatcatgtataaaacatttcttgtggattttgttttggaatatatataatgaatgcactgtcgtgaaggtgtttgtttgtgtatattctttgtttgttccatccatccataatcatcatcttacaaaaatatacatatataaattggaagctggggtgggataattattgatcaaaacattaattctgtttgtttcttgggaaaataacaaacataaaaatggagtacaactgccttttgttgcttcagcaaattttagttgttttattaagtggggtgtttttttggagacttaccaaatatatgtggagcttcacaaagatggagaaagaaccaattacagtacttgttactggtgctgcaggcatgttcattgttcaattcaaacctatatatatatatattatatattttacatgaatttaattttctaatatattatgatttctcttatgtttttgtttattttttcacaattatgatcaatagtattggccatacattcatgcatatttagatgtagcattcattattaattagggttgtttatatgagtttgatccatttcgattttactttttattgcgcttttttaaaaaattaaaactaaacaaactatttaaatgctcaaacatttaagaacaaattggtatatagtttttatttataaaattatatttcaaacttctaaaattacaaaaatatactttaatgttcagcaaaaataagaaaacaatttaaaaacaatcgaaaattaatctaaaaaatctagtttaatttgaaccactagcgagaattctaaaactgtaagcaaaaatcataaacaattttttttgactaaactatatatcatatatatatagattagttggagtttgaaactacgtaaaaatgcaacataaaaataacatcgaaattaaacatatcgttgttgatttacaattttgaaactttgatcaacaggacagatcgggtatgctatagttccaatgatagcaaggggagccatgcttggtcctgatcagcctgtgatcttgcacttgcttgatatttctcttgaagctttgaaaggtgttaaaatggagttaattgatgctgcttttcccctacttaagggtaatgcttttatgttctgttcggttaagtttctactaaaattttgactttttatttatttctgtttggataattattataaaacttacactaaatggggtttttgtttacttttgttattcgtttttcataggtgttgttgcgactactgatgttgttgaagcttgtaacgatgttgatattgctattatgatcggaggaatcccgcgaaaagaaggtatggaaagaaaagacgttatatctaaaaacgtatcgatttacaaggctcaagcttcagcattagaagaacatgctgctccagattgcaaggttctaataaaactctttgattacattttgaatcttatattttataaaagttactgattgaatcatctgtttgttaaataacaaattaggccgcgtattatttaaattagtacaaaatagtactctgaattatttttttatcgaaataaaatttaataataacatgatctagatgtattaaggtaaccagttacatcatactatttttttcctatatttttaacatttttagattaaaaaaaaaattgaaagaagaaaaaaccatatttttcgtaaattgtttgccataaaaaccataataacaaaaattctcgaaattattttgtgttttcatctttcgaaatttcatttcaagatcatagaaaaccatatcacttgccattattattttaatctaatgttgtttcataccatacactaaacaggttttagtaatagcaaatccagcaaacactaatgccctaatcttgaaagaatttgctccttcaatcccagaaaagaacattacttgtctcacaagattagatcataacagagcattaggtcaaatctcagagaaattacatgttcatgttagtgatgtgaagaatgttattatatggggcaatcattcttcaactcaatatcctgatcccaatcatgccattgtcaacacttgtagtggagaaaaacatgtcaaagaacttgtacatgatgatcattggtagggctcaaattatctatcttaacaaaaatattctatacaaagttttctttcactaaaatgacttgtttttgtgttttgtaggttgcaaacggatttcatcaacaccgtgcagcagcgaggcgcggcgattataaaggctaggaagcaatcgagtgcactgtctgctgcgagttctgcttgtgatcatatacgtgattgggttctgggaactcctaaggtttgtgttacataattagctaggtgtatattcatttgatactctgtgtttttaataatacttaactgggatcttatattttgaaatcgtatatatttagtattctaaactcaaattaaaatcgataaaattttatctataattaagaacaatttggtcaaattgattagatttgattttagaatatcaagtaagtaccttttcaaaatcaaaggatattaaacttgttttcggaaaaaacatagggtaccaaataagtatattaagactaattaggatttttacctctcgaatttcgacatataccaaatcatgtctcatgaatgtttaaggtcattaaaaatttcatttgaattattgagattgtttgatttaaggactttagtcaaattttagtgcggaaagtctaacataaatcaaagttctaggcacaatttggtacatgtcaaagtttgaaggcataatttggtagatatcaaagtctagggagcataatttaatacatagacaatcactgaatcgccaactcatactagatctagttgcattttattgtaattggagttatcccccaataaatttgactttcattttttttgtttccgaagtaacccaccatatatgatgtaaagcgaatccgaatatctaaaaactttcttttcattttatattgaaaaatcacatctgggttttcgttcataaaaacaaaaattaagttaaaatttgaactgttaactattgattgtgaattcataaacgattcgtgaatttgaatctaaaattgtgcgggtcttttgtcgaaatggaatggccttactctttctttttctttctttaatctttaaaggttgaaaatgaaacatagacaatcactgaattagtaaaattgaatgaaattagataaaacgcctttaatttcaataatctcgatagtttaggaaaattgttaacaacaaaaaaagtttaaaaaacataatttggtacatgtcaaagcaaaatttttaattaacttatattctttacatttgtttttttttatggaaacttgtaaattcttgtaataataatgagtaatgagttgtttgttggatttggttgaatttaatataatttagggcacatgggtttcaatgggagtgtattctgatggttcttatggggtccaacctggtcttatttactcgtttcctgttacatgtcaaaaaggagaatggtctattgtccaaggtatatagctattttttttttgttttcaattcaagtctttttggtaaaagtaaattttaattttgggaaatttactatattgaatttggtttcattaaatgttgtagggctgaagattgatgagttttctcgagaaaaaatggatgaaactgcaaaagaacttgttgaggagaaatcattagcttattcatatctcaattgatgtcattcatttgtttttatccatagaaaataagagaatagccaaaatcatttggtcctcaatatctctaatctttatctataacacatctatttctattaattatataaaaaatatatatattataaataaacaaagtatttaattattaataaaataaataagtatttggtagaagattaatgtatacacaagaattatagcaccaattgtttgccatgttttcataagtaccaaatgctatattaattttttttttaggtgtaacaattatcacccaaaaagtttaattagagacataaattccactaattctaaaaaaaaaattgactaatttgtttttagagaactttgatttatattaaattatgcttttaaattttttaaactgttacaaattattcctaaactattaaaattattggataaaataaattgtctaactactgaaagtttgacgtgaatgaaagttcaataaacttaatttaatacttgatagaatttggagagaacgatttaataaatattaaaattcagaaagtacgatttaatacttaaacaattacgaaattaatcaaattgaacgaaattagacacattcttacattcaataattttgaagacaaaatttgatacaggaagcaaaaattttaattagtcaaaagaaattatgctaattgctgaaacaaaatattgccccaaataatcttgggaaaaaacataaagaagccaaatacaaaatttataaattatgtagctcaattcagtcaaagatctcaaaatacaaaagaaaaatgttcatacaacaaaatataatctttaaactttaacaactattttatctgcacataatttatgattaacatggagtacaaaccagttcagttcagtaaagacaaaaaaacatcatattacatctccaaaaaaaaaatgaaattgcaaaacaaatttgcatatattatgggatttatagctttcttttgttgttgttcttttttttttcccttagaacaataaataatctaaaaaataataaagattgaatttttttcatctctagcagttgattccacacaactcaacatctgggccggtaactcgggttgtaaacgggtcaacccgaacccacaataaggagaagattgaagcaagtagaacagaccaaaccacaacaatggtgggag

SEQ ID NO: 110783 - DNA, 7737 bp, Cannabis sativa
  modified_base (108)..(120): a, c, t, g, unknown or other
agaattcatacattctatacatataatcatgaaataaatcatgtgaaccatgtaacatgaaatgttatttctgatctttattcatatgtaaatctgattatattgaannnnnnnnnnnnnagggcacaaaacccaacatatacagtagacgccaatcgtgatcctgaattggaagactgctcagaacttcagcaacttctacacggtctttgtccaacacagattgagctggtctacctgtgagcattgataaatgttagcatttttaaaaggacaaaaaaacaatagtcaagtgcaaaggcttgcgatgtacgaggtcagcgattgaagcccgtggcatttcaaatgtataaaacctctttgactttcaatcccccatattgaaaatagtgccttctaccccgttgacctcagagttggcccatttactgaagtagtgtaagccattgtcatgaccaacattttttataccataaaagtaactaaaatcctcaacttttagttcccctcgcgtgtattccatgtacattgcgtaaaatccaagaattatgcgataattgttgggtgtaagttagaagggagagacgtcatatcgaaaaggtggaaaggaagcatcacactgcagcgaagaatgggaattgaaaccactacattttgggtcgagataataccagaattagtgaacgggaggtgaggtcattgcattgacatgggttttgaagttgtaatatggattaaattcagtctttcaaatgtttttagatcatactttttaacttgcaagactaggtcctcgcaggaaaaaggttcgtctaacagggcattatccactaaatctatttcaatctcttcattgcccacatcatctttgacctcgcaagtggatagtttgaagtccttgcccatctcttcgacctccacgtctgggaaatttggagataagcaaaactacctttgagtagacactgtggattcacttcccccacatctctatagtgaccggtcctgctaattcttgtaccatgcaatctatcttgctggtagatagggagccttctcaagctcttgccataggaatctcctcatctgacagcgacatggggataaacatattctttgacattcaataacaatactcccatctctagaatggtacctttggctgtacgataggttgctcatctaaaagatagaagatcttttttctgcgggatgtgaatgcaatgtaaataaaaaagtgttctcacccaaacaacaaaacttttagtgtgacaaaactagcgactatctcaaaaagtgtttgggagtttccaagtatcttaagggtcatgcgagagcataaacattaggttaatgggacaccaccactttgagactcagttagtcctaatcatgatttgaatgcatatgtataaaagtaaaacgaccaactccaaggatgaatggagtggttgggggtctcgtagtgacctaagggttacccagagaagtaaatattaagtctctacgaaaccccaaccactaccaaattttgacttggaggtaaataaactaattaactatgcgggtgtgcgaaggttctacaatgaagatgcgattattcaaaatttcattgcaaaaacccgcgagtattaaaattttgggcaattattttttggggaaaatattgtattgtgcctaaatttttgattctctcaataaaccctatttttttcatacaatttctacacctaaaacccagaatgcatgcaaattttgaagaaaataataattacataaaaggaagaccctaatcttcaacataattacttcatagattgctcttgaagatattcaagcccttgaagttgtcttcaatctgtaagaatttgagactttagagaagtccttaaaagtttaaatttatgggtagagggattgaagtaggaaaatgaataagaattgatttatatctgtgggggttaaatactaatactcctcattcactgggatgctgacacgtggcaagagaatgcctaaggtgtcccaatccaacggtctctaaagaatacgcctgcacttaccccaaagggtcttgatgatgtggcatctcggagaaataaaataataattacagtcgtcttttcaaaaccctcaacacgtcaaccaaaagtcaccatctcatgacaacaactcacctccctctctctgatagtttccctaatgatacaattgtcagtcgcgaaactaggggcatgtgttctagtgcaatatcttttcctagaaactcgagatcagcctcctataaaattgacacgtgaatccaatcctcaagggatgaatgagctgttaattaatgactgtccaagagttgaccttgcttgaaccaaactcgcgagatgatgcggccttgacagggtctagtcgcatactatgccttgcataagataagccggaccgagagggattaatacaaatcacacatatatcgaaacacatgcgatgactaagtagccttctcctgcgactaagtaaagatagcttctttacataatgattggtccaaatgacaaaatgtgttcgatgactcagtagggacttgcatgtctcatgttgtcaacacacaaaaggtccgtcaatgcaactcagatagaacaaagacatcctagtgaaaggctcattaacccttttaagaatatagaacgcacctaaagtctacgagcttgtgcaagaatattaacagacaactcgcaccctacaggtcgcatatgatgttgcacttattagaacgaattaaattgttcttcatttattcttttacgtttattaatattgttatttattgtaaaacgattctataactagttagtaatgactaaaaggacacttgctttctaaataaaggcgagtgatccaagatgaatagacgaaacaaaaattatttgcaacaagggactatgtagaccgtgatctgactgaaccactatattcccttgtgttcattttatttttctagttgttcaattatcttgacaatttcctttgaatactcgctattctaagtaaagtatttgctatttttcttttatttatttactgtagcatacgttttggtgttgttcaaattcctccaacaacattatccaaacaagcttctgtgaaaaagaaaaaatgtaaaattatttaaacccaacttataaatagcacacaaaaagagactttaaaatttctgaaaacaacgtgctcttcactccaattagcaacaccttgtacaacattctaaaagaaagtataataaagacacgatgttgatttgtctaggtatgaaaatgaggtggaagaaagcacagactaaatatataattttatcgaacacgatcccttgggctatcatcaaattgaaatagtaatactacagtaatgatcttctgttattcttatcatatcacaatttggcaaattactgaagttcagtcttacataatttaatttatatatacacattgtctatgttacttgtgaagaggccaatttacatctcagacttaatatatgctacctttggtctttcaaagtgcatacactgtcttatactcactatttagtatatcagtatcagacattattgtaactgaccatgattgtggtgactgactattattagtcattgatctcttaaggcttctcctcaatttggaagattgtagcctgtttactatgacccaataacacatagttcccagtgttgttgccataattactgttcctataccagttacgccaatggctaataatctatgatgttctcccacaacaatatatgacagtgctaaaaatgccactgacaccataacacaagccaaccacatcagcttgtttatgattgccatgagtttcttttttgattttctctctacaacaacaactgaggtttggacaatcacaacagctagtgataggaagagagcaaatgagtcaaatatgaagaagatgatgaattcaattctgggaccaacaaggacttcaccagttgagaggtttggagttaattttgaagcatcaacagggtacaggccagggacttggaagatagcagcaaaggcaacggtggctatgagaacagcaacaaccgtggttgagttgatcgcgttgttgaggccttctaagtgcattttgttgagtcgtttaaccattcctcgtacttgttttcgtgtctggcgtgtatgctcaagttggtgatgtacttcatgtttgattacactgacagtttgtttcagttctcgggatcttgttgaacttagtggtctaatgaatttggcgctttgaatgccatgttctcttaggacagcagcaatctctggctgtccatttcgatcagcagtgtcaagtacactttcgccatctttgttaatgacagtcgtgtccactcccttgtgatttagcagcagctgaacaatctgtaagaagtttaacgttaataaggtactctatactacagtgtttctggctactaaaaatccatatttagacttaatcagatatgtctttgttgcaactaatttcctagttctagtttccccatgttttgtaaaaaatagtatatgtattttactatacacctccttgtttcttttttctaagcttttggtttggtttaaataatccatattaagaatgctactctgttaagaaattattgaaagcaggccattttcaatgttacgttggaaaaaggtccattttcacaagttgtatcattcaattcaatgcactaaataaactccaaattaaatatattctcttttgagatgacaaatcaacaaaaataaaactatgatcacctcagctcgaccctttcgggtagctatatgcaaggaagtgttgcccttagcatcaaccatgtttatcaaagaatgatttgccttcaacatttcagtcaccagctcaacgttatgtcccttaactgccatatgaagagcagtctgccctttcttatcaattttcacagcaattccagactctttactcaacagagctttgacaaccaacaaatgcccattccttgccgcagaatgcagtgcggttttgcagttgcttctcgttatgttggccaggctgccaaaactatccaagaggtaattaaccacatcaacatggccttgtgcagcagcagtatgcaaagctgttgtgtttgtcagatcaacagtcattgcgagttctgggagagcctccattaacacctttaacacccctgaatcagaagttcgttatacaaacaacaatgagctcaatccagaaaaattcatgacaatacatctataataaagaaacaaaatagtatcttttggtaattcattgaaagaagacattcaagacaaaaattctcagcatctgcggggaatccggaatgtcattttcaaaaaatcatcaaaagaggactttttttttaaaaaaaagatagtgccatcaattactcaaaactttatgctaatagccactggaatttacctaaattcccttgtttagtagctacatgaaatgcatcgaagccattcctagctctggtaccagctgtatcaatgtcatagtgctttatcatgtcttccaccatatcaacatacccatactcagaggccacataaagaggggtttcgcaagcatgattctgctttgctaatatttcctttaattctacctcctcactagtctttgagattatttccagaaccagttcacgatttcctgatcttgcagccaaatgcaagggagtgtctcctctctctcctgctgacctttttaccatcttctttttcttattagatgttctgagtttgttgctccaacagaagaagttgataaaaacaaacacaaggaaaatatataaaggaggaactttcctttccaacctttgagaatatggataaatcttttctggatttaaaaataatccctttattctatctatgtaaggcccggatcaaaactcaaccatggctgcctaccaaagatttcaactcgtgaacaaaatggatgatgagataactgagttgattccaaggttgagcacgtggaagcctcttcttttgattccttgattccatataataccctgacatgttctgtacccaaaatttaagtattaaaaaaacataacccacttggtgtcttcaatatataaataattgaatccacccccacttcgtcttaaagattcaaccttgtttctcagtcaatcattttgaaagagagaaggggataagaagaatagaaaagggtcaagacttctacaattgtaggaaatatgtgtatctaactaactaactaatcaaaaggcaaggactatgaggaattgaaaattacccaatacgtctatttattccaacaaactacaaaaatagctaaagggtcactttgctaatttcaacgaatcggatcagtaattttatagatcaataatagctaatgatgctcatttcaatagtaaagtggttgaggttcacagaaaagactcacctatttgaattcccagatgctcagaaagagagtgaagaggagatatagtgtgaaatttgattatgtgcgcctacatattgagtgaagggtcaagctcataaaagttatgaaacacactttatgaaaaagggttacgtgaaagaaagtaagactaaaccaatggaaaaggtcaccacgaaatccaggtaacgacaatagcaaatatatatatatatattaataagttttgatgggaagtacacgcggcattgtaggattcttataacagtggctacagtaactgtgtgtgaaactttgaaatgtgaatatgaaatgatgtgaataatagtactgtaaagtttggaccacaatttatttctgaatggagtcactaacttaagacctcactcaactagttgtatggctgaaagaactgttactgtggtcagcatggtggtggttgttgaggaatattacacttaatagagtgctacaacaaatactcaaaatacaattaattagtgatactgaaaataaattacatatataacgagtagattacatctcaaaacacgtatataagatccaagaacaaagagtaggtacaaaggattaaacaacgtttttaaacctttatcctaaaatacatttccacctacacataacctttagaaaaactcaagaaacgctcctatttatcaagcggacatgcatactctagtgtctaaggatgacatgtcctcacaaatttctaacttacaagaaagaaaaatggtaactatttataaagttcacttttatttgcgcttgaagagttccacaaaagtcttggctattatcaatgattaattggggcttatggaccaaaatgaataatttgggggttatatgatctgttggaaccgatcattaacgttcaaaagctaaaaaaatcgtttgttgaaattggctaagcattatagcaccaacattaggcactatatcacctacacttgctgccaaaacatttccccattttgtttattttcaattgtactagaaattaggagggttcatcaaaccgctcaaacaacctgctctacaaaaaaaaaaaaatacggtttgaaattctttgcggtgcggtcgcgatttaaatttttcttaaaccacgcggcgtgtcacgggctcaccttttcaggcagcagaacacccgtgcggcaccttgacatctgtaagccaaggtcagccttccaaccattcgagtaacaatgggctcatttttcgcgc

SEQ ID NO: 110784 - DNA, 6194 bp, Cannabis sativa
  modified_base (6138)..(6151): a, c, t, g, unknown or other
ggaaaggacattttattggaatgatattccaatactttaaaatgcaaccaaacaaaagaatagaatgaaaattgttttcttttcatttcattctattttattacctccaatatttagttatgttattaaagggctagaagaactgtgaaatacctgaagagcttggcaacgttggatcttagctgcaaattcattatttagagaaatcccatcaaagttagttgcgctttcatttctggaaatcctcgaagtctcaaataactaacttttcggtgaatcccgtcattgttttccggtatggtgagtctaatttcggctgatttctcttacaaaaacttgactggtccagccccgaatagggaaaagtctgggaaactctggtttgtgcagataacactctaaagttgaagggatgaacctcaacctcaatctcaatctcattctcaaactatgtagctcaacaacaaacaaaaactaaacagcatcttttggtttctatctggcttgttgggttgcctgtttggatttctcttgctttcttatttctgctcgccctcttcggtttgaaggggctatttacagcaaaaagaaataaagaaaaacaacagcaaacaaaacaacacatattcttattgggaatcttagccgagattgtctgattattgtactggcagattgttttttgacggttgcaggggtacatggcaccaggtaaatttctttgacgaatcctagttaaagtttattctttttatactatatatgcgtaacataagaattgactatacccaatttgttttacaaatccttgttagagttatttttccaatacaagcataagcatttacaatacccaactatgttccaatctaattaagggaagagttttgaacttctagctagctgtacatatatatatatatatatatatatatatatattattgttgatgtaagcaagtcttttgagcaattttagtttgcctccccaaccataccataaggatattgacgattatagacattgtcttcttgttttgatttggatttactatgttggcggatggaatttcttattgtttgcagttgcttttagattgtatgatttaagagacacaggatatattaattcttataaaacttgagcttgatgtttaaccttaatgtcaggggccaaacttgcatttgtaaatctatcattgcccagaaaacttttgtaatctaaccttataagcagcagcaggcaaagagaggtactatcccaagaagctagttcataagcaatgctggaactggattagtatatcagattgtggagatgtggatgggaagtgtaacgagataattgatatgataaaagtgtaatttgtccctgcatcagaaatgttggcgcatattccaatcctgctcaactctcggacagttagagaatgacagactcccatcatgtaggattcatgtggactggctttgacatctgtaattaatgattgatatgtaaagtgtttttgtttatagtcaacagtgagattgtttaggtttgtgtacagtgtttacatatatgtcatgtgattacgtaaagaaaagccaaaattggtctatatttgtatatttataatcattgtatattgctacctaaatgcaagtgaccacgataactgaatcaatgaattacatgacaaattgatccacaggacaaatagtttacagcttagttgacctaggaaatcataacaaaattaaaaatatgaattatgaaataggctttttcaatttcaatatggaaaagccaaaacataaaagtgtataataaatgtttgcaatataattgtattttttgagtagcttccatcctcagcctacaaaaatcagttcacaataataatggaagacccaatacataggtgctaaagtactacacaagttttttgtttttgtccaaaaaaaaaaaaaaagtgctacatttaaggtaaattaataataatatgttattatgacacaataaataaatgcgtttaaatggctgttactaaacagagccctttcaagagattagacattttaagtcggattagacacattctaataccattttttttttcaaaaaaaaccatccaacgtaactcactaaactttttaggctgcttaggagttttatcctttaaagctattgtaattaccaaatcatgtcctctatttttttttttactttaaaaaattttctctgaccgagccaacacataacacatgtaaaaatgtaaagaattatttatttttaattattttttgcttgcaattttaaaaaaatttataaaagtggctatgacactcgccatcccttaactctgtcattgtttacaactgaaataaataaattttttacgtttcattccaaatgtctaataaagtgatgatgtagttgatgtgttattgccgcgctacatcaactaattaaataaaattaattttaaaattaaaaaaaattattttcttattaacaattaataaaaaaatttaaaagaaatttaattttatttattgaaagttaataaaaaatatatatatatatataaattttaaattacacaatgacacattaatatcactattttataagccatataaaacttaacaaaaatcataaacagcgaaactttttatcaaatacaacattgggacaaaggaataattaaggaaacttaataaaaaaaataccttgcattaaagtagattcataagggaaaatgagctagctgaggatggtactggaatcagtctcaaccgaaaaaaaaaaaaaacagtatttaaaggccaaagtgtttattatatttagaaaaacgtttcaaaattattccttgtttttttttttaaaaaaacgtttctaagttatcttataaataatttaataagctatcttcaaattcctacatatcaccacctaatccctctagaaactataataaagttcctaaccacgtttaggccatttcacatgaaaagctcaagacgagttctatttaacctatatatctacaatactatttgtcgtgtcttaaggaaaaagtttttcctttttactctgtcaatcatttatggttgtctagataagatgacaccaaattcttattacttaagaatacattattattattattattattattattattttaaataaacctaactagggatatatttatcgtcatgaataattaatatgcatgctgccatatatgtcattattgtgaaattatatatgttacaaaatgtttggccacacctacacccacaccttaattaatatatacatatcagccaactttctttttctttcagttatatcattgttttattttattaaatttttaattttccttttctttttggaatatatatataaattttgattggctcctaatatccaacctaacaactagaaggtaaagtgcttccaaacaatgtcaatcatggccatagatctgttttattaatctttttggccatgcctcctaatcaatccaatagccaataggtagtttattaaaggattcatctaatttatcaagtacacaaaaagaaaacttgggtttcaaagaaacttaattaccaaaacaaaaattaaatcattttaaataatgctttgtaatagcctttagttaaatagctttgatattggtagcctattggtatatagcattttgatcttaaagaataaacttatattctctacatttggcatttctttttttattaagcttaaactcttttccacaccatttttaaatgattgcattattttttttaacaccttatgatattttcacttcttttacttttacttttaaggcggtagataaatttttataaaccgcctaacttttataacttgcccaaattaaattgaaataacttacaaaaaatactaactataaaacccgacaaaaatataatatgtccaattttttatattgggcaggttaaaaataatgcaaacctgtacaatcaacccaaactaacccgaccaacccgattaaaagattttttttttaattgatttgaactttgaatttataatctatacatatttatcttattattataattaactaaaatataacaattgaatataaaaataaaataaaaattaaaaaaaatattagtggtcagtttggacgggttaatccgactaaattgaccaattttattggacgagttactatttacttttttaattgtgtatattacacttaaatttttgtaactcaatcttgatattagattaaataaaatgtagtataaactgactactggaagacctacattctttaaactctttctccttttctctactacaaaaacataatatattgcccaatgcccaccattaagataaagctccgtagctatcatttcaatttaatataagaattaatatactgatcatgtatattctaatcattgcccatgcttaaattttgtatctttatatattcattgattgcatgattagtaataattaatttattacgtaatgtatgattcagccgacttcgcttttgatgatagtctatatatcatcatgcttaattagtactttatttatgtaaacaaattacacatatatgtaaggggaataatattcatttatctatttatttttcagaaatttagatgtattacgttctttcatgggcatttcattataattattattaataagaattcttagatgatgaactcatgaaaaatgtttatggagactcataattgctagcaataaaatgtttctaactgttcttgcttttaccatagccctcttgaccaaggagagaccgagagggttcagaggctgggataattaagttacaataattgttatttattagttattacatgttataaaaatttaatttttttattatttttaaaattgatatttacagttatttatttttaagtaatcattaatgggtattacccattaaaaagtgtttcaaatatattattgacgataaaaattcgtcaactatattaagcccaaaaaatcaaatataaaaacgaagttaaatatgattaactaaagtttcaaaaagataggtcaacttaacattaggagaatttcactaagggttgagtctatttgtcataagtttttagaattagtatgatcgttctacgtccccttatttttgtactaaggtagtagtgtgtcatatgaggatggcatattttacgagggagtggggagattttagtgtgagaaagaagtgaatatctaatttaaagtttataggcggcgtggagccttgcggatgagacatacactcaaccagctgacgaatgaccggataatgcacgaccaactgacgaacaactagctgacacacaactggttgaagaatgaccagctgacgaacaaccaactgatgcatgatcaactgaagaacaactagctgacgcacgaccagttggcaaacgactagctgtcgcacaaccaactaacacatgaccagcacatgtgaggcgcaagctggcgcatgggtaggctaacacgtgggcaggccaacgcgaggagcgtgcttggtctggtgagcgcgctgggcgcagggagcagggagcatacttggcccagggagtgcgcgagcacaaggagccttacgcgcggagatccttgtcgactcatcgctcctcatgttgaagccttctttgtacggtgatcttcgtgtgggacaatctgtgttttatgacttagtattttttggatagcttttcaagtattgattcacactcggactaaggattccaaaatttacacttggcaaattttgaggattaacacttgcctgctatagcttgcattaatacttgcccagactaaggactctaaaatttacacttagaaaattttgggggtcaacatttgcccctagtttataagaattctttcaagtgttcttatagactaagtttggtgagctttgccccatcgtttggtcccatgtcataatcctttgcgactatgaactacttcttaaacattatttgtagatccttctgttgggttttgtgctctaaataaaaccaaaatcaatataatcaaatttactaattaataagaaatcgcttttatgttgcatgnnnnnnnnnnnnnntttcatgattatatttaatgtatgaattctattaagtccaaaa

SEQ ID NO: 110785 - DNA, 4674 bp, Cannabis sativa
  modified_base (4644)..(4645): a, c, t, g, unknown or other
cactgcggctgaagccgtggctgccactgctcaagccgcagtagaaattgttaagctcactactacaactactactagtaatagtaggtgttggagtagtttcaatactagtaaagaacattattacgcggctatagtgattcaaaccgctttcagaggctacttggtaagtattagaaaatctcacattgataatgtgtaaaattttaatactatatataacactttgatttgtattttttataaagtgtaaaaatttaacactaaatatcatcttatatgtaaattcatttttgttgattttgtttttgaattatataaatatgtaaaggcaaggagagctttatgtgcacttaaaggacttgtaaagcttcaagcattaataagagggcaaaatgtgagaaaacaagcgaaattgacactgaaatgcatgcaagcgctcgttagggttcaagatcaagtgcgccatcaacgagcaaggctctcactcgagggacttcctacgagtactactcgtaggaaatcaatgttcgatgaaattaataataatagtttgttgtggaattcaaactacctcgaacatattcgaaatagggtttcattggtaagtaaattagtaatatatcataattggattgtttatattgcattatattataataattttatatactaattatgattatgattataatagtcaagagaaagaagtggtggtgtggaaaatgatgatgattgggatgattattattactaccctcaaactcaaattcaaattcaaaggaaggatgatattgaagaagctaataagctacaaaatcgaaaggaagcttctttcaaacgtgaaaaggctcttgcttatgctttctctcatcaggtttattcattatttatttttattttgagttaactaacttaattttaattgttttaaaaatataatatgaatatgtaaaagaaagaaatattaaaatttaagacatttttattttatatttaatatgaattaaagctaacaaataggaatagagggcattgtgactttaatgatatataatcttatgatatcatgtccaaaattcttaacaacttctttgtttttatgatctatttttaagctatgttttatagggattatttcaaaattcacaaagagaacaaaaaacaaattacaaaaattcgattatataaaattttaatgttttatgtttttttttatatataaaatatgattttttgatatatttgccttgttgtattgttctcctattacctaaatatgctttctctctccattttcatgcattttgaagtataaggtattcggaaaattagcccacattttgataattttgcaaaaataccatttcttacaaagtgaaatatcttttgttggctaatttagatatggagaaataggagaaacccatcttcagggaacgaagaagagttagaagagagaagtaaatggcttgaccgttggatggccacaaaacaatgggaaaacacaactgaacaacaacagagaagagacactaatatcataagaacaacacttgaactggacacttatggcccaaacattagaaaacaacaacaacttcataaagcccaacaaccaggcccacttctaagcccaaatattcctagcccagcagtcactccctctccctccaaactcaaactactacgtccctcaagcccaaggtactcgtcttcaaaagaagagagatgttactctgcggcgcacacaccaaacttcggtgtggtcgccacgtgtcgttacgggagtgtaccaaattacatggcgtcaactgagtcagcaattgccaagtcacgtgctcgcacactcagcgcaccaaaacaaagagaacaaataagaggaagtagtgggtgtggtactaatggttcggtaaggaaaagactatattacccttcagttatggatcaacaaaacgacgtcgttagtgaccagttgaggagccctagcttcaagagtttgcagaatgggttttgttactataatggaatggatcagaacaacttgaataattcttcttcttgttatgctgagagccttattggtagggaaagggataatgtttctgcatgttctactactgacctaaggtggttaaaatgaaagaaaaaataaatatgagggggtaaattgtgaacttttttttttatgttttggtaaattgtgttttaagattttgtattttgctaagtaggaaaaatttgtatttttctattgattttagtcatcataattttaaatataattttttatttttcttattcttggctacctatagtttttacttttatttttagataaaaaaaaaacattttgattctaatgttaaatggatatgtagtcctatatgtcaagcaaaactcatatgaagggtgtttgttatatgaaactagtattggagtgagttaatattatgttagaatttgaaactgtaggcaaaggtagattgaatgtgtgtatagtaatactactagggggtgggcaacatccaattcaattaaatcgcatcgatccaatctaatttaattataaaaaaattggataactaattataataggattggattggatgctaaaagttggattctaattggattggatcggttattggatgttaatctcaaaatttaattaaaaacgaatccaatccaattacatttatatatgtcaaaaagttatatatatttatttatataataaaaaatataaaaaaaatataatatatattaattatatttttattggattttctgtgtcaaatttgcaacacttgattgttttgtgtatttattttcatgatattttgtcctattttattactcaaaaaatgttgttttaagtatttgaaacttttagttggattacattgtaacgatgatatgtttatggagtattaaacttatataaagggtgatatttaatttttacatatttttctttatatttttatgttaatattaaaatctaagtgtgtaattggatatccaattagcaattagattagattagattggatcagatgatgaatttctaaatccaattactaattggattggatcgaatgcccacccctagtaatatggacaggtttccatctccaaactaattagtcatcagagtagtggtttaccaattttagattattcgatcacaagcgacttttcatagcttaccatacctaaatcacaagtggctcttttgactctactttctggatcaattttcaaattttcggtaactctttttggactttacttttttattttcaatcaacttttttttatcgaatataaaaggggtaattcatgtatcacatttatgatagttgtacccatttgtgaaatgtaatccgaacccatctcggaatattttttgccactactcacaatgagttcgtgctcctaagacgtgaatatgaagatttaattcgcgttgaatttggttaaaatggcccataattcaagaattgaaaatattcttcttttcaaggtaaattttaacaagttttttttcttactcttacactcgttagtattctattaaaatctcaccctacacatctcaaaaaattatgaaatttcacagagacgaagtcaagaccgttatgcatcaattttctattggataagttgacaaataaagtagttttcatgcactaacaatcattttaatcgaaatattgaaaatctcacatttctaatagtggtaccgctttgtgaaatgtggtccggacccatctcggaatattttttaccactagtcacaatgaattcgtactattaagaattgaatatgaacattggattcatgttaaatttggttaaaatggccccttaattaaaaaattgaaaaatattcttcttctcaaggtaaattttaagaagtttgttccctactcttacacttgttagtgttttgttaaaatcttaccgtacacatctccaaaacttatgaaatttcacaaggatgaagccaagaccgttgtgcatcacttttttattggacacgttgagagaaaaaataatgttcatgcactaacattcattttaatcgaaatagtgaaaatgtcacatttttgatagtagtatccttttgtgaaatgtggtccagacccatctcaaaatattttttgtcactagtcacaatgaattcgtactactaagtcgtaattttgatacaaaatctgagaagtgagtgtcaattatgctatagtgaaatagaactaaatttcgatataagacaagagtaccgatatggtttggatagcttttagagtttatgtgtttaatgctttgtacatatttaatttatacgagagtagaaaatttacatgtaatcaaggtatatatatatatttgagaagactataaattatataagtaaacctgctattgcatagaatttggtaatagtaatagaatcttattaaatcataatcaatagatgcaaattaaatcgaaagccctaacttttattcatcgttaatttccttcttaatttactgtttttattattttctagtttaattttctattaaattttatataaccaaatagaagtaaaaatttaattttaaagtacttaactacaatccttgtgggatnnacctcactctttgtgagtctataacttgt

SEQ ID NO: 110786 - DNA, 2171 bp, Cannabis sativa
accagtgacaaatttttggtctgtgggatcacaaccatcatcaacatcacaataagctcatagctacagagaagaggtattagaaggtagtaggaggctttaaagcatggtagccagaagataccacagaatgtgaagaacaacaatctagtgaacaatataaaccaaacagctaacaatagtgcgatactaagtaagatcttccaaatgagagccatcaaaacaagaatactaaacattcaaatcagagagtatcgaaaattctagtactagcaaggtgagcacgctcaataatgtcagcagtgtactttgactaagaaagaagataacctttatgagaaaaggaaactttaatacccaaaaaaaaaaaatatattacaaagaacccaaatccttcatctaaaattgagaagctaattctaactttaacacttcaattccctatgaactaatatctcctgtaataatcatatcatcaagatacaaggaaagcagaatacaacctgcaaatgtgcacttgacaaataaacttgaatcatgatcacttgagacaaaacaaagagagaaaataatagagaacttttgaaaccatgcccaggagcccttctaagaccataaggcctttttcagcatgtacgcctcctcatgtaagtcatcattcaaaaaggcattcgacatctatctgcatatactctaccggtgacctgatggtactgctataagactacgaacaataattatttttttcaacaggagcaaatatttcctcaaagtccatactatacagttgtgaaaatcctttagccactagtcgagccttgtagcattcagcagaccaatcaaacttagtcttgattttataaacccagcaagacctcatagcacatttactaaaataaaatagtactaaatcccatgtatgagtcttttaagggggtcaataaaagtccctctataggataaagacttagaaaaacaatgaatagatgaaataaaataaaagtagtcgaataagaagatcaaataaaagttggtaggtgaatacacttatgattgacactgaagatagcaaggagggtccgcaatcttaggatgatctagaatagctgcaggagaaggggtaggagcgatttcaggttgccaagtaccaatatctctatttcttgagatctttcaacatgatgcatgcgagagtaatgaagaggaaaggaactataagagcagtggatacccagacttagagaaaggatcaacgtgaataagatctgattttgtcgaatcgtgaggggtaccaggattagaaaagaaacgtaaatgctaaaaaaaactacatgataagatacatataatgtttgagaagttggatcaaaaaaacgatatctcttttacccataacaaagaaacacacaaagagcatagcgtgatgataactttgtaaactggtgcaaactttttttgttaccttgttcttttctaattctgtacgagtaaattgttcgacataactatttatccaagtatgaatttttgaattgcccacttcccaattttctaataaatctacactaccatttgtatgtttttttcttagtttcagaagcataactccacatcttttttcctttcagaaaatttttcatgacatgatctcaatataattctttccatctaatctcatattgatcgcctaaagggaatcatctttgttgctaggtgtaacgtgcgagctaagatgacacgttacaagctaagtgatgcccataaggtggccaagtggtggtcaagtagtgccgcatgttggtgtgcatgctggcagcatgctgatgcttagtttgtacgataatgacatttttgtaaatatcttcaatattgttcaattagggatgggacttggtattcgctatttatttggtctacgaatacaatggtgcaattggatttgagaaactctgtgatttgatatatggtgatgaacatatatttacaaagaaaaaatcatatatgttccttgtagaaggctaaaagcttagaatgctctttaaggtgagagtatacctggtgtcagctctccaccacccctggcacattggtgctaagtgagctactactagtcattgggactagactaatagggcaggaatatgaggaccatgaggggactcatatgtctc

SEQ ID NO: 110787 - DNA, 3165 bp, Cannabis sativa
ttatatggttggagcttattttttcaagtctaagttatcctccggagtgtatttaaaaagaatggttaaagtatttaaagagtaccattaaagatgttttaaatttctagccttaattcttaaatagcaaataaagttatttaattttatttctacaattgaaataatttatataatttcttagtttccttgtaaaaattcttactaaaacaatatgtgaagcgtttctaaactaaatccgagttcgtattaatgtcccaaaagattaaggggaattatcctatatattattttttttaatttttttttttaaaatttacggtttgaatttctaaagtggttgcagcgctagttgcagtaagggtttctatacgatttttttgttgcaatttaggttgtagcgctagttgcaataaaaaatgcaaaaaaaaaaaaattattttgaagtataaaaatgaaaaaaccccgaaaattaatttgactaagactcaatattatattaaatttaccaatgagaatgtagtatgtctaataacaatgtttgatcctctcaaaatacatgttctacactagtaaatttagtttggttaaaaatatgtgcctcagtgttatgttactctttttcaaaaattggagaaaggaaagaagaacaagtaagaaataacagcataatatttgaagtcatctgttatttggtcattttataatttagctgttaacaaagtcagtaaaatcacttaccgggagcaacataacactataggtgaaacttggattttacacaaaacaaaacaaaattaatgcaagcctttttctcaacttctcacaaattccaccctaaaccacataaacctctttcctgcacacgcaacaatacataaaaatatataaagatttacaagtttacaaagaatttcggtgcaactaaaatggacaatggcaaagctttaatctcgtgatggtttagatcatgtgggtggattaggaagggacacttttttctcccaatctcacttgcacagacaatttgaactcatagcgttgaaatggagctctctgaatctttcacccgaaatgaaggaaatcaccattagaacttctccatgtaggaaacttgtttaaagttagatctttccagttttaggaggctgttcacagagagatggaaacaatgctatcagactcaattcatctgcaatgttctgtgaatgaataattaacaaaaagggagaggaaaatggtacctttttcagagttattggagatgcattagaactactggatgatgctttatggttcattggtttcaaaatttcgaaagaacacactagacctttatctacactcagtagagcacctgcattgtcgaactccccaccatagtttggagctgaaaatattgtgactaatcttcgttttgcaaaaaactcatatccatcctctaccacctgaatcacatattaagagcttttcttagtctgaatgttttggattagagtaatcatcctactattaaatgatcatcgttatttatgcatcacgtctgcatttcctattattacctggtgacctctacaaatgagatcaagatcattcttctctaaaaaatcagcaactctgtcagctccaaacgtacaggaaacacctcgatcactgtctgcccagccctcaattgtactatcaggatcagaccaaagaagatcacagagaagaccacactctgggatttcagtaggcctttgaatttcttttatttggttgacattatgaagatctggagaaagccctccatgcatgcatagtatcttatcgtcgatgagtgctgccacaggcaagcagttgaagcagtcagtaaaaatcttccaaagtctgacattaaacctccttttacactcatcatagaaaccataaatacgattaatctttgcatcttcatgatttcctctcaagaggaaaattttgtcaggatatcttattttgtaggccaaaagcaaacatattgtctctagactttgtttgcctcgatccacatagtcaccaagaaagaggtagtttgcagcaggagggtatccgccatattcaaatagcctcaataaatccaggtattgtccatgtatatcacctgcaagatgaagcctggaacattagaatgatttaataagctgtgttaattaaatatagtgacagagaaaatgtgtaagctttttaacattgttattcttctactcatttccatatgagaatggtagaacccaaaacgacagctgaatgaactagtccaaaaacatacaagaagaaaaagttgcactctacacacaaaatcagaaataatccattttttggcctagtcttcgagcttccaacatgaccaacgcggaaaccttcatatcaatgaagaactatagcacaatatcccccgaagacaagatcatttggtcatccatatgcccagaaaccttgatctagttttctttacgaacccaatttggcaatttgtcaattgtcacgtcatcaaacccaaacatctagttttctcaaaagattcaccaaatttcaatccgatccaacaaaatttagatacccaattgccaattccactaatgttctttatccaagaccgtaatcatcaccaaatgatttaattcaatagactgtaattaaaggaaaaaataaaggcacgaatgagagagctaaccgcagattcgaataggagcatggagctcaagaagattgggctgagagaggaacacttggcgagcgttgacgcagagttgacgaatctctccctcggagagctgaacctgtttgcctcctcttccttctaatagcctccttagtatatcatccaatacccctctatccatcatgccctccattgcttcttcttcttcttcttccttgaaaatcgctcaaaccagaatcataacaagcgcaagaatttctatgatgagaaaaaaaaaaaaagaaaagaataaaagataaaaggataaatatgaaagatctgatgaagaaagctctgaattcaagagaggtggacgaaaaagctaattatggaaagagaaagctgttagacttttatttgggcttacattaagttttattggttttattaaaacttgggttgattggatagttctttgctgtgttagcccatgttgttggtga

SEQ ID NO: 110788 - DNA, 9461 bp, Cannabis sativa
  modified_base (9392)..(9425): a, c, t, g, unknown or other
attcatgtattgtacacagaaatattgttataattcaagggttttatcataaaatgcatattaggaagtgtttctaaacgtgtctttcataatttataatttgaatagctaaatagatagtaaagtaagtgtaatttgaataactcatctctagaggaaaacaacactaatacaattaatttttttttggtattaaatatgaggactttcaatcccgatttctaaagaaaaaatgggattaaaagtgggcttttatccaagtttttaaaaaaacaagtgggacaaaagagtacttttcatgaaaaccgggataaaagggtactttttatcccggttttatgataaaaaccgggataaaaggtattttcttatcccggttttttcaaagactttttatcccactgccatatatctcggtttttattttagcgaaaaccgggataaaaagccttaaaaactgggattaaaggcctgtttgtagtagtgattgacttattttataaatcaaatatatatgaaagaaatattctgacattatgtccttctagatatttattttacaaaatcctaagtctattatggacaattatttttttcttacataaactaagaattttatgaaaaaaaaaaaatcaaaaaaaggaaaaaatgttcttaatgttatttttacatactttggatatatgctacttttaagtgtcttaaagatagatacatacttatccgcttaataagaaagttttaattaagcttctttcttcgtgggtctgaggtgttctttgagaagtcatcaacatcaagttcaacaagaaaaccacctttttaggttctttgtcccttcaaatgctcaaataaattattaagcttcttcattcaaagtatatgtttctaacaaacaaaaacataagaaaaagatggaagctttgtttgttgataactttgatccaattcaagttacttacaacattaaaacaaaccttggttgggaagacccgactgtgcataacctaacaaaaacaactagaatacttgtaatagtgtaatccttttgaaaattgttgcttctttggtttctcctaagtaacatgtcatatataaatatattatatattagaaatatatttttacatataaaggaatctctatgtaatcagtctttttcaaaagcatcaaactcccagtcattgatctcctctgctgagtcacttctgccatcatttccctctgagtcaagttctgttaaattttccacagatttcactgttttcttttctctaatcagtgaagactgaattacatcatgtatgttttttgtggatggacttttactgttcacagaatttttatttggagtctcaatctttaatataggtctgtctatggattcaaacttatctcttaaggtatcaatggcatcaaaaagctcttttaccttgtcatcttctttcctgagaataatatcataattcaatttcattaaatgaaaggggactgagatttgtatgcatgacctgaagagcacaatatgtacctgaaaatgccttcagtttggacatagaattgtctctttatggtttccactacactgcttgtggttaaaaactgagaaaataagaccaaaaactaatcaagctttcatagaaaggacggttcacaaaacacaaacacaaaaaaaaaggacatgcatactttggcctcaatgtttacatattgctcttcaagatctttgtttggatttaatgatttttgacttttatcatcttcaccagatgataatttggatctgatagaagtcattagagtattagtaagagatgtaaaaataaaaacgtaacaaatatttcaaagaggaaaaaaaaaaaggaaattactcttgatttatacttaagctctccacaatttccttaattcgagtgatcaatgaccccagcatttcctaataatataacataggtatatcataagaaagttgaagaaacatattgtattgtggtatagactagaattatgtttggaaaataagattggattgaataacttttctcatgtgttttctatcttatggattccccatctccatgtacattaaatggtcagaaaattacaactttgtatccaccttattttcaacaaatagtcaacttattcaatcttctatgtttttgatcttatatttcttaacgcaatccattcatacttttcaatgatgtcccaagtgtatggtaactcaccttatatattgaaagaagatgcatgaccaaactcacaaaacggtctccacatttctccaattcaacccttcaatatatgaacaacaatgttatctataaacaaggaacttaaggatatcaaaacagctctatttatttgttatcacaaaactttagattcacatacatgacttgcttctctttttgatctgtatatgaggtctggagaacccaggtttcatccagaaacttgatccaagtatcgacaatatcagcttcttctctgtatgaagcaatggattttgatagctcatcgtcctgttatcaacccattgaataatatagccaaaataaatcaagaaggttttctaccatgacaagttaatctaatattcataacaattttaccttcgttttcaagtgtacaaggatttcattactggcttcatcaaattggtctctttcttctcttaaattatgaaggcgcatatgagcaccagccaatgaggtattaacctatataacaaatgattagagtattaaaaggtcaagtggaactcagagtgcagaaaaaatgacagagtctacttgttaacaattcgtgcatctatataagtaattcctttcctatgttaaaatccaaaaaccattattctaattctcgtcaatattaagatttattgaccataatcttcataaaatggccaacattaagattctaatacccactaatattttgttttatttgcaaataaaggttgtaaattttgcatcagtcgtttgacattaaatttctgtgacaatgccattcaatttaatttcttgtatatgtaagattgtatttttttttctattattacagcttcaacatgtggaagacattgcagatcaaaagtacttggttattatacatgatagaaatctgaaatttgatcatgatctcctaaagtgcattttaaacataaaaaatgtgacagaatgagcagaaaaaggtaaacctttttcagttcggcttcaagttcatctctttgtatctcaagttgtttgatctctgccaccatttcctaaatacaaaaataagttacagctaactacttaattcacctaaacaccagaagataatatatcttttgcatgggatttcctgctagttatttgacaaaagaacaatcattaagaattttgaggtagtaaatagcgcatgccttctcaatatgatgaacttcatctgatttagctacacgaaagctgagagcttcttctttatgagatctgcggaaaatatagagaaaatgaacactgaccaactaacatatgttcacgctgtaaaaactcaacacaaacacccacaactagccaagaacaaaaaaatatgaaagaaaacagcctcgggctaataaattcataatgtaatctataacaatagtactaaaaccccttttatactattctagatcaagatgactttgttagtttgtaaataaaccaagtcttggttagttttgaacgttattggctgcagtcaaaaactattttaccagctaactagactaagttagattaaacctgtgatccaaaatgcgtttttcagcttttgaggtagagttggctagtgattccaataatattttgagtttataaacctgcaatgcagcattaatttaatctctttagatccatggattgaattctatttcattaaggcattaaagagtagtggtatagcattgcatggattgaaaccttttcagcatgcatctctggagagtctccatttctcagtaacttctttttcagcaagagagcctctaaattgaaacatagttgaatttcagcaagtgcctacaagaaaacgagatctttaataagaagctaaagtatatcaaaatgtcacaggtaagataataagaaagaagatgaggtggcccactggttcagtttcaagagttgtttcaccatctttattgtttagattattaagcttttcctttatgctgcagacttcatcatcgattctgtgagttaaaaatgaaaatgttagacagtctcacgttgctaatgtgtggaaagataatagaataaataagatgaataggctacttctcccattgccaattggttttgagataaaactccattcactttatcccatgatgctcaacatggtatcagagagaaaaaaataaaacttctattttaagatggaaccccattcatcttatcccatgattctcaaatcccacaatatgacaaatgaatgaagaaacacaaactcatacatgaacataagaaactcaacattacctaagggttcttttcgctaactaatattttggaccatatgcccgagttgtcgttgctcttatattgtgttaaaatttacgatcttccacctcaaaattaatttagtgatgagggagaacaattaataatattttaaagtgtataaatatacttgtatctatttgatgtataacactccctaaactagagatatacgataagtaagcaccgtgcaatgtctgaatttattttcagtcctgcaatagcaccttgggcaaattggagcaattcttcacgttttatctgaataacagatataaataataaattaaagttttatacatgtatacatacacataaacatacgtatattctattttatgcataaaagaagagatgaataatcaccaaatttgcttaccaatacttcttcatggcaacctgagaaagcctcagacaagtcctgcactcttctcataacatcaatatgtacttctttccctcctgtgagacacagcctgtgtattacaaccacaaatatattgctaattaacccatttatctcaaacacatatattgtaataaggtcaaattgcttttcttttctacttctgcgaattattggttctttcgacttgtgacttttgaattttttcgaattgtaaattgtgacgtgatacttttaatagtagttaatttgctccccgaactattaagtcattcaactttttccatctaaatttatgttaaatcttttgcaatgtcaaaattttttaaacagtttttttatcaatattttacactgatctgactccaactcagactttagaaactgaaccaatacctggccctcgatttgcacccgccctgtaccaatttcgaaccagcttcggacccgacttaaataaaattaaaaaataaaaataaaatttagaaaacacatttttgttttttatttttaaaattaaaaaacaaaattagttaccgaatatatttttgttatttaaaaataaaatttttacttaaaaaatttaaaaacaaaagtgttacctaaaactaattaagtttaataaaataattagaggaacattaataaaagctatttgtaatataataataataataactagaaagtaagacaatttagagtagaggagagaaatcaaacccatataactccaaaagcagaggaacttcttcatcattgggtgcttcaagaatctggtcatacaaaagagtgaacctgcggttaaactccatggatcagcatatacaaaatgtactatttgtttttcctcataaaatttagattgatattataaacataaattaatgtagtgtattaattaccatggacagtgtgatgccttcaagagcttggctataaagaaaaacatcaagaaaatttctgggtacatctccatgagagtcaacataaagaaccaaagttggtctcttaggagaattatctttatcatcaaaagtattagtaggagaatcatgatgttgttcgcttgggctttcatcagaagtggctgatgataatttctcgacttctttaagagcaaccaaccaccttctcaataactgaactctttcaacccctctacatgaaacagacacttcttctaatctttttaccgtatgcttaaacccttgtagattcctcataccctgtacatcatcaatacatacacatatatttatattacataataacaaacacattaagctgagttatatgaaaataataagcttaatttttctcaaacattagtgataatggtaagatatcgtttaggacatggattttcagaaaaacacagcaaattattacaatgcgttcttggaggatcctggcgccaccagcaacggcattaccggcatggacaacaacggagtcagcatagctgcgcatggtgcgacggagctggttctgacctcctacctccgctgctctgttcaccgccgttcttaaccacgacatgtttttatctctcaagctatatatcttaatattgtagaataattgtatgttgtgatggcacaaaaactaaaacaaaatattaagagataagagttttttttagataattaaacaagtataatatattgattcatgattgctaagaatgaatcaaccaccttcctctcctctcctttctttttcttttcttttccttccttattttttgcctcttattacgctttattactcttcctaccattttcgcatgcaatatataatttataaatatatattaaaaaagaattagtaataccagtggcctgaaattattaagaaacaacaagagtcaatttttttttaaacaaaattcaaaaaattatgtttgaaaaccaaattttattatttatttattttcaataaaacaattataatgaaaatcataagacgtcccaacaaattaatgattgatatttattacaacgaaagggtgctaatatattagagttagcattgtgtctccccattgatgaattagagaggaagagatcaagatcgaaagagaagactagaaagaatatagtctcattagcatggaaggagaattacaaacttatatgcacaagccttaagctagaaggctgtaaccgaaaggtacagctgtacaagagaatgtaacaaacttacacaactaactaacccctaccactaacacaactaactttctttacactccccttcaaacttgaaatttgtacactcaccaatactaaatttgtgtctaaacatatcaaaacgagagctagaaatggccttagttagaccatcaacaacttggtctacagcatgtacatgattaacatgaactaactgttgcgagatcttttcatgaacaaactatacatctagctcgatatgtttagttcgagcatatagtacgggatttctagttaacaagacagtgttgagattgtcacaccaaattatacatctagctcgatatcttttcacgaactaggtggaagaggatgatacttttcatctacattggaagagagaatcacatatcacaatgcttcttgaagggaaagaagggaaattgctctctcagatcctagaactctagaggataaagacctcttctgtcgtggaagctaagaattttggataaaattctgctcttccagctgaggaataaataattgaccttctcctccatcttctaataatgtagattcagttctcgatacttccgtgccagctaatacttctgtttagccttgagtggctttacctttttgttttttttttcttgatttctagggaggagggtcccccttttttactgcgcaaagaaatattttacccttgtcgtggggcttttgaatatgtaaattttacctttgaataacttttatttattatatctattgtttcactttattaaatatttcgatacttaaatgaatttatctttggtaagttagtctacttttgaaatccccgaggctccagttttaacggcctaaactttaggattttaacttttatacttacaattttttgtgagttgtctacttttaggttccttgaggtcctggttcctgtgacctgggtcttgggctttttaacaacccttatctttagaaaattaaatgaaatttgcttactatcaactcgctgaggtttcggttccaaaggcttgaactttttatatttcatctctgtttattacatcgaagcctgaacttcttcacgatttgtcaacattgattgacatggtgaattattgattgcaagtgtggtaacataacgacttactcctggatctctgaagctcgagttccaatttcctgaaccttttgggcttcagtttatgtttatactcctatcttaattgatcaatttttacactaatttttagaggtaatacaccccccaagtgatctgagattttagactatttttcacttgttacagcacaactaaaaattataaaagactgtattttttctttgaaatttattctatttttttacttttccttccctattgcgtacatggaagagcaaagaaaataaaatgcaataagtataaatggatctggacaatcttaatttactgatagtatcggcgcaggtgattcgcgttccatgctcgtggaatcttagattcgtccaatcattttagttggtatgttccatcacacactttatgttatttcgtatggcccttctcagttaggtccgagaggaccccagtcttggctcctaagatgcaagaaacactcttctcaagaagaggtcaccaacttcaaacctttggcttttgatttttgagttgaagtgcaaggtgatctttcctttgtagaatttaagctgaagttgttattgcacccagagctcttcaattaaatcaagtgattcctaaagtaaagtattgttttgggtgggatcataagtctctcttctgttagatggtacgacgttttctattgggataactccatcacagtcgtaagacattaaatacggagtgtgccccgttgaagttctctctgttactcgctatacccaaatagctcatggaagctctttcgtccattgagccttgcaagcttgtacctttgttttaaactttgtcttcagaattttatctataggttttgcttgtccattttcctgtggtcttgccacgactgaaaaactttttataattccatgcttaacgcaaaaatcactaaattggtcactgtcaatttattttccattgtctgatacaatcttgtgtggaagtccataacaacatattatttttttgacgaaaaaatccaaggcctttttggaagtggctgtattcattggttcttcttcgacccacttggtgaagtaattgataccaaaaatggcatacttgttgggttttgtgccctnnnnnnnnnnnnnnnnnnnnnnnnnnnnnnnnnnaattaataaaagatcaaaaatcattttatgttgcat

SEQ ID NO: 110789 - DNA, 1639 bp, Cannabis sativa
ttttaaaaaaaaatatattttattgtatataattgtaaaaattttaaatatgtaatttttataaaaaaaattagatactttttcgaaaaaaaatatataaaatattttattttatttattaaaaaattaggtttccttccaaaaaataaaacaaaaaaaagtatttacacctaagtgggagccaagggcataggtcctcttagccccacccttcaattgccaatgtttttaaatttctcgatttctcgagttgcaaaagatcttcctccattcacatccaaattaatttatttagctcaaatcggtaatacttagaaagtatcaagcaatatgtacataaagtatctttttaaatgtggttgcagataatggtaacttaaccacaaagctggaataatattactttctctctcggataagttctatttatcgctctatttctttatatttaacgttgaatgcaagtctactgagtaatttaccattgactaattatttccaaatttgaatgttgacatgagttttgagcattattaaaagtgtgctaagcaaataaagtccaataatcatcattggaaagtgcttgtaggtgataacttgtggcattactgatttttaacgctacaacttcacatttagtactcattataattttacttttctaagttcctgacttaaaacaacttttaagacaatcttatcttttataattttcattccatacatcatctgagacaaaaaaaaaaaaattactgtccaaaaaacaattgtattcaagacaaaattttaactgaattgacaatgctatcaaaaagtatctttatcaccttaaattcatcaaactagttagatacatcaacccatggtatgatatcgaaataatgtttcacctactatgagaaggaaactagttttatactctatacatttgaaattagccacctaataatataattcttggcaaaaactataaatttggcttttaaaaaaaatcttatatttttaagtataattgtaaaaaatctaaaatatataatttttatcaaataaattagatcttcttcaaaaatatatgtatttttgtttttttttttttaaaaaaaaaaaattagcatttttctaaaagaaagattttacacctaaataagagtctaaggcgtatgccgagttacaattaatttatattagagtatctccattggagagctataaaagtagtatattgctatattttattgcatttttttaaaaaaaagctcaattagtagtgtctaaaaggtgtgtgctaaatttggcacatgctaaaagtttagctaaatttaacataaattatagtttgtgcctaatttacactattataaatgttaattttttttgagagagtgagtcaatgttctcacatgaagtcactagcacacaccgaaaaaaaaatcttggttcaaagtcctattaaaagttccttggttattgtctttctcaagtgtgtgtgaatatgtggattgaaagaagttgtttcatctttttattaagtatgactgaagctgaatgaatttgttctttgctcaaatgatcattgctcacttgttaattgattaggccactcattgtgtttcctctttacaagttgaacatgttcatt

SEQ ID NO: 110790 - DNA, 1071 bp, Cannabis sativa
tagattttagccactgcaaatgtccagtgcagtttgtgaaatgcgcgctggtaaaagttacttttaccaacacagcagcgaactgtactggtaaaagtgacattttttgtagtgaatgctgctctctatggccaaaatagacttcacacaatgttccctgcccttgaaggcccttagatctgaatcttcctcgccctttccctctccctacgatgtccctctctctgtttctttctgctcgaagccaaacagagcacctccgacagagatctaagcaaggcttcgatagaacgaaaatttgaaatttttgtttgtttttgattgttcaatgagaacaaaatgaagtctttacagtatagttgatttcttttgctgtgtttttcgattagatatttttgaacaaatgtatgtatttagatttttttgtatgcagtctaacctaaagaacacagtgggagttctcacaatgactagaaaagggattcgtggtaactagtaggtaagatcctaacatgcatgcatggttaatttcattaccatattgacgggtttaatagatttcttacaaacattgattagaatagatgttaggttcctaagtagaatgtagaagaaagaagaagaaaataatttttctgattttaatttttttatattttaagttatttttataatttttaattattaaaattaggtagactaatgaaatcactacgtgtatacttgtgtacacagtgatagtctactttgacacttaacagactaaagttgacagagcaaaacgattatggaagttgggaagtgcagcaataatttttccagtataagagttagatcgtattagacttaaaagtttaggaagtttagccgcaaattaccctactaaaaataataaagtaggggtggtccaggtggtgtctccttcgtttttttttttttttttgccaatggtggttcaaataccaagctcataaatttataaatatatatacatatactagcaaaaactacgtgcgaggcacgcatactatttatgctagttttttgctatgttatttgaaagtgatacaa

SEQ ID NO: 110791 - DNA, 3022 bp, Cannabis sativa
  modified_base (2874)..(2876): a, c, t, g, unknown or other
atccacataattattaatatttataacaattttttttattaggggcctaaaatttaaaattgaaacagaatctttaaaatgtttaagacggctcttagcataagcaaggggattcgaattactattcctactagacatagagagagataatcattaaaattcccaacaataaactagggaagtaaaggtgtattatcaaatgaaataaacatatttttacaaatttacaatttaagaaccataaaaatacaaattcccggcttgattgttcagtgagtgagaatcctcttcttacaacaagtagtcaataggcagtctgccccggtaataatggtggactcgcggagtactactagtagctcgtcttcgtatctccataactcaaactcaatcaataatcaaccccactgccttttggcacgccacaggagtcaatatactactccttccttttgctacaatattatatataacccaaatatttatatatatatacttcctccttcccaattctttatagtttaattttgggcagggtcagaaaaacgcagagtcaatcgaaataaagtcatggcttctggtaacctacgttgcgtgatcgtggccgtcgatggcagcgaggagagcatgggcgccttgaaatgggccctagacaatctcaagctccgagcccctgattcagaatctgattcctcttccgccggtggtttcttcgtcatacttcatgtccagtccccaccgaccatcgccgctggtcttaatcccggagccattccttttggtggacccagttaagcgtattcttttgcaaattagtacaaattggtgattattatgttttcttttctctttttgggtatgtagtaattacaatttttgtttgggggatgggatttcaggtgatttggaggttccggcgatcactgcagcaatcgaggcgcatcagaggcgaatcacggaggctgtgtttgatcacgctctcaagatttgtgctgagaagaatgtaattttttttttgagtatctattttgctttaatataattcatttgcttttgttttattgaagtttcgagtattgaaagtgtttttattgtttacatataaatagcaggggaatgtgaaaacggaagttgttattggcgacccgaaggagaaaatttgtgaagctgttgagaagttgaatgctgatcttcttgtgatgggatcccgtgcttttggtcccattaaaaggttacaacttttactcactgtataagagagttatcatactttatgcgctttgcatttcaatctcaagttgtttgtaacctcatcaagtggtccaaaagtatgaactttaatcgcgaaatgcttcttcattatgcttaagtatggtttgtatttgtttaggatgttcttgggaagtgtaagcaactattgcaccaatcatgcccaaagcccagttatcattgtcaaggccaaagacactggtgcttgattgatagtcataaaaaatggtatgcatttatccattctccaaaacttcttagtggcattttttattttaattgcccagttctctttgttcctctatgcgattaatactgcttttaatttccttgtgttgaagtaagcaatcaagttgtaggcctttctttttccttcacaagataccgttatcatttatgctatgtaaatttgctctgtgcatcataagctgggttctgtgattggatacctttaggatctgttctgttctgttttattgagggagggactaagggaactgtgtagcatatcttcattgtcaaatttaaatgtcagttcactagagcagttttaatgacattttaattccaccttctctttcataaatcttttagtgaaaatgctagatgatgagggagggaggtggcagtgtagcatatctccattgttgaatcacaagagcatttcaaatgaagtttgaattccggattctctttgataaataaatctttttgcgaaaatgctagatgatgagggagggagaggttgtgtagcatatgtccattgttgaatttaaatgttgttagctctttagggaaatttaataaaatttgaattcagcattctcttggattgattgaataaatcttttagcgaaaatgctagatgatgaagggttgttggtgattttttttctccattttatataattctaagatggtagtgcaagtattataagtgataaacctctaacaggactttcagcttgtaaaatcagtccatacatcacatatgcatgcatacatgcactcatttatctacttacaatacacatatacatgacattgatatccctatttacattgatgcaacacatgggcacatttgataatttattttccttgttaactttttgttgctgcatgcatagcttgggtgcatgctccagatggactagttgttttgtaatggatgggtgatcatatagctgttgttgattgtggattatttgctatggtagtatgcttcttgacgagtttgaaccgagaaagtttctgggtgtatttggattgacattctttttttaaaaacatttactgttgctgtaaatggatgtgtatcatgtaataataatattcacaatatgtatctacttaattatttatttaacttttagttgtgtaacataaatttgatataaccaagtagaagttatataatgatttccaaaggaaaataattggaaaaagaaaatcaactaataacaagaccaaatgaatatatctaatctatataaagtgtgctatgtaacagaatttttgttttaaccatacttttttggtttttatgttacctttaacaaaatatcctattatttaacaaaatattttttattaattttatannnttattatatatatttaataataaaaattatatagatattttatataaataaaattttatttttatttaaaatacctaaaatgttattgatatttttaatcttatttttaaattttttggtttaactttaaattaaaataaaatgaa

SEQ ID NO: 110792 - DNA, 7232 bp, Cannabis sativa
  modified_base (7144)..(7179): a, c, t, g, unknown or other
atataaatgattgttaattattatgaaattaaagattttaagtttagaaaaaatcttatacattttatatgtattaaagcttaaagcttaaattttcttttttttttttgttaccagtaatgcaatttaaaattctagtttgaagaaattttatagagaaataaatatacactttttttctttttaatttttaaaatgattttattaaacaaaatagtttgttagtttttttagtgtgttttattttttaaataacaattctatgtataattttttatttctattaatagttttatgtattttaggaatatagacaataacaaaataagaaatattaattttttaatatttaattaatgactataaatatcaaccattagatatttgattcaatggtcaagaataaaatacgcataaacgggtaatacccattaagagcatacccaatatatatttttaaaattttttatttttaatgaatgattttgttttggatagaatatttactgaatgaatagatttccctttgaaatcatttttcttaatacttgcgttaaataattagctattttaaattttcacatatgattttttttaagatcttgatatctactactacgatttagtgagtaataagttacatatatctttttataatttttttaaataatatattaccataagtaaccaattataattatgaattgtgtcttatatttttgctaacaaattgctaccttgggtaactagttacggtcattttaggtaactaagtatttatattttggatatccaagtacttatattttggtaaccaagtaggtgctatcttgaataaccaatacatatattttgggtaacaacatacttatattttgcgaattagataatcaagtaagatttggggtaaccaagtattatcttaggtaaccatctacttatattttaggtaactaggcacttatattttaggtaaccatgtcttatcatgggtaaccatctacttatattttaggtaattaggtacttttattttggataaccatgtagttatattttgggtagtcatgtactaattatattttgggtaactaagtatttatattttgggtaactagatacttatatttttgataaagtaggtatttatatttttgggtaaccaggtattttttttcgcaattaggtactatcttggctaaccaattacttatattttgagtaattaagtatttatactttgggtaattaggtacttttattttagtagttaactaggtacatatagtttgcataacaagatacttatattttagataattatactatcttaggtaatcaattaattatattttaggtaaacagatacttatacttttatgtaactatgaacttatattttggataacaagatacttatattttgggtagctataatatcttaactaatcgattacttataatttgagtaactaagtactattggatgacgaagctcttatgatgagtggatcttgagaatagccacaaaggcacccccaattaaaattgagcaacagtaagaaaaaaaatacaataataaaaaacaaatattaatttaactgtgtaatattaaattttgaaaatatataaaagaaaaataaattagaaaagctagagagggtattaacaaaaaaaaaaaaaacataaaagaaaagaaaaaacaaaaggaaaagaataaaaattataaaaaaaataaataaatgaaaaattggaaaaaaaattgagaaagtaaatgagagaaaaaataaaagaaaaataacaaagcaaaaaaaatatatgaagaaatatatataatagaaaataaataaagactagaaaaatggaagaaataaaacaagaaaataattagaaaaaaaataaataaagtaaactaatgagagaaaaaaaaaaggtaaatagaaaagaaaaaaaaaatccttttattaatacgtgagtaaattttttttttttttaattttaagactttttgcatttatatataacttaaaatttcttttcacaaaaatatgttcttcatcaacgataacatcttttagaagacatttcaaaatctatatataactacttaacataatattacaaactaatattaacataaatgcttatatatataattacagtaacacagtaacatagaattacgaggagtctttcttatcatatctttcaaaaaaaaaaaaccttaattgttttgtcagtggtagtcttgtgatctttttgatcaatgatgaagatgatcactttatttatgagcttgtttatcatatttatattaggaacgtcaatgagtttgtgtaagttggtgtaaggacttttaaaattcttataagacttattatattatatcttctctaatgagtgggtatattttgagctaaattttatatatttttatagatgtggttgttacttcactcacttgattatttagtattcaaggggtttctacagctgatactcaatagataaattataattactatgtcatattagatacattttagttttattattttttttgttttggtactaatatatttaattttttccttatttgtaattttttggtgggacaaatatacttttaggaattatttttttgatattaaagttctattatatagttttccgggagcatttctttctcatgttagtcacaacgttaatgttataactcatagattattttagcatgcccttaagatcgacagtaggcttttttagatccatagaatttcttcactttgcctctaagcgttcttttctctaacctatgacagttacccttacaaagaaaaaaaaaagagtctatgttatatttcgttttatatagggataattatattttctattacaataataattaatattactaataatactacatatattttcaaggataataatattatattttaaagggattttttcaagaatatacataaaattcaaattaattacaaaaataacttaataaatctcaactacaataatatattgccacgttattaaaaaataacgtaattccaaaataatatgcttgaaatggaagtaatcccaaaatctcgaaattctattttatttttttgcgtttcaaaagtaactttttgattacttatgatgttgatcagaaaccaatgagttacttttttaaaaaaaaaaaaatcatttgcaaattatataatttgagatatatttttattattttctaaacctatttatatataccttaataatcaattagttacttttaaattatattaatacatttgagtaacttttaagtttattttcgaaaataataagtttctatatatatagtataagctacaatttttagtaaattgtatttagaaaaatatatatcatatacgtttaagtcactcgtttgtcttaaaagtatatgttcattttttattttatattatattatttaaaatatacttttgacgcttctatctttttccttttttttttttctgtaacaatatttatgttaccttaaattctatttaagaaactaatgtgttacgtacaatgaaataaaataaatcacatattttattagcaaaagttttagacatctaaattaatgattagttagttattttaaaattatattatgatatctagatattgcttaagatacatttcgttagttcagtgtagaacctatttagttgttatataataacttttaaatataataaagggaaagtatattttagtaactcataaattcggtacacatattaaattttattctattgtaaaatttgattattttttagttaactaaatgaaaaataaaactactcttaaatgtggtcattttgacttataaaaaatatatattttctcatcgtcgccataataaaaagcaacaaattagttgcttatgatacctaaaatgaaacttaaaggaaaattctacaaaaattacaaaaacgattcattcctttataatatacatttcattattaaaaaatagttgcttatgatgccaaataaaaaccgttaagatctagcaaggttaagatcaccttagatgatattaaagatgaaatcaatttttggaaactatccatcgtctgctatgtgttgggatcgaaccctcccttacacatattggatggttttgctaacaaaatatatatggaaggacaaaattgacaaagtgaggatgctaacctatggtatctttaccataaggttcaattcaatggaattaagagattaggttcttaacggtgggtatatctttttcaacagaaggctggtaataatgaaaccctaggatccaaatacaaactttaagaaagaagatgtcaagactattcccatttggatacaacttaaggatctcgatctcaagtattggggctagaaatcactttttaagatagtagggcagcttagacatcccataatggttgactatgttactagggacatggatcgacttaacttccctagagtgttgatagaggtgttaatgaatcaagattccctgatatgttgaaattcgaagatgaatttggcatgaactcccatgttggtgtcaaatatgaatggaaaccagtggtgtgctcccactgttctggtatgggacacatgacagatgattataaaaagaaatcaggaggtaagcaagagtgggtgattaaagaagatagaaggaaagagaagcgtactacagatgaagatggttttcaagttgtctctaagggcaaaaagatcaaggaacagaagtaagcaacagtggagactaaaattgataatggctttctggtattagcatggcttgacctttaccctaatgtagaagcactctttatgagtgagggaacctttgatcacacaccagggatcctatccctgtaccccagatggagtaatgggaaaaagccctttaagtactttagaatgtggaaatcacatcctgagtataataaaagggttgcagcaatatggggaaaagagataagaggagctagaatgtaccagctaatttgcaaactgaaggctctaaaaccaatcttgaaagagatcaacaaacagggtttctctgaccttcagacatcttccctgcaagccaaagcaatcctagaggacattcaggaaaagctccagactgaccctttaaatgatgttctgcacaatgaagaacttgctacaagaaatggattaattgttgcacagaaaaaataccaatctttcttgcaacagaagtccaaagctaattggatccaagatggagatagtaacacaactttattccatgctagtatcaagcaaagaaatagacagaaccagattctcacaattgagaaagaagatggaacaagggtattcaatcctggtcaggttactaatgccttcatttcctactacaaatccttgcttggatccaaaatgacaaatagaagaaaggtttctagcaagatactgaataaaggacctgccctaaatgaagcacaagctgctatgctgacaaaagtgttttctaaagaagaggtaaagaaggttgtatttgagatccctgggaataaggccccaagcccagatgggtactcgagctactttttccaagataattgggatcttgttggggaagacatttatagagcagtaacatctttcctagaatcagagaagattctaaaggaaatcaatacaactgttctcacaatggtccttaagattaagtgccccaacactatcaaggattttaggccaagagcttgttgtaattttatctataagattgcaactaaactattgtgctctagaatcaaagtcattcttccagaattagtattaaaatcccaagggggattcatacaagcgagattcgttggacacaacatcatgatatttcaggatctagtaagacactatggaaggaaatcaagcaaggctaactgtatgatcaaacttgatctacagaaagcttatgatactattgaatgggattttgtggaggagatgcttcatggtcttcaattcccaaattccttcatccaacttgtaatgaattgtgtgagagctcccagattctccattatgtttaatggctctgtacatgggttctttgaagcaaaaagggggcttaggcagggggacccaatgtctcccttgttttttgttctagggatgaaatacctttcaagaattctaggggaagttggtaacaaaagtaatttctaatttcatgagagatgttctaaactaaagatcaatcatctttcctttgtacatgatattatgctattttgcaagggggaattcaaaagcatatactatctgttacaaggcttggaactgctatctttatcatctggcctataacctaatcctcaaaagtcagcaatctactgcagcaacatgccaaatgatgaagtaaatagagtccttgtagcatctttttttactttgaaagaaatgccttttacatatctaggagtttctatttgtgctaagaggatttctgggaatgaatgtgttgcccttgctgaaaaaatgacagcaaggatttaaacatggagctcaaggaacctctcttttggagcaagagtggtacttgttaattcagtacttatggctattcatgcctattggtgtcaagtgatgcttctaccgaagaaagttgtgagacacttagaatcgatttgcagggctttcctttggaaaggccaagctgtgtctaatggtcctggacgtgtagcatgggatacactttgccaaacaaaagctgcatgggggtttgttgtaggaagattcaagaatagaataaggcagctatgggaaagtatatatgggcaattgcaaataagcaagatagcttatggctgagatggattcattgtgtatacgtcaaggggagtgactggtggaattacaaggcaccaatacaaagcagctggtactggagaagccttctaattttgaaagatcagttcaaggaattagaagcaggtcagcaactcttactgcagaattactatgtatccaagatttacaccctgctctgcccaaatcaaacaaaagtgcaatggtgccaacaagtttgggggagattgaactgttggaaattattttnnnnnnnnnnnnnnnnnnnnnnnnnnnnnnnnnnnnaacaccctaaatatgaactttagatcggaagagcgtcgtgtagggaaagagtg

SEQ ID NO: 110793 - DNA, 4520 bp, Cannabis sativa
  modified_base (1550)..(1561): a, c, t, g, unknown or other
  modified_base (4487)..(4489): a, c, t, g, unknown or other
cccaaaacccttcccaaaccccccccccccccccccccctctcttcttgtctcatttctttgaaaagttttgattgtgtgagaattgcttgaagttggaggtgaattttggagttagtttttggtgattggagcttggaatttttggtaagctcctaggttttcttgctgaatttatattctattatttaaagttgtcaaaggcatgttatgtttgatgaatgcttttggatgcatgtgagtgagaagttgttgaatggtgtatgtgtatgcatgattgtaaattaaattggtgtggattgctcttggtattttgtaaatgtgattcttgggttgtaattgtacttgacttttgattattggttctgtatatggttgtattcaagcatgagagtttggttttgaggttcaagattttgaatagaaattatgttgaattttagctcaactttagagcttattctggattgttgttgatttgaccttaaaatgcatatataggtgttgagaagagcttgatttatgtgttttaattctatgttatgatagttgtaatctgtgaaaaatgaatttgaagtgtaagcatgtttaggctgaatttggtgtgaatttggcatgatttcgtgttactgaaaatggaatttctgggtttggaacctaggcgccgcggcccaactcagtgagcgccgcgacccgcccttagaaaatcttgggtttttcaacccaggtgccgcggcccacttggggagtgctgcaacccgccttgtgcttctgggcagagtcaaatgccatattcgattgttcataactttgtgatccggacttcgatttgggcgttttgaatatcgttacaaagctcgtttcgagctctatatgtttatctaaatttgaatgccaatttttcaattatgtggaagtggatttagggattaaccctatttgtgaatcccggaaattatgactaggattactggcacttggtcaggagcacctggggatttggaatctccacgtatatgggacatcaggtaagatagtagttagcatgtagagttatgcgcggtggcactcatgtttgatattataatagtgattaaatgtgaactggtattagggtcataaccctaaagtgagcggttataaggcctacggttattaccctagtgaataatgattttaaatattatgccatgctatatatgttgagtaaagaattatgtgttcaaggcataattaggttagactcagtaattagaaccgagataaacaattctaaggcctttttatatttagatgtgtgagcgtaacatgtaggtctatgccacatagacataaataggcgtgtgagcgtaacacgcaggtctatgtcaaatagacaataagtgaaatggcattattatatatgtgaaatgttatttgtgtttattgacatttatactgtcttgctgggcttggcttacgggtgctctactgtgcaggaaagagtaaatctgtctgtaatcagccatgagttcgagagcttgggtgtgcttgtacatgttcgggccacannnnnnnnnnnnggttggggtctaccagtgattgtattttgtaatctcaaattttttcgcttaggtcggcacaagaactaagttgtaatattttgtgaaaaagttttgtgggatcccaaagcatgttatcttttgatttgtttaaaaaaagttaaaattattacaagttatatttttattccattgcaattaaagtttaaattttcttactcttatctttctagtaatctcagattagtgggattagggtttcattattggttgtcgtagcgtgcctaattgttagggcgttacaatttatcctcctttactgtttattttccatcgggtaccttagacttttagattatggctcctccataaaccctttatttcagtttggggctgaattatttacgcctaaggtcaccttaattggtagctatctcagtgagtgtttcaaatcttatgttataaaataaggtgaaagcttttattttcagtccatcctccccgaggagaggattttatacccgccaccttgattaacaatgataacgagtgtagtacgaggggtatttctagaattactgcttgaagcatggagcatattcgagttggtctgattctttcgttaaaagactatttcacggattacactaattatgtagtaatagctcatttccagttaatcttgaatggatataagatttagcaccaaatgaacggatggtgaatgcctccgcctcatgagatttcatgtttgtagacattaaaagtgtgtccaaccagaaagaactacactgggacttttattacttgtctacttacaccgacgagcacaaagttatggttaaccttcccaacaagttgtagagttttaaagataagttcttttgcacaactggtctttacccaagtgtccactcgtccttccagtctcttcgtaagtattcattttttatcagttcaaagtttgattaatcttgacttgtatcattatgcatcagccgtttcatgtatgattgaactgtcatgccaaaacctactccaacaaaggccattgaagaacgccatctcttacttgttatttgccttatggattgaggttttctcatttcttgctctaggttttaatgaacgaataccaatcaaccatggatgttcacattcctaaagatgcactagacttcagttgaggttccaagcaaggaggaagaatatgaatgtgtttctcaagatgccttgtacaatgtggtatagaggtaaggaccattgacttatattttgaagctccaacaaactctggatttttattgaactcatcaatagaataatatggtttattaattttattattaccccactatacatatgattgtactctttcagaatatagaattatatttaatgaattctttttaaagaattcgttttagtagtccattgatataatcaatatatatagtttgtcctttaatttattagttcataattagagttggttaaaattactattttacccttctagttatattttgaattcttttagtaccattaatccaatgtgaaaagttaatctgtaattataattatagatttggattcagctatagtcactcccagcattcacgctataagaaaattaattattcgatcattttgaaaagcttggattcctcttattgtataatatttccccacacattcatgttattaaccttacaagacagaagttgtaagaataatcttctctaaaaaattttaacgagtgagtcaaagaacttaatgaacacaaacatgagttcatgaatactcaaaatttggagtgatctactaatgatcatcattgtgatatggataactcttttatgataaacgacacattgataaaagatgttaattcatattggtccaatcatttataatcaaattatacatagtacctttactaaatgtctatccacatatgtgatttgaatcaaaatcacatgccactaaagtatactgcttaataaaccgtacttgataatttcatattaaagattccataattttaatacactactgacttattctattcatatattatgatcacatttctcttgtacttcattatattaataataaattttatgatattcattaattatatttctataattaaaatattaatgtacatttgcatttcatacatttattggttttcatgacactaaatcagatacgcacctaaagggtttcatattactgattatcattgtaacatagcccaatggatctctagatatacatacattaaatcaaaaataaaataataattttagaacaaatacctcttgaagactatcaatgtatcctcgaaacttctcgtatattgtatcccttaatctagatggtgaggatgacacaattgaactcacaccagtgtcttccaaatcgatccaccacacacaaggaatagtgtgggctattaggataaattgtataatgttgttcttgttaatttctcaacacatgagcaagaactattgagagagaaaataatttctttttctccattgtaaatttcaaaaatactagtgtaaaagagtgtgtttgatttctcaaataagtcttctatttatagaagttaaaaacctttaattaaatcatatttaattatttaaataaataagaatctataaccgaattcagttactaatatttatgagggaatctctcaattacttgtgagaatatctcaaccactttgaaatatctataaccacttttcaaattcaaatatatatctaattgagttaattaaataattaattaacccaaattaattattgtctcaacaatttttgtcctgaaaattcttgtctcaacaaatttggtcttgacaaattatgtcttaacaatttttgtcttttccctatttaattaatttaaaaaattatttatttattacaannntaaataattactattttgccaatttaaaata

SEQ ID NO: 110794 - DNA, 7121 bp, Cannabis sativa
  modified_base (7060)..(7071): a, c, t, g, unknown or other
tattaaattataaaagatgtatttttcaacttaccctttattaatattctatatttgttagtatattattattttttattagttttgttttttcataaagaataattgacttatgtataaaagtaagtagttaatttattgtttgatgatacttagagatacgatagttacaatgattttaaatcatatactattatctttttcagatatctaatttgagaattttttatttctattttttctttacaataatatttagatttttttgaagagttttttttttattattatttttttttgaagaaatatattatttctaataatctctaaatatactttatataaactaaaaataatatattttttttatatagaaattcaaaaaaaaaaaaaagataaataaataagggataattgaataaaacacacaattttgtaaaatttttacatttgtaggtttaattttttttatatatatatttttatagtattttataaaatacaagaaaataataagaatatcacgtgaaactattaagaaaacaataacaaaataatataaaaaataatatacaaataacaaaaaatcaacagctaaataacaagagtataacataaaaacacattcaaagaccgtattttatgtaaataaaatttaaaaaaccgtaaaaatattgaaaattttgtacaaaccgtatttttgtatgttttgaaattatcccaataaataaggcttataaattaaattaaaaaaatactattttttttaattattttactcaaaatacatatgtttcttagtttttttttttttttgaaacacatttgtttcttagttgatgtataatgaaggctttaatttcataaaaaaaaaaataataataataaaaaaagaaatacaatttgaatatgatagagtagaatgcagaccacggtaagagatgatcgtagaacaaaatggagggtcaggatcactcccaaaacgcacactgcatcctacataattgcccataacgtctcaaagtggagtgttcagaagagacactatctgagcaactccgctctataattttcatttccattttccctcgaaacgaacaccaaatagccatggagggagggaaagccaagatgaaatcatcagctgtcactctggatcaattcgtctccatcatggctcctctaattgatttggaaaaggtttctttctttcaatcaattcgattatatttatgtttatatttgttacaaactggatatctctccaatttgaatttttgttacgttagaccaaatttgggattttcctgatgaaaatctcggtatacattttgattttgaagctgtgattgtttttttttttttttaggaagctgaaatatcagcctcaataaacacaggcgcatccagaaatttagagaccgcccaaaagaaaggatcgacaatcatcaacttgaaatgtgtggatgctcaggtattcatataatattatatatgtaatatctgctgtattgacttattaaatcaacctccagtagttgataaataagggaaaaaggaagcaaatttcttttttatgtggatacgctgctaaggttaagtggatgaaactaaaaaatccaaagatttactgtaagaatgatgttggagaagctgtcaaagtgcattgaatttcacttggaataaaacccatttttttgctaattatttttcatttccagaatatcttcttagtaacaaaatgaaatatcacatcttattatgttgtgcttttgcttttccaacagacagggctaatgggaaaaactcttattgagtttcaatctaataaaggagatgttcttcctgctcacaaggtgaaaaattactgttttccttaatttgttcttgaatttgactcataaagacgcaagttaaatttgccttttattataattactattatcgcctctctccccaacttgcagtttagtacgcatgatgtggttgttatgaagccaaacaaggctgatataggatcccctgctcttggacagggtgttgtttaccgattaaaggtagctacagccttgagatagaaatttagctcactatgtttttggtattttcagttaaagtaaataatatatcttcctctgaactttgactttgttgtgagtactgaacaggattcatcaattacggttgcttttgatgacatcccagaggagggtttaaatagttctttgcggcttgagaaggtggcaaatgaggtaaaatatttgaatgtttcagcccttgcagtattgccattctctatattagtagtagtcattaaatattttgtcacaggttacttatcgtaggatgaaggatgccttgatacaattgagtaaaggcatacagaggggccctgcttctgatctaatccctgtcttatttggagaaacgccaccagcagtgtccaagaaggacctcacattcagcccctttaattctaacttggatcattctcaggtcaataatcctgacataaccagatctgtttataattacatcctgctgaccatttaaaccacattccttgattacagtatttaaaaattgttgacaagcagttaagtcttctttgtaaaagaaaagattctttcgaagacaagaatgttcttctagcaacttctctaaacttacctttcaagttttcatgggtggtttctggttcagtcttcagagaatacttttagccttgtcgtttcatatttctaggtggtcgtgattatgtgattgaaagtaattccaaagaacaatgcactagtttattgcataacaatcgtatactttttctttgtgaaaacataagctatgtttatttacccacttcctagcttttgttgaaccaatggactccaaagatcaagaattatccctatatagtatccacagcaccagttgttctacatttctgtggatttttgcatattttatgtatggagttgtgcatgtgtgtgtgaaaatgccgtactggatttatggtttccttttcaatattattggcttctctttttttcccttcttctttccacagaaagaagcaatttcaaaggccttggcatcaaagaacgtatttttgttgcatggccctcctggaacggggaaaacaacaacggtggtggaaataattttgcaagaagtgaaacgcggatcaaagattcttgcatgtgctgcttcaaatattgctgttgacaacatggttgagcgacttgttcgtcacaggtaagtctatgatatttgattacatcttcacttgggtgttgtttgaacatccacagaagacacttttatcattatgttattttctaaaaatgctatcaaacagaattcttctgctgtggatagaatttgtattttaacttgcattaagaaacactgtatctttccatggatgaccaaatcatatgatttatgaacccatctgtcaaattgctaaaatcattggaatgtcttaccaaaactgcttaattctcaggtttgtaaaaactacttagttcttttaaacaaaagcttgtcatgaaattatttgatttaggaataattatttaattttttagaaataaattagaatgtcatctactcgcaaaactaataggatcattatgtacatgcaaacatgtcattactgcttatctaaaatgttatctgaccaaatcatatgaattatttggtcatctctcaaatttctagaatcattggaatgtctaacttatttaagtttccatcgagtggattccatgttatagtgcttcagttttatatgttaggtagcattatttttgactcttcttttctactatttttatttactagagtaaagttggtgagagtgggccatcctgcacgtttactacctcaagtattggagagtgctttggattctcaggtatagaagaacttaattcttacaaacaaaagcttgcgtcatgaagctatttgactttgtaataacaatttaattttaagaaatattttagaatgtcatcctattcgcaagactaggatatctaagaagttattactgcatatctaagaagttatctgttctgtgtaaattgtacgtttaagcactacattcacccacttcagttttaaccttccaattaactgaattatccatgatgctacatcagtaacatacctatttgtccttacagaatgtgatcatttgcttttaggttctacgaggggataatagttctttggcaaatgacatccggaaggaaatgaaggtactgttcctacaattatcactcaaagcatcacaaatgtatggctgcttacacttctaagcaaaaattgtctttggctacggctgagttgcatttagttgatttaatcatcagtcttaaggttgtaccacactaattatagaaagcaatctgctttgaacttattaagagtctaacttaggaaaccatttctgagaaaacttggatgtaaccagatttagactgaaagtgtctcaggtcccaaatgaagctttgtcagaattggtctatatatcttgagaaacatccattgtttctatttatcttgagaagatttaattatatttgtctgatatttatttgtccctacttcatttcaggctctaaatgggaagctgctgaaaaccagagacaaaaatacaaggagagagatccagaaggagcttagaactctttccaaagaagagcgtaaaaggcagcagctagctgtgacagatgttataaaaaatgcagatgttgtgttaacaactctgactggagcttcttctcgtaaactggatagaacgtcatttgatttggtcatcattgatgaagctgctcaggcccttgagatacaatgctggatagcgctattaaaggtaacagtaatttgtagacgcatacaaaaacactatactggcctccacaataaaaggatcattatagcttcaaactatcgcatacaaatttatgtatcttgcttacaaacctggctgtggtaacatgtctagctcttgttgttgtgaatttgtaatataatatccatcaaaattagacggttttttctggtgaagttcagactgttgataatttcaattaaaccatgtgaaatatgtactgttacttcaagcatcactcaaagatcttaatttattgtttttagggctcaaggtgtatacttgcaggggaccatcttcagcttcctccaaccatccaaagtgctgaagcagaaaagaaaggtctaggtaggaccctctttgaacgccttgcagacatgtacggaaatgacgtcatgtccatgctcactgtgcagtaccgaatgcatgagcttattatggattggtcatctaaagaactttacaacagtaaggtgtgattatgtctgaatcatgatttgtatgtgaatgcatgcaacttttcatcaaatatctgattctgagaactactgtttggtgatcgaactaatgctgctatatgtatgtatggcttttgtttctacaggttaaagcccattcaagtgttgccgcacatatgctttatgatcttgaggatgcaaagaagacctcttccacagaaccaactcttcttctcatagactcagctgggtatatgctttttctgttgccttgaaagttttattttttttaatactctagtgagttcttgcaaacactccataataaccatatagaacaaatttcaccacccacattgttttcaagttttgagcttcacagtgttcacaaatgagggctaaaataaagttgaagcaaacatgcagcgctaatctgcaactaaacctgaattgttacttcatgaaatgttacctgagacagaactgagctgggttgccatttggttttctggtgtctgcaatttagaattgtaaaatcactatgattctaacggacatgtttaatacgtttatcttcagttgtgacatggaagaaaagaaggatgaagaagaaagcacattgaatgagggtgaagctgaggttgcgatggcccatgcaaagcgacttgttcaaagcggtgttcaggcttctgatattggaattattactccatataatgcacaggtatatgatccaactcaatagttctaattctcttgccataagattcaaattgaattgtgtcagttgttacattggccgctagatgattggtagtttgtgcccaattcaatagttcttgggtcagcaccacaaacattttctctatataaatgaaaccggtattgctgcaggttgttttgctgaaaatgataaaaagcaatgatgaaaagttgaaggatttggaaatttcaacagttgatggtttccaaggtagagagaaggaagcaattattatttcaatggttcgatcaaactcaaagaatgaggtacatttgctccagttttatcgtcacatctgtactctttatattagaaatgaataccgttctaaacaaaacaaaacaaaaaaatgaattattcttgctctgaactttctacaccttcaggttggatttttaagtgaccgtaggcgaatgaatgtggccgtgacacgagcaagaaggcaatgctgtcttgtctgtgacactgagactgtaagtagtgatgcattcctgaaacgattgattgagtatttcgaagaacatggtgagtattcaagtgcctccgaatactgcaatgaataattgatgtttcatcggttacttttatggtttctatgattcaagagagtaattcgctcaggaatatggttctttaacaccttcaaaagtgctcctgattttgagctttttaggacttgttttgaaatgttcaatggaccattttccattacaagaaaggaactaattactgaattatttaactgacatgcgaagttcctgttaggactacattttattatatataaaatagagattattttacaaaaacataaaaacaacaaaaaaaaattacaaaaatactgttttatggacttttaaatatttttacgatttttttgattttatttaccgaaagtacggtcattttacgttgtaatcttgttaatttgttgttgatttnnnnnnnnnnnnatgttattttttattgttattttgatgttacttttatgtatttttttgtt

SEQ ID NO: 110795 - DNA, 11546 bp, Cannabis sativa
  modified_base (4685)..(4703): a, c, t, g, unknown or other
  modified_base (4991)..(4993): a, c, t, g, unknown or other
  modified_base (5028)..(5030): a, c, t, g, unknown or other
  modified_base (8156)..(8161): a, c, t, g, unknown or other
  modified_base (11499)..(11509): a, c, t, g, unknown or other
caattatatttcaaaacttaataaatcacatgtacattccattcttatatataattttttttttctacatacaatgtaaaataaaattaaacatttctttatacatattgttaggatagagttagttataatttctattttttatttttacagttagttagttataactaactatttcttcagctgctttcttttccagctcttgcatcaatctcatgtacattggatccaatatatatagtggtttgctcctcattcttgagtaggcctctttcatttcatttcgtttcatctctctatttctctctctcactctcatacatggtatcaaagctttcatggcgtcgataggagcaaactcaaccaacaatggtggacaattcgatggagatgatgctcctccgatcgcagctcaaccgatccctcctgcacctgaggctccccaagcaggactcccacataacaatctacttccgttcaatctttgacttgacaggaacaactacactttctggagatcactagttcttgcagcagccagagcttacaacttggatggctacattcttggatcgattcccccatcgcctcaaaatcttgaaggtaatgcatccaaccctacttatcttcaatggttaagattcgatcaatttctaatgcattggttaatgaattctgtatctgaaccaatgcttggccacatcatcaattgtcgatcctcctctgagatctggagcattttctcaagactttttgcttcaagattcagagctcgagtcttgaaaatctatagattactccatgccaccaagaaaggatcctcatcaattgaagactttcctaaagatgaaaagttatgctgatgctctggcagctgctgatcaacatatctctgatgacgatcttgctttatacattcttggagggttaggccaagaatatgaagctatcatagtcaacctcacctgtcgagaaactcctctcagtttacaagaaatacaattcatgcttcacagtcatgaactcaggattaaccaacacaccactgaagccctggccaatgtccaagctaacatggcaaatctatctataggcaacaatcacagaggaggatacaatggacgtggtttaagaggaaattacagaggaggtcgtggttaatcgacaaattgaggtggacgtggcaataaacatgtgtgccaactctatggcagggtatgtcacacagcaccgaattgttaccatagatttgatatcacttttacaggtccctcatcatctggttaatccagcaacaccagtgaaacaaccctcaagcaaacctggctaaacccctaccacaagtgatatatctggtgcatggtttcttgacacaggtgccacaaatcacatgaaagttgatgctcaaaacctacaaaaccatgtggactacaaaagcaaagcaaaagttcttgaatgtaatggtaattctatgcccacctttcaaattggatctaatcttgtccccaccacacatcaaaatcaatttctcattcttaaaaatattttacatggtccctaatgtcaccaaaaatcttttgagtatatctcagttcactaaagacaataatgtcattcttgagtttaatgatatttgttgtcttattaaggacaagacaatgaggcaagttattctaaagggttcctttaatgatggtctatacaaactccaagtgcagccctcaagtgtccctgtccaacaaactagaacaaacaaaactactcctgctcacaccagcaggtttccctcaattttcaattgtactactactagtaatcatgtattagataagtccaatatagtttccacttggcattgtaggcttggtcaccatccaagccaattttatccaaagttttatctcatgtctgtcccaatatcaaatgtaagaatgtcactttctgtgatgcttgtcaaataggaaaaatgcatcaatttagtttcaaatcgactataaataaaactacttcccctcttcaaattatccacactgatgtttggggaccctcattttacacttccataaatggtaacaaatattatcttagctttgttgatgattatagtaaatttgtgtggatatttcctatgaaaactagtctgaagctactacattgttcaatcagtttaatgcctttgtaaaaaagcaatttcaagttaaaattaaaagcattaaatcaaacttaggaaaagaattctcccctctcaaagatcattttcttgccaaaggaattgtgattagaaactcatgtccccatacacatcaacaacaagggagaatagagaggaagcatagacatgtggttgatattggcttaactctcctagctaaagctgatatgcccttaaaattctggtgggaggcatatgtctctgcctcttacttaattaatcgtctgcctacccccattaataactatttgccaccctatgaaaaactatataaaattgtacctgattacgatttagtcaaaatatttggatgctcttgcttccccttacaaagaccttaccaaaatcacaaggtgtcatttcgatcctccaaatgcctgtttatagggtacagtatgactcaaaaagggtataggtgtttacacccaagtggtagaatctatgttgctaggagtgtacaatttaatgaaaatgagttcccttacaaagctttattttccaacaacaagcccacatctgttccacagtgtactatcctaaacccaaatgattaccaacttcctctatcgctgcttcccccttctcccacaccagtcactcataaccctcacatagaagctccaaattcccctaaccatgtctagtccaatgaatttttgtctactccaaacccagcctctgagtcatctcattcatcacatacacccactatcaaccagatgcacaccccttctgtctcccacaaccctaactcaaatacatctctgcccacaccagcacctgtcccagaaccaaatcaaaacaaccatcctatggttactagatccaaggtgggtatctataagccaaaaatatacttggctgatgtcaagacagaataagaaccaaccacagtcaaacaagctatggcaaatcccaaatggaacaaagctgtgaatcatgaattcacagctttaaagaataagaaaacatggaaattggttcccccacaccagacatgacaattgtcacaaataagtggctgttcaggatcaagtacaactcagatgggtctgtcaacaaactcaaggccaggttaattgttagtggttttcagcaaacacatggggtagatttctttgagacatacaatcttgttattaagccatgcacaattcgaatcatgtttacacttgcaaccacaaatagatgggacatacaacaagtcgatatcaacaatgtgttcttaaatggccaacttactgaagatgtgtacatgacacaaccccagggttttgttgaaaaagattatcctcactatgtctgcaagttaaacaaggtgatttatggtttaaaacaggcccctagggcctggtttgatcagctcaattctcatttgttgtagcttggatttcacaactcaaaggctaacacaagtctattttacagcaaaattattggccaacttgtgctctttcttatgtatgtcgatgacacactcattataggagcaaacacatagcagatacaaaaattgatacaaaatctccatgccaaattcgatcttaaacagttggggacaataaactattttcttggcttcgaagctttcaaaaatggcagcacctactatcttacacaacaaaagtacattagggaccttttacacagaacaaacatgatggactcaaaacctcagtccaccccccatgtgtgcaacatcaaagctgtcactcaactcagggcaaccacttgaatatgctaaataatacagaagcatcattggagcattacagtatctcaccacgaccaggcctgacatctcttttgttgtaaacaaattgagtcagttcctcaaatctcctacaactactcattggggtgcttgcaaacgggttctgagatacatggcaggaataattcaccttggcctttctttttcccctgccacaaaccttgatcttcaaggttatactaatgctgactgggttagcagctatgatgacagaaaattgacatttggataccgtgtctttcttgaccaaaacctcatcagttggtgctccaagaaacagaatgttgttgctcgttccagcacggagtctgaatatcaagccttagctcttgccactgctgaattagtttggatccaatctcttctcactgagatttcaatcaatctccctcaaagtcccatactatagtgtgacaatcttggtgcaggatctctggcctcgaattcggtctatcatgctcgcattaaacacatagaaatagaccttcattttgtgcgagacagagtccttgccaatcagcttgaagttcgatatgtggacactcactaccaaatagctgacatcctgacaaaacctttgcctatcacgcaatacaaccgcttcaaggacaagttaacacttcggtgcccaagtgtaattattaaactattagattttagtccgatggcgaataataaaagaaaaatttgaatttctannnnnnnnnnnnnnnnnnnattaaaaaaaaataaaaaaatacttctttttacactatatcaaaaatatgtttatatgaaaaatatttaaatcaaattcaactttttttatcatttttttgtcgaaaaatattttttttattatttttattttcagttgatggaccaatctcggtccatataatgtaaaaatgagaatttttttaattaaatagaaaaattaatcatgaaaattcaaaattttctaatattacacattcatattcatagataatatccattaaaagtactgtaatatatatatatatnnnaagtactgtaatatatatatatatgggtaaatacnnntttggaccctctgttttacaaaatgtatttattttgtttcacctacttccctaattcagcagatttaccccctaccatttaccactacttttctcatgctcaaactaattaatcaaacttgcatcatattagtttttgaaagtaatgaacaaattcgctactataaatactatacatcttatgtttatcaaacaaatactaaacatgtcacatttattaaaataatactatacatctcacaaaaatatgaatagttatataactaaacaagttgtttatctattccaagagcatgaacaactaatccttgcaatgaaagaactggtttaaagatgataatattctaaattacagtggccatcaaatccactgcaatgaaaaaaaaaataaaactagaacgatatgcaactgataaaacactcactctccctcccaaacagaaagagtaatttgagtttgaatagaatagatcattaatggcaagattacgtgtaagttaaacaagtttatggtgacaattatacacataatttgattaacaaatctacatctacaagaatgtgacggtacaacacgtttcttgggtggctgcattttgttataaactaataatattttaaattctagtagtttagccacaaaactatacactttgcaggagccataatatttgtgtgactcatcattgacttctttttctcaacactctcttcttttcttgtacgttaatctactattaacattaacatcccgaacacataaacaggccattacagttgaccaatttaagtaacatcactcacctcaaaatcttcatctcacacatcaaattgacaattttggaaaagggttttcagtgttgtattccatcactaagttgcagctcaatatttacattatgatattctgcagtgaaactatattctactatgaagttgatgaatgaataaccacatttgtgaatttgaactagagaactaaaccaaatatggccaacaaataattgggtggtttgtttcactgtaaaatcgtccagttcatcattgtgccaagttgttgaagttctttatgtggctcatgatttcctccagcagcttgtatatctctttacttcttgggtgcgatttaccaccctttcgaaactcgtaaactacaccatcgagttcaatcgaactacaccctggagttttcttgatgttcttgcctttcatttccttccttaacttcactgcatccctccatttatttgcagatgaatatatatttgacataagtacatatgcaccatctctctctggctccaccttcagtagctttttcattacatcttctccaagttcaacacaaccgtgaatcctacaagctcccaaaagggctccccatatataagcatcaggctccatcggcatgttttcaataagctcctgtgcttcctcaattaatccagcacggccaaaaaggtcgaccatgcaaccatagtgttctgtttgaggtctaaggttatacacacatgacatgtctttgaagtacctttttccttccacaacaagacctgcatgactacaagctgttaaaacacctataaatgtcacctcatctggttttatacctcttcgaggcatatcggagaatatactcagtgccctttttgcttctccgtgcatagctaaaccaataataatggcagtgtaagaatacacatccctacacttcatgcctcggaacactttaaaggcttggtctatggctccacacttagcatacatatccacgagtgcattccctatgaacctatcagcctcaatctgttttctatcgatgtatgcatgaacccacttccccaactcaagcaatccaagatttgcacaggaattcaaaacgcccaccaatgtaaagtcatcaggctcaacccctatgctttgcattttccgaaacatatccattgcatccttgaattcgccttggttagccaatcctgatatcaaagaattccaagaaactacatttcgaacaggcatttcatcaaatattttgcgtgcggaattagcatcaccacacttgagatacatatcaaccagtgcattgcccacgtacacgtctgagggaaccctattgtccagtatatagtcatgtaattttctacctaattttaagtctcctagctttgaacaagcagagagaacaataaccgctgtcatctcatcggctttcattttggcatcacacatctcaaagaaagtcaaaatagcttccctggcaaagccattcttcacgtaacactgaatgagcgtggtccaagataccacatctctcagagaactttcttcaaacaccttgcgggcgtaactcacagacccacaaacagaataaagcctgatgagagtgttcttcacgtacacattggataacaccagcccagtcttgacagcataagcttgaacctggacaccttctctgagcgcctgagacttggaacaagccttgagaacataaggaaccgtatagttatcaggacggaagccattgacaagcatctcgcgaaacaaaacgacagctcgaagtgagttgccattaaggctccgaacgatgtcattgcatatgtcgaggccgaggtcctggttttccaagtgctttaagataaaacatagataacccagatttctagaggaagaaatgagttcaagggtcggcggtgggagagggaaagaagcagttttgagtataaaggcgtggatttgccgtagatttttaatgttgtccgttttggtccccccggcggcgacccgaaaagcttgtgagttgacgtaatttgtggttgcccagtagctgctcatacaaatcaacatgaacataaaaacatgcaaggaagaagcaattagcaacgataaatgtttaggtatgaaaatgaaagtaagggaatatgtatgataaattaaaagctcattaggatttttgcttacacatgtaccaaattatgtaagttgaggggcataatttagtacatgtcaaaattcgaagggcatgatttggtagatatcaaagtctgggtaacatggtttagtacataaacaattattgaaatagtaaaattgaattaaattagacaaaagtctttaaatccaacannnnnnatagttcatggggcattttcaatagctttaaaagttcaagggcataatttggtacatgtcaaagttcagggggaaaaattctatgttgatttagtttctcccaatctcaactgttatgacccttttctttttaccgttacattacatggcacaacacacctagaaaacacaagagagttatttaagtcaaaattgagaagtgtagttgcagagtattgaggaagaggttgaggactgtatagaggagcacaattttgaactttaaaatcaaaattcaaaatttaaaataaacaaatatatataggataagagtatagtaagaactattgttttgttcctaccgtagggatgtttttttaaccataaataatttaatggtaataaatgagtagatgtataataatactttacacttgccgtgcattatataatttcttcttatattattataataatatttcataattttttttttaaaaaaaaaaaacttccattaaataaaaaatttcctcttaacgaagtctcttcctctatctctctcactcatcttctatttcttcaactgaagcccttattaaattggcgttttttctcaaatcatccatacccaaatcaccgtccacatctcttataagaactaaaggaatcgatgaaggaatggaagaagaaactgaaggattactggaaggagagggtgagttcgggaagggcatgattcagatgaggaagaaggagctttctttgtgatgcaatgagaagaaaataaagggaaggttgtctttattttatacttgctgggagagaaacttcttgggttggtttgaccacatatagtaataaattgtaaatgtattagcttcaagaaaagaatgggttcagctatcttgaaacatgcttattcccaaacaactacaatgggaatacaattcatgccgtaaccttcttcaaaaacaaaaaataaaataaaataaaagggaaaagaaagatctccaccaaagaagcttctatctaagtatcaatgtaatgttttaaatgtcattgctttaaaaaaaaaaaatgtaatgttttaataaacatttgttttcttcaatattttatattaaaggccatatctttttatattttgaaatgtcagaatttttgaaccatcggatttcagattggaaactttcaaaaaggttttatctttgttttccattctgaatttagatttttgggatagtttgttcttggttcctgagatagtttgttttgggttccttgtagtaacaattgagctactcataggattgtcgcttgagctgctcatatgattgctacttgaacattttctttaaattttttttatttctcactgttggggagcttgcacccctgttgcagccatggactggtgttgacgtttttcttctcttttttctcttatcttaatgaagttttttattcagcaggaaaaaaaagaggtgtcagaatttttaaacagcagtttattaaatatttaatctaataatcttttctcaaaaaaaaaaaataatctaatacacataagcctatattaaataggatgtatcctcaaaagtcacatgtatcaagggttaaaaaaatgtatgtatactatgagaacaaaactagtgttcctatgatagaattattctatatatatatatatatttatatgaaaaattgttcaatagtgactttttaaaatcactgtccgtaattgttacttttttttttagaaaataaaactaaaacttaagataacttaccattgtaagtaatttttttttaataattaataataagaataagaataaaattagtttattagaataattgtttaaaaattttcataataatcaaaaatttgtaaagtattactaatatacaatacaatactttatgaagtgttatttcacttgtcaattttttttttaatttatgtccgcacatctactcatccataaagtcaagaaaatcccaacatctatataaatagtctttctacaactaggtagatggtaaactcggccaccaaacttgagagatgtcacaattttgtaagagaatgagcgagagtattactactccatttctattagagttaattagattagttagtctgttaattagttgttaggaataaccggttcagttagttaagttggttagcttctcttcttaaccgattctatttttcattacctatatatttagctcatgtgtatttaacaaacataattcaataataaaatcaagacaaagtttcttgctttgtttctctcatatggtattagaagaattcttgcccactacttccatggcaagatcttcaactcgttcccaagatggtggtcctccatccacggtcgacactcaaatagctgacatcacatcccatcctcacgttgctcctaatctcaattcctcggttgttcctcacaaaaatcaatcttccaggccccaatctcagaataccttgaacccagaaatggttcattcacaaaatcaatccaccattgtcgatgatcacaagaccacatctcctctacaagccaatcgtctagtcaatgatgatcattccagtccttctttcttagcactagtgatcatcctggactcgtgctcgtgtctattgtcctcaatggcagcaactattaatcctcgaaaaaaggaatcaccatggctttggttgccaagaacaagattgccttcatcgacggttcccttcctcgtctagaaattggtaatctctatctcaattcttggcttcgatgcaacaatatgattatatcatggttagttaattctgtatcacatgaaatttctcaaagcattatgtattttgacttggccattgacatgtggaacggtcttgcttagcggtttaacgaaggcaatggccctcacatttacaaactaactcacccgtttacagcaaagtgaccaatttgtttgttcatacttaactaaaatgaaatccctttgggatgagttaaaggaattttaaccaatcaccacttgcactacttgtggtgcaatgaaaattttcttagattactatagccagaatcaagtgcttcaattcttgactagtttaaatgaatcttttgcatcggttcgagctcaaatcttgctcaatgaaccaatccccaatctatctcgtgtgtctgccatgatcatacaagaagagtgtcaaagatctcttggctctgctgaaacacttcccttggctgctgctacaaactccatgcctactaatcctccaagagccaagaaaccccgcccttcttgctctaattgtggcaaaccaagtcactgttggaatttattttacnnnnnnnnnnnatctactcacaagcatgttgtttaaacaccctaaata

SEQ ID NO: 110796 - DNA, 3898 bp, Cannabis sativa
aatagcaacaaaagataacatacaaataacaaaaaattaacaacaaatgaacaaaagtatttttgttatttttttgttatttttgtgcatttgtgaaattatcccttatatatttcctttaaaaattttattttattttctaaaaatatttaaaggtataatataaatatgcatttacatataaatatatatataacttattcttttatgtaattttttattataaatatatataacataaatatgcttttctatataaatataacctttattttattttcttattatttatattattatttattttttctacattaattttttttgaaataaataactttcaatgtttatttatttatttatttattttacagtatgtgaaatataatattcatttcttattatattttttacacttttatattctcatttggtagatatattaataaatattattaacaaataacaaaaacaatactaacaaataatatatactatatatactaattagtatatgttaagaatatataatagctactattgttaacaagtaagaagtaattaatactatgtttgaaattgtacatactaattagtacacatttaaaattatatagatactaaaaaataatagatacaactaggtatacatttgaaaatatacatactaattagtctatatttaaaactgtatatatagagaaaaataagtaataggtactattaggtattacgtttaaaatcgaaacaactaattggtatatatttaaaattgaatagatcctaataaattataaatagtttaaattatatattaattggtataaatttaaaattataaaatattaacaagtaaaagatactattcggtatatattttgaaattgtatatgttaatttatatatgtttaaaactttatatatactaacaagtaatagataacataaatataaacaaaaaatcaaaacgatattattaggcaatcaaatgctaagtaaaataaaattatactaatttttcatgttaaaagactaatttattagatatgtagtaatatcatatatatatatatccaaacaaaataataataaataaaaaattctacttgttattataggagtaattatggaatgcaattaaaaataaagtacattgataaatattgtatgtatttgtgtaatattatgttttatacgtcttttttataattactttttaaatagtgtatagttgtgggtttggatgggccctagacatgggcctagcttgcctaagcccagggccaagcctgggtcgggagtcgcagtcagggttcgggtctaggtctaaggtcgacatcagattcggactcttgataaagataataaaattttttacaacctattaatagaaatcaatataccaaatagtataatataaaataacatattacaataaaatacaacgtaatacaatattatataatacaatacaacacatcaatcacagtaccaaataaatcctatatctatatgtataattgaatccgattgtaaatatcattcagaagatgaaatgtctattcttaagtaaataagtacaagggaaatagttggaacaaccgttcttcctatatagacaagcgatacgtacgacaataatgcaactttacattcagaattgaataacaactaaatcaactaaaatcactcaagtttatgtatctccctagtggtattagttaactacacgatcaactaaaatctcactaatttaatagcaaataggaaccccaaaaaaaaggacttgactatagatgtttatgtacagaaagagcaatgaaggataactagcgaggcctgatgtcaggaaaaacaccactcacaaggttacttccagcagcataatcagttgtcatatacatattcctgtcataattgggcgatggtgttagccctaatccaactgatgctgatgatgttgaagaggaggcattaaagtctgaatgactggtcttagattgtgaaagcattgagcacaagttctctaactctcgaacaacctccaacattgttggtctcccttttgcttcctcttgacaacacttgagagctaactgcatgaatttcttcacacactcaaagttgtaagaccccatgtccctgtctatcatggtttccatattcccagattgacatgcggtgttaacctatatataaattaacaattacacaaatataataatgaaacattttctctcgacttaatgataataatggtattcaacaacgttaatatctaatattattttatcccagtttttgggaagatgcataagctaaatttggacatgtttattttctaaaccatcattgttttactaacataatcagaagctaaaaagtagattctctcactcaaaaaaactacaaaaagtgtttttgtttgtgcaaagtatcaaagcataattgaccaaacacccaagttgcattagtttacatgaaaagagtagaaaatatacgtcaacattaatcccagaaaaagcacttattataaacatataaatattgtggtacaactcccacctacatctgtaaagaaaactataaagtgcttgttattaattttaccatttgaattatttgagcttcaatgcatagaaggtgcttaaacttaaacttcaagtaaaattaaaagaaaaaaaaaagcattacaagaaaatcaaatgtacctctcgaacaatgtttctaccatgagaaatgggtggcatccctgttaaaagttcaagaaatacaattccaatgctgtacacatcactcttgtcagttaacttgtgagttaagaagtaatcaggatcaaggtagccctgtcaagaaggaaaagtacataattcttttagtgatttgattaactttactagtaaaaaaatgggatacaaaccaacaccaaaagataacttctactcttgtctaaaataattgtggaggtttggccacttgagcatgattagttagtcattgacacctgttatacaattatttatgttatgattttatatcaagttgtccaactcgatctagtcctataattagggctctagctcagtaatcaagagatatgttgtatttgagtaagactacattgatgtatttctggttagcttttgatccattgagttctactctgtaactagaagcattgatcaacaaaatattcaagccacaatagctatcttcttctgttgattatgtccaagtctccctaacttgtgattaaactacataagtctactgtgtatttctttgttcatttcctttgtcattttgatcttagttttaattgttctttgattggtgtccaagacaccacaataacattataaattacaagggttgttagacaaaacatcagaaccgatctattttgttattattttattttcttaagcatgtgaacttattttatgtaattgttcccttcataatgttaaaattgtgtcaatataccttaattgataaaactacaaccttctaacaatgaccaaaaaacaaaaaattacaatatttagcaactaccacataacatccacactatcacatttaaatttaaaaaggaaattagtatcaatttagctatatgttacaagaaatcacataagacaatcaagttaagataattaactatactataatgacatatgaaggaattaacaaactgagatgatttttttatactttcactttgaatgaattaaacttttgacgaactatatatgaatccaagtcgcattcatagtttgtataaaagttagttattaacttcctcccaaacaagtttatattttttgaagctattgaatctattagccatgaagaacttgtattaatagtaattaagagagagagagagagagggaag

SEQ ID NO: 110797 - DNA, 3722 bp, Cannabis sativa
tctgagaaaaatcgtaagtgagaagagatattttttgtagttaaaaggatgtgctcttccgttattctgatacgacttatattgttggatcatggcagtgaaaaacggatcattgactgatcgctttttactacttcatttaatattaaaaataatatttaaataaataaataaaaaaatttattaaataatttttttaaaaaacataagtgacacctcacactcccgactcaatcaaacaaagcaatcagtcaatgatctgcaagcgcgtgtgtggtccaacgtgagagtcctcacccatgtgcacaaaactagtaactctttggacctatacctaattctcaaatttacactatatataaacttcaaatgtagtgtttctatcccatgtgggactccaatcagttacacacttcaattttcattttttttttacacagttttacaaaattccatacccctcgtcttatgtttagtaaaagaaacattaaaactaaagtaaatatcgaattttactttcttgcaaaaagaaaaaaaaaaccaaacaaaagaaaaaaacaaaaatatatatcgatgaaacagaactaaaactagagcaaagtaatcatgcacaatagtcttaccatcacataataatgattttatttctttttaataaccttaattacaactactactaataatttaaagtattttgcatataattatagttatctaagccaaatgtgagcccacttcactaagaccagaaattaagagactggtattcaacttgaaatccaaagttacaagaattcgcaggtgggtcatcataaaagcaagcttcaaacttggggatacatggcaatggaaatgatggtgcaaataagctctggctcataagattattattattattgcttttgttgttattatcatcttcgtcttgagaaaagtctgagtggtctgttggttcaaacacatgagaagaatctgctggctccagtatggagcaataattctgtgtataatttggactatcagagtcaaaaacatcacttttagctgagcttgcattttcatgtttgcataccaccatcgttgccatattcgcaacagtttcagaatctgttgttttgacagttgggttttccaaatgacccttgttgccattctcttcgcaaagaaacttttcattcagagaatcgacctgtatagatgaacaaaaaggtaataaatttaaaaaccgttatgttcttaacacaacccattttgaagtagtgtttgtgtttatacctcatttttcaaagtttcactctctttgagaagaacgtcgtagtcaaactttagtctgtcgtaactggctttcagtgagtagtactccttctccaactgtttggttttgtatcgagcccgcctgttttgaaaccagatagctacttggcggggctgcaatcccagttctttagcaagttgcacttttctttcgggttcaagcttattctctaactcaaagtttttctcgagaaaccgaacttgattagctgagagctgccttttctttccgggttgatggaaacatccatcgtaatcatcatccccattatcatcatctttgtcaagtggttggaagaaggacccatctgtggaatctcctccgcatacattttcaaaactaaacattgattttgaacctgaaatgagaccaaacacaggattagatgcccaaaatagaggataaagacactagttaagtccagaacatcaaactttatttagcagcaaatttagtctttttaactaaactaggccacatctagacagacgcacatattgtatttgatttcacgattgtttaatataaggaacacaaaagagaggaaaacaacagagagcctccatgaattagaaagcatcagagtttgcaaatctagatgcaacatttcataccataaaagttaacaaagaaagacaaagtacgcttgctcaagtgggaaaatagcttaaggaaaagggtatcaataaagagaaaaaaaacagcaatcccaaaaacataattaaggcctagaacagagcgaaagttgcttttaaaaagaaaagaaagaaaaataaaaaagagtttggctagttaccttgaaaagatgaggaagagccaggaatctaaagagagttgagaagatcagaattacagggatgcctttcgtctggtagtagaatggtgatgtttgaaccgccatagacttttccactggccatagcttttgtttaatgtttttcttttgttcttagttttaacaagtacgtataagaattctcaaggtgggtcttgctcttaaatggacgtgaaaggcttgtgacgaaagaagctggtggtgttaatcagtgtaatctggaagcactaagagattgagctcatacccatccctcagatgcatgtgtatgtactgctgtgaagttgcttttttacttggacttgaaatcgctcacacaaccagtgctagttttcgatgaattctttcagctttagttgagatagctcttcttagtctgaaagagagatagagagagagaattatttttgttctctgactgaaagaaagtggcattgaaagtgagaagagattcctctatggggtggagtgtttaattgggttataaagcggatgagcttgttgaagagacagagaccttggttatcatctatggagttccccaaattaccacattacccttgcttcaatagttcaatgaaaatgacacttaagttggatttttttgtcacaattgaaataaaagaaaaatggatgtagttgtacccaaattactttaaaaacaagttgggagacaaagtgatcgtgctttcagaaatttgaagaggattttgtttttcacctaaaagaaaaaatagagaggcaaagtttcctagaaaatttcgtataatttgacataatttacacggtgacaataaattcaatcataatagaaaaacgacaatcattacaaataaaaggttttgtttgaataaattacaaattacatgttaagagatgaaaacaagaaaattacaaaatgaagattatgtgataagagtttcaaaagtctataaaacaaaggtgtgagtaggaaagtatagagagttgatacatagaagggtaatatggtaacacagcagaaggagaaagaaagagtagctgtagatgacaacgaggagaggagaaagaaaacaaaagcaacatgtccaatcaatcacaatcagatagaagctcagaatttggagagtgacagagagagatgatgatgagtcataacccccaaaggacccctttaccccacccccctttgccttattccttctttagtaaactctacctatttattactatttactaatcacacttcactcccatctcttagcttagcttgggttatattattagctccaccaaatttattgaatgccccccttctattctataatctatatttagaaaaggaaaacactaacaattgcatttcaaaattttacatatacatgacaattccacggtgagggttacaaaatgctccctaccactgaaattactttttagcaaataaaaattaggctattgttgaaaataatcttaaatagatagattaattaagaaaattaattataaaattatctttactttatgtccatttttttaaagaaaattatataattaataaaataatattatggtggcgtttggtaatatttt

SEQ ID NO: 110798 - DNA, 1798 bp, Cannabis sativa
  modified_base (154)..(195): a, c, t, g, unknown or other
aaattactactatataataaaaatatgcaaatgaaaaaaaaaaaaaaaaaaaaaaaaagaagaaggttcaaatttgtactcacaagactactaatattgacttacatatattaataaggatgtgtgtatgcttttaataataataataataatnnnnnnnnnnnnnnnnnnnnnnnnnnnnnnnnnnnnnnnnnnaaataaataaataaataatgatgtgtgtgtttaattatgattatatatttgaaaataatctctagcatttttatttgaaagaaaaatatataacttttgtcattttttatctaattttttataacgaaattacaatttaataaataaaactttgacttgggagacatgtcacaccaaactggagttgtactaaggggcaaaggttgatgccaaacgaaacacaattcttatattccaaacatccacatgaacaaaattaaagtacttatatatgtatatatgttactttgtgaaatatatacattgatgctctctataaatattgtgtgtgtatatatatatatatatatataacctactgcacatggaaataaaggagactttacttttaataaacctattagtgaaggaaatattgtgtgacaaaagtaccataataaaatcacaaaaaaagaaattacatgcccgaaaagaatgattcaatggagcgtactagtttgttaagactaatataattaatgaaataatttaaattgtactagtttgttaagactaatataattaatgaaataatttaaattttttatcaattggatatgattagtggagaagttagtttttatttgaatacatttgttgagaaagtttattaatattaaacttttttctaaaaaataaaaaatcgagatagaaattgagttctcatgattaatacttgctaaaattgattagatgaattaagggtttaaattagttggatagagtttgaatcactaatatgaaggaaaaaaaaaagtaattgaaaaaaaaaaagtgtgacattatttaaataattgacaaaatacaacttattagtaaccaaattaggtgtacaaaaatacaaaaactaaaagaaaacaagccaacaagcataatgatccttcataatcattaataggcatcaacaacaccatcagaattagaattgaattatgttgataattcattgatgaaattagccaagaaatagtataacatattggtgtataattatatatattacaggaaaatgtaataccaataagtacttacaaaaattccttcaaccaaaaatgacctattaaattcagagaacaaagaactattcatattggtattcaactcatcaagtggaaatttgatacaacatttcttccaagagctcatgctcaacaagttcttggtttattggattggccccaagtgtaaataattataacgcacataaataaataaaaaataaaaaaaaaacagttaaatacagtaccaattaataacccttttaaggatgtatagtaaatttttcatatgatatttgaatataatctcaattaacaaattcatcaacttttatttagaggtagttttaaatagaaacaaaaatttatgtccatttccctcttctctgtttctcctctcaaccacgatcgctacgccctccctctcatgaatgtcctccaagttttgaatcattgtttgaaatcattagcaaggatttagtatttgcttctgtttcagcaatttgggtaatcctccaaggtccaaacagcaaagctggtaagattttcaaatgttgtagcttata

SEQ ID NO: 110799 - DNA, 5289 bp, Cannabis sativa
  modified_base (5258)..(5260): a, c, t, g, unknown or other
aagcatgccattagaggtcatataagattgaaattgagcagacatgtactctttggcattatcacttctcaaagtacgaatagatacattaaattgagttacattaaagtacgaataagaaaattaaaaattctttgtatgttacattgtatagtcaataaactaacagataaacaaagctgcaaataactgatacatagcatggtgaaaaaccacatgaggtatctatttaacagtatttatgagactttatccaaaaattgttgggctgagtagcaggaaaagttactaaaagcaccatcctaaaaacgccgtgttttattttttattattttattaacatacacttcaaaaattgttgtggtccttcctttgatacacttctcgcttcttgttgatatatatatatataaatatttatatatgtttatatataatgtggttggtattatggtattagttgttttccttactttcatgatgataagaactaattaattgcaataagttgagattacattgctaactaatcattttcactatgtctatgtgggaaacagtttaacctgttgctaacatgttttccaggttgaggtgaaaatagataattcgcaggcaacgcctaaagacacacttctttccagattcaccatagaagcttccctttatgatactaccagctggtacaagggtgatggagatgctgatctactttcttctaatgtggctaacatgaagctcaagactaaaactggtgcaagtccaggctttcagggttattggattggtgggaaaatagataaacccaagctttggtctgcagaaaaagtgaggaagcttttgaaattcttttgcgtattaaattttttaaaattgtgtttaaaagataaaactaaacctaaaatcattagagatgtgaaaactcggaagaggctaccattttagatgttcgagatttctacaagacgaataacgttgtagtttgttggaatgttcaattaagcatcatttgatgtgtaactctatggaatatttatccttttgtgtatttgtgcagcctgatttgtacactcttgttgtcctcctcaaagatgcttctggcaatgtggttgactgcgaatcatgcttggtaggcatacgacaagtatcaaaagctcctaagcagcttcttgtaaatgggcagccaatcgtgataagaggtgtgaataggcatgaacaccatccacgcctggggaagaccaacatagagtcctgcatgattaaggtaacaactgaattttatttataaaagtaacataaagttcttttcgaattttattttataacccattgttatccttttatgtgttcttacatttgaatattttgcattcaggatttagttttgatgaagcagtacaacatcaatggtgtgagaaacagccattatccccaacaccgtcgttggtatgagctatgtgatatatttggcatgtatatgatagatgaagccaacattgagacacatggttttgattattgtgatcatgtgaagcatcctactttagaacctagctgggctgctgctatgatggaccgagtcgtaggcatggttgagagagacaaaaatcatgcctgtattatctcttggtccttgggaaatgaatctggatatggaccaaatcattttgctttagctggtatcaattttgtctctacgcacacaattttttttttctcgaagaagtatatatttgtgtttcttttccctttcaatttgtagttttagtaattaaatgaagacaatgctaacagagaagaactagcaaaaatagaaaaatgactcccaactgcaagattaaccaaagaataccaatgttttagtcattaaattaccttgattttttcaggaaactaaaattttaagatctcattttgttctcatctgggatacaatcctttaatggattttttttatttttgttattgatgttttcgaaagaaaatgctccctgctttttcttgattagtttatcttaaatttgtatgcttcaggttggattcgagggaaggatccctctcggttggtacattatgaaggaggtggttcaagaacctcatccacagatattgtatgccctatgtacatgcgggtttgggacatagtgaaaattgcaaatgatccaaatgaaattcgtccactgatattatgcgagtatgagtttgacttttttttttcttgtcatcaaaaatagatgaaagcttcattcattcaaaaaaaaaaaaaaaacaaagaaagaaatagatgagaaacccgcccttatctatgcttaaggtttctaaaaaattgaatggcaggtactcgcatgcaatgggaaatagctgtggtaatatacatgaatattgggaagcaattgatagcacatttggtctccaaggcggttttatatgggattgggttgatcaggttttgaatccttacctttagagatatttacacagtttccaattcatgatcaatgttttttcacctgctttctttggtcagttatttcattatattcacttccaatgctttcctgattctttgcgtcaaagtccttttgtttccccctttcaaccccaatcgtaatatgctaacaattttgtgctgctcacaggctctactgaaggatacagggaaaaatgtcaaacgctgggcatatggaggtgattttggcgatgttcctaatgatttgaacttctgcctgaatggtgttacttggccagatcgaactcctcatcctgcactgcatggtaacttgacgaattattatgtgtaccatgtaaataattgaattatcatgtgtacgtatacatataacataaactatatatcagttttcttacatggttttttgttgttttcagaagtaaagtatctctatcaaccaatcaagattgcatttacaggaggttcattaaaggtagttacacattattctttaagcttcatcatattctctttgaaaagtttttaacctattttaaacttgcagataacaaacactcatttttttgtgacaaccgaaggattggaattcaactgggctgctcacggggatggatgtaaacttggatctggagttttatctctcccagtaatagaacctcaggatagacatgatattgaatgggagtcatctccatggtataatctgtggctcgtatcatccgcagaagagattctagtaacgataactgctaagcttttggattccacaatctgggttgaagctggtcatgtcatctcgtctgcacaagtccagctgcctgccaaaggaaaaaatactaaacatgtagccactctttcatttatacatcttattttggtgttgatactgaattttgctttttttttattttatgtatatatatataaaaagaattgattataagtgtggcgttaaaccgtctatgtttttcaggagattagggctactgatggtacctttgctagtgaaattctcggggacacgattaaaatgagtaaggaagatttgtgggagatagtgtttaatgttcaatctggaataattgaaagctggaaggtacaatggtttttcttgtgtggaatgttttcttttgtattcatgtacatctaagggtattctttgctgtattatctcttgataatttaatttttcgaaaggcttgaacccgaacacacttacctttggatgaaaaacttgctgtacatatgaatgttttggattctaaacacattttactaaatgataggttaaaggagttgttgtgatgagtaaaggtgtatcgccatgcttctggcgagcaccaactgataatgacaaaggaggagaatccagaagttaccttgcacggtggaaggctgctcagctcgatactcttcagtacataaccgaaagctgttctatacagaatgtatcagaccatcttgtggaaatagctgttgttattcttggagttccaaaggatgaggagggttctgcctctaatttggtaaacaaaacagctttaattaaaactgaggttgtttacacaatcaatggctctggtgatgtcattatgaactgcaatgtagtaccaaaatctgatcttccacctttgcctcgtgtgggagttgagtttcatttggaaaaatcaattgaccaggtaaaatggtatggaagagggccatttgaatgttatccagacagaaaagtcgctgcccaaatcgacatctacgagaaaagtgtggatgagatgtatgttccctacattgttcccggggaatgttcaggcagggctgatgttagatgggtgactttccaaaacatgaatggtattggcatttatgcttcgaaatacgaaaactctccacctatgcaagtgagtgcaagtttcttttcaacggcgcaacttgaccaggcaaagcataatgatgatcttgtcaaagaaaacaacattgaggtaatttcctctatttctttcaagatgaaaataatttgaataccaagaaagtttggtattgaaaataagttgatgtgttgttattgttacaggttcatctagaccacaagcacatgggggtgggtggagatgatagttggtcgccgtgtgttcacgacgagtatctcatccccattgctcctcattccttctcaatcaggttctctccaataacaccagccacttcaggtctggaaatctacaaatcccagcttcagaagtagttgatttcaagtttactagtgtaaaactggaaatggctctaaatttgtgaccacttgaccaagatcaaatcacttggtatcatatgttggatgttgatgcattgcatttgattttggttagtaataagaaaaacataataagttgtgctttatatttgatcatatatatatatatacactagaaattgcaactcatgtccattccattacctcgaacatttttttttctttttcaaaaaaagacatgtaaatttataatgcattaaattgatcgacatctagctaaactgtatttcttaaaataaataagatcaagaacgataaaaaaaaaatgtacacaatgacaatgatattaacttgttagaccatctgatgtaaatattgtgttaaatttagtataaaaaatgaacaaattttatatttagcacaatatttacaattgtgctctaatgcacaataacattttaagaagtaaattgatttaaaaaacaaaatatcattaatgataaacaataaattaaataattaggatttttgccccttgannnttgacatgtaccaaatcataccccctgaa

SEQ ID NO: 110800 - DNA, 8705 bp, Cannabis sativa
tttgtaatgtattgataattgtaatcctcattcatgagtcatactgagaatttatgcaagtggtgtaatactcgttacaatgtaaaaggattataaaagttaaaaagtccaaccaaacattataattgtaatttccatttcattctaattttgattacaccaaagcaaacatgctctaagaagacttgatcaataataagaaaaaaaatagctgattatattgaaaaagaaaaataaattttaataaaaagtgtaattacaaagataaaaataaaacaaaacaaatagacatgtaactaaaatattgatcaattcaataccatttccagcttcgttcaccgagacaaaagcaaaaactttcctctcacttaaagaaaagtatcgctagttataaactgaaattcctaaattaccctcactaatcttccatatcaacatacaaaaactactttttcaggtataaaattgtaatttccaaataaacatgtcatgaaaaagagccacggctagttcaaaaaaaagcctacggctgttattatacttacatacgacactgcgttttgggtcccaaaagggtcggcagtccacgctggagttattcctctttacttttttttttttaatttccaattttgaccctctcatcgttttgagacccaaacccaaaccctctgttcttttccttttcgttaattgaaaggaagatttcttttttatttttttggttcattacttgattttgatctgtataataattctgtaaatatatataaatatataaaaagaaatcgggatcggaaccctaatttgtgattttgggatctggagattccgatggctgatcgggaggaggaggatcttaaaatggctatgcggatgagtatgcagaattcgccgccggaacctaagcggagtaagcctagggacgtacctgatggaattccgaccgatgagtcaccggagatcaagagccgccggattcagcgagaactcatggctgccgctgccgagaagcgaatgttagccttcaagaaagattcgcctcctccagcttcttcaccggtaccggtttctgctggctctgtgatggtacctattatggattcggattcggttccggggtccatttctgtcaagaaagagaaggaaattagcgttggggatttgaatttggggaaggagctaacggaagctgaagcgaaccagctgttttcgatggtgtttggagctggagtctccaagggtattctttcgcagtggagtaatcagggtataaggtatgtttgacatttgaatttgaaaccccaattttggtttcgaattttttatttttatttaatttttaaaataacaatgcgattgactgattgagcttctcatgtgataataaattaaattcatatccgcaaagtgttgttggtagaacaatttgattgccctgtctcaaattagggttaataatttgcattatattcgattgtacaaagtacaatgtcaagtggatagatacctgggtagagtgaaaggcaatacacattattaattgattattttccctttatttttattgtatgcacatgtgattgaactctgaagcatataattccatgtcaaatgtacaaataaagatactttctttgttcttgtaaaacaattttttcttgataatgacaataccaatcaacacaggctgataagtattgatgccttttacactatatttcaaataataaggtccttagatgaaatatttttacttttgccacctgcaaataacttaataacaaggacttgtaaagcattccatgaccatttggcattgtgttgatgaacaaataaataaatatggaaatagttatatatgctcaactgtcttaaagtaatttacttccatacccaattatctctcaatttttgccatgtcaggtgctgcttggttcactatgttttactgctgcaaagacaattcaatttgaacttttcataataaatttgtaggttcgtcattttagaacagacatttatcaatatttatgttcacctgtgttgcttttcatttttcgtttttttaagctctcccttaatggttttttattttatttttgtaactacggaagttcactggagtagcaactacttgttttaaaaaatagaaaaattatgacactctatggtagcatctcgtcagttgagaaaagtataattggctttgttttcactaataatgcttatgcttttatggtgactggtctacttaaacactttctctttgtcccttatacaacttacaagtaaattcttttctataggtttagccctgatccagagacatctatgggtctggtgcagcatgaaggtgggccttgtggtgtcttagcagccattcaagtaatttcttgatttctcaatatatagcatgcttaggttgttactgcaatttgattgaatttccctacttgacgtgtctaatcctagaaaaaaaattatgatgtggatacatatttagctaactacatatttacacttccacgatagtttcaatattcaaccaacctaattctgaaattgagttagaaatgttttaatttatttgcatactatgttggacctttaatcaatttagattgttttattagtttatggtacactcctctgatcgcaactaaaattttcccatattttcacaagtcagttgcagcaatattcatttctcttgcctcagccatgtaaatccaaaccattgcccatatcacatttcaaatatctttgacatgtgagatttattgaacctcttgagctttaagatgtccattgttgacacagtttctaaccacattaaataagtattaactttgtagaaaataataaccatcctctatgctatattgtgcagtagattacactacttaagttttacacactgtcagcttggttccactattagttttttatacattgccagtagaatctactgtactcttattttgctgtttggttaaatatgggtgacaactgtgtacatcagaagtcttaacgtgccagggatgaaaagggccatcctttacatcttattgtgcagtagaatctactacttttgtttcatatttaaccagtaaggtttcactatgcataacctagaggattttgagcttcacatgctatactttctctcatttttcttatcaacgtgtagtgtggccatgtttttgttctgcatataaactatagcttgagcggtttggtcaggaaaattttcctcagaatacagtgaattattacaaaacattatctgttcacagtcctattcattgtttgtctgatgaaaatacatgctttatattaatttaatgtcagttgattaaactactataccacaatacaagtcagttttgttggtttttcagttgcagaaacttggcttgtagtgtgagttttatttgcatgtccttaactctttttattattgtaacgggtttagattttttttcttccttttttttttttttttaattttctggtgcactttatagtttttagtagtttctgttaatggtttgatattttatttgtacttgggtactagaagtgaaaatggtatacatggaatatttgtatatatggaatatttctctttcatactctgccaaaagggtaataaaaagcaaccaatgcaatttgaccaatcatctactattgtttttttagactattaaggctgaagagctgttattttgacgtcttgtagaaattgtggattgaagtttatattagtttttactacaaaaggatgttttggttcctggtaagtttatgtcagtaaagttctgcttgagacatctgtttggttgattgggttaagaaatttcctcccaatgtgtattgtttggaaatttcacttattgatcccaatctcttaatgctcctttatgtctttcatttcatttgggaataaattattctgtttccgttacatcttttaatttgcagtttttgtgcttttacgttttgcttcttgttattttgttcctcctaaattttaatgatgtttacatacattgcctagatgatattgtcttatccattttactttaaaatgcacatttgtttttttagagtatttttattattattatttttatatgtatttctttattttcttgactgtatatttattttcttattacccactatctcgttaattactgctttatacttatttcttgtatttattttctttcttttattgcaggcttttgttctcaaataccttcttttcttcccagaagaaataggtaatgcagaacagaatctgtctgcttcaaggagattagctaatagtcaacttgttgcatcaaacgatttttcttctctttccgaagatgaaaaatcaaggtgattaaccttccatggttttctgtactgtatagctgttttaaatttagctaaatgtataataggtttaagaattatgttgcttcgctcatgcctgacgttttcaaccataattgatagaaatgttataaattgacattttcttttgtgtggatgtgtgtaataagatatattaatatctttcaaggacaaggaatgatttgtgtgtgtgtgtgtgtgtgtgtgtgtgtgtgtgtgtgtaacaatgtatattatttgcatgtttcttttcttattcatgtcaaataagatactgataaattgtttgaacagagccctgattagaagtatgtgtgagatattgttcgtatgtggaagtaataaaagggcggttattgcaactttgagtattgttggacataacattgaagaatctgaaggcaatttgacggatgaggtaagactattttaggcaggcatctgtgtggcattcattttacattttgcttgagctgttgattttcaacttatgtgattgaatttgaatgacttgttgcacagttgttggtctatataattttactcattagtgtatggtttatgcagaacatggcaaaagtgcttgaggatctttcaattgaatcagctttagacttgcggaaagtgttgagagttaatacttatacattgcaagcaaatgcacttcaaaagcttgaagcaatggttcctgtattccggagtcgaatgggtgccttgctattccttctttcagctttactttctcgaggactggtatgcttgctagcttgaccatctttctatctttgcatgttttcttgttctagggaagtgttatgggtaatggcctgttagttctggtgctcaaaggaattatttgcttttattattagcctaaacattaaaggtggggtggggtggggcagagtcttgtgtgtttgataattgtatttgttatcttggcttttcccagaaaggtttgtcaaaggctttaatttgattagttggcctagcaaaattttgtggtcctcttgacatgggctgaactgctgactgatttattgcatacagctgttaattttttaaagcctgccataaatttcttaatagctattgatagtctcagatgaaaatttctctatttttttaatagtccactaattcctttgcaattgaacaaaattgcttgaatttctgcttcatcaacacatgagtaatccatgaaagtattgctttggtaggattctgttcaagctgacagggatgaccccagcttacctttggttactgctccctttggacatgcctctcaggtatacgatcacatgtcataagaaattaatcctcgggtttcgtgcttcagtttttttgaaactatttaaatgtttacacaggaaattgtgaacctgctgctatgcggtcaggcagtccccaacgtgtttgatggaaggatggatttaggtggtggcatgttcttaaagggcatatctagaaccgtggaagttggtttcctcactctgctggaatctctaaatttctgtaaagttggtcaaaatctgaagtgtccgaaatggccgatatgggttattgggagtgagtcccattatacagttgtatttgctcttgatacttctgtccaagatgagaatgaattggaagaaagggaatcacaaattcgaaaagcttttgatgcacaggatcagagtggaggtggtggtttcattagtgtggaaggctttcaccaagttctcagggatacaaacacaagacttccacctgagaaggtggaccacctctgcagcacgggttttattgtatggagcgagttctggcaggtaattttagatttggataagagtatgggaggcttgaaggattcaacaggtttaatgggtaagaaggttttcgagctttatcattttaatgggatagcaaaatcagatttgaatggtagccaattgatttctagagagactccagtccaaaggcctagactgactaaattgagggtctcagttccccctaggtggactcccgaggagtacatggctgatgtggcagtgtcctctagttcaggtggaaatgaatccaaagggaaagaaaatgaagtgacgaaacccgagcctcctcagcatgctcctttagtggactgcataagaacacgttggccccgttctgtatgcaattgggcaggggatccacctagcatagtctgaaactattttggtgtctgttttctaggatgctctttgttcatacgaacaagcataggtgaagcagcaaggaaatgggctcgtgctgttttcgagtctcgggacactccagcacatgaatagggtgaaacttttcaaaagttgtgtacattgttgcttcactcagttcgattttgattgatatgtctttcttcaactgtttaaaagtgaggatattctgtaatattgttgtctgttggaaagtgtaaaatcaattcataaatgaactcttcttctgttgtggtttagggaaagattagttacttgggaatgtgtaataaacatcgagtccgttttggcatattacaattgttgtagaagtagtagtgtagtagtagagtttcacctatgtggtgttgaaatttgaatagtgaagtcattttattaggtgtgatatggcagatattacatccttcatctttgatccttcgaccaaaaaaatatggtcaccattgttgtaatcactatcattgttatttttcaactttgttcccatgagttagtatatcacattatcaccttttccttttcccgacggcttttttattttatatttataaataaaggattattttgctttaacaattttttttcccttgtagatttaacaatttattatttagctttttctttgtttgacattatttgaacttagagggacatccggaaagatatattattgcctatgatcattattatttggttatttaggatttttgtatgacttcaaattattcagtgttgtgaatattttagcttgttaaaagtagtcatcgaactatttacagtatttttttgatcgaaaactcaatttaacttatttcgtacttttactcaatgagaaaatgagtcaaattttacaagattaaacttatggcacttaataaagaatgatggaaaagaagaaaataataaataaaaatgaaatagaagagcaaatgaataaaagattgaattagtcctacttactcttcggaacgaagtggaagaagggaagaggttcttgaactaggaaaaaaaaaaggtggtcttactatcaattttttttacacgtggcaagcaaaatgataatgtagatgtgtataccactgtcctattatgtgtaatttaaaaaaaaaaaatgaaatatgtatcttttaaaacgtattaaactcatttatcaaaaaaatttattaaactaaaaatccattaataattaaaaatatttaagtagttacaaattaaaaatcgttaaattatttattttcaaattaatcacacatgtggcattgccgtgattataatctaaataaccatatcataattattattttgtttgctacatatgataaaacttgatagaatgattactttgacaatactgtgaatagttcgggactatttttaatggatggaaaaattcaagagcacaataatatataagtcatagttcggataacaaaaatctaaaataatcaatttaatacatgataaatagaaataaatatatatttatatcattttgcttataaatagcaaaatgatttttaggctatttatatcctaaatagccttattattttgcttatagcactttgatttttttcatttgtgaattttagaattcaaaaaatgataacaaaagaatgatttaatacatgataaacagaaattaatttatatttgtataatttttctttagagaaatttgcacttaagacctcctaattttattttaacaaatttaactaacatatttattattgtggtgcgtatgtcacttcaaaaataaaaatatcaacctcaatattaaattgattaatgagaagggagaattcatctgtttaggtcacttgagaggggcagctgctccttttgaagttaggggtgtgcaacagttggtttagtcgattttttacacaagaaaaattcagaattcgattttcaatttttatagttataattcgaaaatcaattgaccattatataaatatatatatataaaaaaaaaaaaatcaaccattttaatctacggtttgatcggtttaaaccgaacaaaccgagcttcatctttttttttttttt

SEQ ID NO: 110801 - DNA, 3235 bp, Cannabis sativa
  modified_base (352)..(352): a, c, t, g, unknown or other
aataagtgactcgctaaatcacagctgggacttaggttttaaaccaaaaccctatctacaacaacttaatatggcaataccctaaactagtagggagttaaccaaccagcaacctgaaactagcaagaatcgacaagttaaatttttggaataccctgctgcaaaatttgggtaaccgattttacccagaaaacctaaaataatcgaaaccctaaccaaatcgattccaaacttaaccaaactcttcagacctgcatattacagcccaataaaccatttccaagcaataaaacaataacccaagcttattatccaaaatcaccattaatgagccaagcttgagttctaaaantcaaagcttgctcaatcaacactatagcccctaaaaccacttcaaatcaacacatataaacatattttaacttctgaaatcaataacaaacaaccacagcaggaacaacaattgaaatctcaaatcatgcaaaatttcactttcttacaattcaagaaactaaaaagaaagttacaagaggcttaccttggcttggaaaatacctaaagctgctggaaaacacagcaatttgaagaaaaacaatgaaccctagccggttgtatagggtgcgaaggagagagaggcttgagagaaaagagaaatgcttttcttattttgaataatgagtagatgaatttttttttatcaaaagataatatcagtctaatatccatataaataattagattactaaataaaaccaagtccactaaaggacaaaatacaaatggcaaaaagaccattttgcccttcccacactaaaattcatataatggcacttaggagtattttggaaaattctaaaattccgactactcccgacatttctaatgtctactttattgtcctgctatactaaaactactaggatgtgtttctaatagccaaataccgcgttctaatgtttctggacacaaaacatgcaaaattatgaaaattctatacatgacataaaaatgcattctaaattcaaataaatcatcataaataaataattcaatactaataaataattttcataattaagccctaattatctgataatttccaaattaaagctaagcggtctttacagattgtcagtgataaataaggttctgctattagttgatcaaatttaagctcaacaactagaaaagcacatacaaaaattctaatttaataaataatggaaattgtacagtttagaaataattcaaatttaagtgttttggaaccatctagcagttaggaatcattatatgcagtagccttaaatatggaaaaatagaaatccaaaaataaagaaaaaaagaaaggaaataacctatcatatcaattaacctattgaatataaaacaaaaattaaaaaataatctcggtaatcagtataacgtgtgaaaaatacaaaactctagtgcatgaatagttgaatagaatttaaggaaacaacaaatattctaaaattgaaaaaactcttgaaaataatacgttagaaagaaaaaagagaacgagaaaagcaagagttttcacatctatcgttattataaaaaataaacctacatatatagtatatgttttggaaaataaaaattctcgcactgccaaaaaatccaaaattgtgtaaactgaatcataaaattataaaaattttaagtccaaacttggataatggagaaagaatttaaggagaaatgtgagatctttatcatattaggcgtttcatattattaccattgagatttaccttgtaagatcataacgggaaacctcaagagcagttactcaaaccaatacttggcatgattgaataagttaactaaaatgttgaaagcaaattggatacaacaatcttgaggaaggaaacaacacctttgagtttattgtcataaatgcaagaggcaacaatattgtaaaatatttacctcaacttgaatccaaattgatatttttatcatattagagaagaggaaggacacatcaatggagaacttgaaaagaaggtggtcagagatgtaaacaagaaaaaattgaggaaaaagaaaataaccgccttcgaaaaaaataactctctttgcactcttacaattttttttaatactatgccaattttttttttattattattattttattcatttattcattataatatgttgaagtttcacgtatatttagttgttcaattatttttgttagacaatatattttgattttaattatatataacatttatatataatttaatcaatgaataatgttatttaaaaaaaaatgcttattgtaaaatataataaggaaacatataacaagaaaattaaatgaaaacatgtttgtaaaagacatgggttatgactattttgaatattaaacagactgtgtttgtaaaagataaaagacaaaagacaaaagacaaagagaaagagagcacaaatgcacaatcatatagttgacatgtggtccccagaattatcaaaataactgaagaagtggggaaaggatctggaccacgtgattcccttttagttaataaaaaaaaagagcacacaacacttttcttgtaataagtcttagtttccatacaaattcttcaagctcagcaacaaaaccatcaaagttagtcccatgtgtgttgacatcgtcaaggtcagtttggcaagttgtgcacacacaaaaataaaatacttctttaatgtccttggataagtcaacatgataagtcaaaattaaaattagtaaacttatacaccaatttatttctcctcattagataaataaattaatggggccaaagaaacaagagcccaaaggaacaagttcaaatgttatcatgattttttttattgaaatgtcactattgtcatcaatgtgacctgtagatatttataccattaatttactaaaaatgatagttttgttcaataaaactgtatctagaaagaattaaccaaaatcttagcactataatcgattttggcttgttgagtttgagatgtattcaatagctttttataaatggccttttcaaaaaaaaaataaaattgaataattaccttgctgtgaataaatttggtgtctttgacacttctaagggttctgacattttatcaacgagataggatttcacgtatatcctgtataaattaagattagaaattatgtaaatgtttctctttccatgaaaataagttttttttttttttt

SEQ ID NO: 110802 - DNA, 3554 bp, Cannabis sativa
agattttctgctttgtacttaaggtttgtgtaaatgcagttcctatgacaagttgaaggcaatggagcagacattgactaaaggaagacaaattcaggatgactgtgcttctgcagtgaagaagcttcgggctatgctgcattctacagaagagcaacttcgagtgcacaagaagcagactttgttcttgacacaactgacggcaaaaacactccccaagggtcttcattgtcttcctttgcgccttactaccgaatattataccttaaatacttctgagcagaactttccaaatcaagagaaattggaagacccacagctataccattatgcactattctcagataatgtattggcagcagcagttgttgtaaactcaacaattacacgtgctaaggtattgtgcattaaaacatgcctcacttttcattctcgtttacttttctgtattccaaggaataaagaagatgatacaactatggaggttcattaattttgattgataagaccttagcttttgattgaaactcaaagtcattgtgcattgcttgtgatctttgcaggatcctgcaaagcatgttttccacattgttacagataggctcaattatgcagcaatgaggatgtggttcttggtaaatccacctggaaaagccactattcaagttcaaaatattgaagaatttacatggttgaacgcaagctatagtccagtactcaagcagttggcttcacagtcgatgattgattattactttaggacacaccgggccagttctgattcaaatttgaagttcaggaacccaaaatacttgtccattctaaaccacctccgtttttacctaccagagatcttcccaaaactcaacaaggtcctgttcttggatgatgacatagttgtgcagaaggatcttactggcctttggtctcttgacatgaagggtaatgttaatggggccgttgaaacttgtggagaaagtttccatcgcttcgataggtatctcaacttctcgaatcctctcatagcaaagaattttgacccacgtgcctgtggatgggcatatggaatgaatatctttgatttggatgagtggaagaggcaaaacatcacagatgtataccattcatggcagaaactggtaagacatgttcaaacttcacattcggctgtgttatcgatatatagtcagctcggttttttatatttaaatttaacattctatttgatcttttttggtgctcagaaccgtgacaggcagttgtggaagttgggaaccctgccacccggtctaataacattctggaaacgcacttttcctctggacaaatcctggcatgtgctgggtctgggatacaatcccagcgtgagccagaaggatattgaaagagcagctgttatacactacaacggtaacatgaaaccatggctggagataggcatatccaagtaccgaaactactgggcaaagcatgttgattatgatcatctttatctgcgagactgcaatattaatccatagttgaagcttttctttcgttctttctttttcttttttaaatggtatatttattttctgaagaagaggggggcaagtgttctgtggatatcagccagccaggccatacaattttacaggtctgcaaatcgttctgtgtaggcaattttgattaccaaaaaaaaaaaaaaacaactatagcctctaatttgattcatttgtatacattttttatttattttaattaggatggtgagaatatatccttgtgttacttgtctgcagaatatggcatgtaatgtacttgtaaataatttgaagctttgatattttgccatattaatatctttagttgcatgtcataatatatctcttcttcacttctttgaaagccatgttttatattaatctctgtaattatcgttattattattaatattaagaggctgttttgtctggtggcgtcgttatccgcaccttgtttatttgaatggactggacttaataattatggttgttaaggaaattaattaagaaaaaagatattagttcgtgtaactggatttcacatggcattggcccacttcttgcccgacattgaggttatcatacttaacctctttttacataaaactttaaattaatgataattagtgaggggcccagttgatttatttatcaaactcggctgctttagagtttagactttggtttaggtaaataaatagggcatggctggctggcaatattcgttcaccatgtgagttgagcttgctgtctttttctgctatgactctatgataagcttccagaatgtttgttcctatatcgatagacttaccatttgtattttcatatggggcatttactctaatagaaaaataagacaaggaataaaagaaaataattaatttagaaagagagagaataaaaaggattaaaaaatatattttagctaaggaaatatagtgagttaaaatacaactatacttgagctcatttgatggagttattacccacttcacaatttataccatcaatttttagattatactgtacgaaagttgttaattaaaaatgagcatcacaacaaattatctaataattaaacataaacaagctcatcaaaactgtgagttagaaacacaatacacctcctccatgtaactgtaacatctcatctcgttctatctggaaaaataaattgtaaaagagctattagaaaatgacgaaaaatgtaagtgtagaatagcgtagtcacgtagttttaatagttgaatgaggccatcgttcatttagaaaaatagcactactcactagtatacaaaaatatatatatatatatatatagtatacaaaaatatataagatatattcttgattaaaaaaaaagaagaagaaattatatatagattgtttgttattgaagtccactacttggaacatctaaaggcccaatactacaatgactgtatagtatggctaataataggccgatccaaaataatagatacatttcctatttcaattttatgaaaattctctgtttcaaaaaaagtaataaataatataataacattttccaatctctgtccaatgttttttttttttatttaagcgtttacatattacaatatgttttacctgagactcgaacccaggacgtccaacactcacacacccacctatggccacttaagctagccccaagtgataaatgttttacaaaaaaatcaaaaaaccccgaatctctgtccaatgttgacgtaaatagtaggactaaggtgactttttttagttggaagtaatgaaatgaaatagaatggaaatgaaataattttccatttatttttttatttggttgcattttaaagtattagaatattattccgtgttctttctaatattttagtagaatgatcattttgaaaatgaatgatttatgaaagacatgctaatataataagagaaaaaattaataatttttttattagttttttttatcattttaaattttatgcatcccatatattttctaaggtgtcgtttggtaacact

SEQ ID NO: 110803 - DNA, 4522 bp, Cannabis sativa
acaatttaactaattttaatacttcttttgaatttggataactgtaataatttatttttgatgtttgaattttttatgactttccctgaactttatatttattcaatcattcaactcaatttttttaattgagaaattttaattgcaaaaaattaagggttgtaacccaatccaacctaacccaacctgatcaataatggattggtttgggttgggttataattaaaacttgatatgaatgggttagaatttaataggccgatctcattgggttggcccactaaaatagctttaacccggctaacccaacccatgcacatccctaattaaaatagtaattttttgatattgatttaacactaaatttaagtttttagggtctcgtactatctttcctctgcgctctttattcatcataaaccgaccaaccgcagattacatgattcccacgtgcacctcggttactgtgtgtccccacgcgccccacatgctcttactcactcttttctactttacaccaaaccatctcactcacaaggaggcgatatccccgagaccactgtcaaatagtcaaggttaacaaattccaccttatcaccttcccgctctccacggttctcttgtgtacccgcgccgcactcgatctttctctctccacttatcgcaaatcgcaatacaattcaagaatcaagttgacccgttgattattaagccaaaaaaaagttgacccgttgatccatttcctgttccgaccgccagtttttctttctttctttttttttttttcctttttttttttttcactatcagagaaaatatctcttatttatttcactctttatcttatatcctctttatctttacctttctttttctagctttagtgtgatctttttgtttcgttacgtaaaatcttccccaaactcagtaacatcacatttctagggtttcatcctggatcttccactttgctgtctgaatatttttatttttttatcctttacttgttcatcactcgcttatctctgcatctctattatctctttttggaacgttgaaatctaaacgacattggtttattgcagaaggtattttcctatttccttccgctacatattttcgttttctgatagtgattcgataatgggggtgattgggtttctggtatttgttctggtgtttagttgttcagaaacataaatttagtaatttgatttcttagatgggttttgattttcttgctatcttgatattttcctgggttataatggtgagatttggcttagtgaattttgcggtcttgttttagttgaaaaaaagctgggaaaggttctttttagcaactttcttttattttgcttttcatttattcttctactaactgggtaactatgagtttattagatcagaattcgcttaactatgtttgtgttttttctttttcctttatttagaatcagaacccagaatagtgtctttggatttgtagcaatttaggcgcagttcttagtaaaaattcataattgatgaggaagaagagaaaaggaagtgatacagacccatgtcctaatgtaccagacattctatcgtcaacccaccattcacaatcgtcgatcattacctcgcattattcattagaggattatactaggctgaagaagaggtgcaaagaagattcttgtaataagcctgttctttcctataaaagcaggcttgcaggtgttgctactgcaccaccatgcggggcttcatctttaggcacacccgggaggggtgttaagaggaaaatcggttgcatcgatgtcgctacacaaactggtaggaagaataagatagaaaatgactatgtatcaggtgccacaattggtcatggaaagtttggttcagttcggtggtgtcggtctatggctagtggtgcagaatttgcatgtaagactctcatgaagggtgaggagacagttcataaagaggtggagataatgcagcatttatctggtcatcctggagttgtcacattacaagcggtgtatgaggattccgagtcttttcatcttgtcatggagttgtgctctgggggacgcttgattgatcagattttgggagagggtcgatattcagaacaccgtgctgctaatgtattcaaggaagttatgtcagttgtcaagtattgtcatgatatgggggttgttcatagagacataaagcctgagaatattcttcttactacatcgggaaagataaagcttgctgattttgggcttgccatgagaataactgatggtcagtaacatatacacgtatattcatatctgtgttatgcatttgataactattctttttacttgtacatatttttacttttacgttgaaaaatgcgcaatatatatgtctaatattggaaacaattatcaatttagaagagttaatcagttgtcttctaaggttcctctgtagattgacaaaaatgtgttttttttccctccatacacgatgcttatgtttgattgcatttggcgcttttctttctccaggtacttgtatgttggaacatttgtaataagtctgtccagtatgtgctgtttacaaacgattgccaatttaagcattcataagtcgtttcctgaatggatctttaaagcttgacaagttattttgttgtccctctatgccatgtaggatggtgcccgtgtgtctttatctaagttggccactatgagtacccaatgaagccccacttaagacctacgtctgttctaactcctatctgaaaggttttggttaagtttgtctatcacgaacttatttttatagtactttgatgggattaaaattttacgctagtgtgatggccaatatattactagtaacaacgccaaaggttcagctactaacatatttccttaacatgaatttagaatttcaagtagttggattttgtgttgaaatctaggctcagtgtatataagcatctctctctctcttcagaaatattaaaacctagaaatttttctgtggtcactacaggtcagcaattgactggtttagctggaagtcctgcttatgttgcaccagaagttttgtcaggaaaatattctgagaaggcagatatatggagtgctggtgttctgctacatgttcttctggtgggtgccttgccatttaaaggagactctgcaggagtttttgaggcaatcaagactgtgaagcttgatttccacactgggatttgggaatcagtatctaagcctgcacgagatcttattggaaggatgctgacaagggatgtttctgcaagaattacagctgatgaagttttgagtaagttgaagttctgcttaaatttattgactagtctatttcagtgtatccacatatttcatttgtgaaggttcatgctaaaatgttcttggagtacagcatagttgaatacatttataaaattgtgtatctacaggtttagaaggggttaattttgatgatctgactattcaaccaaaacaggatatatgaaagttatttttctatattttctccccttttcctttttatatgattttgattttggtactacgcatgattgtcctttgtgaccggtttatcttgttatgaacatttgttgaaatttggatattgttttgagtgtatttgttcatatgattgatgcaggacatccatggatactattctatactgcacgtaccttaaagacacttcctttaaagacaaaaatgaagaaccatcttggagcaccttcccatcagcttgctattagatccagattaaaatttgaccgaaacaggattgatgatggttctttcaatgataattcaagttcattttcatcttctgatagttgcaagtcagcagatgaggatgatgatagtgagctggtagatgcactggccactgcagtttcacgggtgagaatctctgagccaaaaaggagcagattgtgtgttccggcaggtccaattgagcagcaacgttcatctaacctaaatgctaacaatctctgtaaagcattttgatcttgctgacggcaaactaacaccagtatcacgatctccaatccttttaagctggggaacggaattttgcctgccccagtggaattttcagagggttaagggtaataacaatctgacgaattcactatgacttcttcttttaatctaataacggttttaacctaatgaaactgagagaatccatgtacagattgtgtaaatagaatggagtgttttcctctaatttgtataaatattagttaataataaaacttagtgattggatatttctatttctggtttactggaacaattcaaagctttaattaatttactagtagttaaacacctatttctattttggaccttgcaaatgtggtgatgttctttaatatctacgggaattggaccacttttattttttgagaaatttacaaaaatattagaatttgggttaacttttataaaaatattgttatacggaaaagtttttaaaaatactgtatttttataaa

SEQ ID NO: 110804 - DNA, 9156 bp, Cannabis sativa
  modified_base (534)..(535): a, c, t, g, unknown or other
ttttttttttttggaaaaagaaaaaaaaatcaacctctgtattcgaaaacacatgtcagaatatgaagttgatggtaatcctctaatttttaagaccaaatctattggtagttttagcttcagtttaggacccattctaaggatccgtttgacacaacttttgaaaaagttaaaagttattttttaaaaaaactgtaataaaaaagtatttggtaaacagttaaaaaataacttattgaagaatttatagacaaactacaattaatagctaaagttggtacaactcaactttttaaaaaaactattttgattaaaagattatacaataaattattttgtattgaaaatatatttaattatttattatataagaaaaaaaatatttaaaataaaaaatatttaaatttcttattttttattttgttttaaaaaatatttaatatttttatttttattattaacaaaccacatcaactgagaatttcttataaactacaatttttttacaagtaataaaaatataatttaaaaatnntataaattatttttatcaaatgtacataaatttatattataaaaaactaattaaaaatatataaaaaatttaaatttatataacatatttttatatatttgtgattataataatctacactataacattattattataataatagaattttaaaaattcataacacttaaaaatttataatttatcaaacaatcaattcaatttttttttttctatagttttgctacaactgtttttttcttacagcgcacaactacactaaagtcaggataagctctaaaatttgtgtgtcataagaaaaaaaattatttttgaaccctagaaaaatataatatttttcaaaatcaataaaaatatatataattttaaaagaaaaaaatatttttttaacccataaattaattgagctctagccacaaacttaacccgcctatatctaaacccgggcctaactaaagtggccctaaatctactacaaaaacactcatcgtcattcttaaactattcattattttaatttccttcattctattttttaaaaaaaataaataaaaattctctttcattcttatcattatttccaatatctatgggaacttgtttatagtatgggccgcacactacttatccatattttggaagttgggctggacccatgaggcatgagtgagctgaccaaagcaatttatatattttaagaattcaactgttgcacccaatataaaagatataaacacatatatatcgagtattgggcactacttctgcataacatttttttttttaaataattttgtgattttttaaaaattattatattaaattacataaaatctaatatttttttttagactaataacgatattaaaatataaaaaaaatattaattaacgcataaccaggtatatatatacatggatgacagctagagctactacaaacaaaaaatatattattgttggataaaaagaaaaagaactatggtttgtaataaatggtttacatatgaagcatttaaagaactacagtctataaaaataaaatcacaatcaaaatagaaaccccacttcatttcgtttcaacaacacattcttattattaatatatcgctttcggttgcctttgcttcctatttatttcgcatgactatcaaaacataataaatgtaaattaatcattacttttttttctttttacatatttatttatattttataattaattcaattattgtgtggtgtcatatatatatcgtatattagaagagtttattatgattatgtttttttttgttaattatgattattatagttaatggagcatgcttatcttaacggtatgcatgctgtttgaaccaattgatataatcaaacgaacacaaagtagccacgtaggcagaatgaaggagggaaagaataggtgacgtggctaatgcagcacacgcgagataaaagcacgtgattgtgtcgggaattctgactctattttctttgtgttttcactttgttcaaagctttttttttctcaaacgggaccattccaaattcaagccctacctagcttcgtcatattacaatacaaaattacaaacttcaagtatttgattgagccccacgcgcctccaatccaattttcatggttggttttttatgatggttttatgtattttctccactaataaatagggatcattatcatcatttaataaaggctaaatttagaagctaacatttgtaggatatgtgggtagaattcaacggtcagatataaagtaaagattaaaagtatgtcactttattctacttcctttgaaataatttgacaaatttcagtgtaaattttctcaaactaggttgggacgtttggaaaggaagaaagacaaaattacatatttttcaaggtaaatatctaaaagaagtaaacaatactaataataaataatgttctttacattttgaagaggtcatttccattacaccctatttttggatgcttatttttaatttttaaatttaattataaaaaaaaaaaaatacaacgtcggaacatggcctcggtgttaaattcaaaatagtcaaaaaaatcaacgttggacaaagaaaaagtgtccacgtgtaataaaagcttcgttacgcgccacgcgtgcccatacataaacaattaaaatgaaaagagtggggacccacctgagcagtctgaaagagttgaatgtttgaccaacgccacgtaagacgtcactgttggatattgcttcttactaaggttcacctactcctatccaataatatctataacctaaccttacctaagtcctgacccacaccataaacctctcgtataccctcccatacaaaatcattatatcaatcaaaatcacgttgatgtgttaatgacaaaccatcgtgtccgttgataatgtcatatttcgttaaatgaatggttgagattagaattgtacaaactttcatgctacaaaagaagtattggctgtgattttcctttttctgcatatgaaccgtttcactgggtgactatgtagtcagactcagactcactcagactacttctattaatggtgttacggcctcttctttctcttctccacactgaaagcaaaaaagagataaaaataaaattaattaattaattaaaattaaaaagtaatgataataacactccattactgttgttgttattattagtttctattctcgtaaccaaaaataaattctatttatattatcaaacagaagaagagtttcagagcaaagctggtttgagctgagttcgatcaaagaaacaaatttggagaagatttcttctggggttggagagatttacaatatggaggagagacctgagactgagctgatatctattccggcgacgccacgtggtgtttcaacgccggagattcagactccaacagggcagaggtcgcctaggccggcttctaaggaggcgaagtcgtcgacggcgtggacaccgacgtcgttcatatctccgaggtttcttagtccaatagggactccaatgaagagggttctgattaacatgaagggttacttggaggaggttggtcacctgacgaagctgaatcctcaggatgcttggcttcccattacagagtccagaaatgggaatgctcactacgctgcttttcacaatctcaatgctggtgttggtttccaggctctacttcttcccgttgcctttgcttttcttggctggttagcattcatctttctttaaaactattttctaatcattttttaatctcaagttttccttatctttctttttgaggctttttgtttatttaacttcagggcttactgcttagatttaaggttttttttctttttggttattgaaatatactgaagatgcatttagggatatttagaaacgcagttccagtttttaaagcttaaaactttattgctgttttgttctcttaaatttccaggttccagtttttttgctcttcatatttcaagttcatatattcttcatttattgttaatatcattgctattattatcatagtttgttgcaagatttgactaatgctattgacttgctgggctcattgacaaagtttttatctttagtttctctttaattaaagcttgattaaggatttgatttgaacatgaatagaggacagtagagacataattagacatgggttttcgtctttaccttttgcttttttctgaagctcaataattccagaaaatatcatgaatagtactactggggctggggccacacagataattcatgtgttgtgccattcttttatgatattaagacagagggccctttatactttaattattataacatattattagcttcttcttttttcaacctttaccaatttattttccaacattgtgcagcagcttatcatgatatatattatctttcttttaatgattatcataattaagtggtattgtaagcaaccaatgaaatatttcctttaaaaaaactgttcttgaagttgcaaaatcaggtccaactttggtccattaagtatggttcagcaataaagaattaaagatgctataacattattacctcaagtagataattatgacagagtactggaacagctatatacgtataatataagatttgcttcctgatctctatgattatgtacacaggagttggggaatactttctttgaccatagcctactgttggcagctttatactctgtgggttttagttcagctacatgaagctgttccaggaaagaggtacaacagatatgtagaactggctcaagctgcatttggtaagaacatttttccaatgcaaacactttaaataccatgttagagacagttttatagagctacttccacatgaataaataagagaactaaaacaaaaacacccttcttatagatatggttgagaagaaaattataccatatagttgtacgtaacatgttacatttaacacaaagaaaagatttttaccttgtgtttgtttttgcaggggaaagattaggtgtttggctagctcttttccccactgtttacttatcagctggtactgcaacggctttgattctaatcggaggagagaccatgaaactatttttccagatagtttgtggcccgctctgtacatcgaatcctttaaccacagtggagtggtatctggtgttcacttctctgtgcattgtcctgtcacagctcccaaaccttaactcaattgcagggctgtcacttgtaggggctgttacagccataacttactcaacaatggtttgggtgctctctgtgagccaacaaaggccacaaaaactttcttatgaacctttgtcaatgccatccttctctgcttcagttttttctgtcttaaacgctcttggaattgttgcatttgcattcagaggccacaatctagctttggagattcaggtatgtgttatgtaatgtattcattctcttataaacaacaaaaaagaaaattaacacttagcgctgttttgtttcaggcaacaatgccatcaacatttaagcatccagctcatgttcctatgtggagaggagctaaagttgcctatttcttcattgccttgtgtttatttcctgttgccattggaggcttctgggcctatgggaaccttgtaagttcaatattgacttgtttataagattaacacattgacaaatagactttcttatgagaatttgttactacagatgccttctggaggaatactgaacgctttgtatggtttccacagccatgacataccgagagggctacttgcaatgactttccttttagttgttttcaattgcttgagcagttttcaaatatactcaatgcctgtgtttgacagctttgaagctggttacaccagccgcaccaatcgcccctgttccatatgggttcgctctggttttcgagtgttttatggttttgtcaacttcttcattggggtggcactcccatttctctcaagcttggctggtctcttaggaggacttacacttccagtcacatttgcatacccttgtttcatgtgggttctgattaaaaagcctacaaagtacagcttcaactggtattttaattggattctaggttggttggggattgcattcagcttagcattttccattggaggtgtgtggagtatggttaacagtggactcaagttgaaattcttcaaacccagttgaaatttctactcaactcaatgctgccatgtgttgttgtaataggaactgaacaatatgtattcaattttgctgcaaatttattactgcgtgtacgttatttattatatataaattattatgtgtgtccatatatgtggcacatatattgaatgttgtgatactaaattcaatcctatgcctgtgctgctggcttttgtaacagtaatgtcacttccattaaatgaagaagacaagtatcagtactgttgttttgagtcataatatattttgccaaacaattttgcatgtcactagatcaagttcactattgtccatgtaaggtgtagcctcgagtattctagtgttatctatgtagctgagtcttttgatttgacacaaccaatcctgtgacatcatatttacaaaattttaggtgaaaacaatagggaaattatattgagcacctatttttccggggtatatagttttaattttaattttttgattttactgtaatgttttagttatctcagatattttctaaattatagaaaatttaaaataatttaatgcgctaaatataaatttcaaacagtttattgtaattgtgcgtttttattttacgcgtgtaaaataaataatttaaattttactttttgtattttaaattattatgagtttacattctcctataaaaaattttaagattaaaactatataaatcttaaaagtactaagctggtgcagcataaaagcatccaaaccaatatgcgtgtgggtttatataataagaaatatatgcattacactttttatttattttgacagaacttagtctaattattttttaatgatagtatacgttgtagctaattagaatcactagtaaatttttagaagattctcaataatttgtaatgtcaaaaataaaatttaaagaatcacttatcacgcatataaaaaaacaatcacgcataaaataaaatatttaaaccttattttcaacacgataaactattcaaaattttttaaaaatgtataagtgatcctatatagttaaagtaagagatcatgaaaaaaaaaagttaaagtaaaaaactctctttgatgctgaaacacttaaagaaaatctatcgaaacaaccctttaaaatagtgtacatatagatttaccccataacataaaatatttcatatcggattagtgtatacactaggagttaaaataatttaataatgataaaatcttgttaagttaagagaattgattaaggttgacaacaaagaacaaaaggagtagaactgaagtggtattaaaataaaatgtccctttactagtggatttatgattttaaaatagaggaatagtattagaagaaacaaaacatggaatgagaatatatatattacacaatattggattgggggacaagcatgataaataataatggcaagtaaagacaagtagtcaaaatggtgtcgataaatatatttgcttgaagtgagaattatattatgataattgatttcttaacttttagataatatcgctgactaatcgtgaaatgtcacctatgaaaagtgctacactaataatacctaatcataatactcttatattatagtagagaaggtggatgtggggacttataaaatgatgatggatgcttcctggaaagcctgatgtgattaattagctccatgccttgcgctttaggtggctttatctctttaatttctttattacgtactttcataacataaaaaactcatgacgggtttcggtgctgggtggctccgatccaattgcccacgacaacgtatccttgcaccaatcattgactcgaccagagcagagctcacacacacaaacactctcattttgtcatttataaaaaaataaaaaatgttactatcaatagtacaattctaatgacacttttgaatgccttcttgcacgatcttcgtcttaccatcaatatccaataaaatcatatcccccatgtcccaactagtactctttatttactatttcatactctttaacataatttttttccaaaaaaaaaacaatagatgggttgtgatttttagatttctctagatatctttggatatacactatgcgacacaaagatgaagttctcgatgtcttccttaaatgaaaaaatgatcgagacttaaacaggcaggaagatcaagagactttgatctaacaatggtggtgaatacaaattagaacctttcctacaagtgtgtcaagaagaagggaaaatcatatatttttcagtacgtcgtacactgtagcaaaatggcgtggcagaacgtatgaaccgtactttggttgagaaagttcattgtatgctatctcaatccaaattgagcaaaacattttgggctgaggctttgtcatatgcaatcgatattgttaacacactccctacgattgcacaagatgggaagatacctaaagaggtaaggtttggaaaacctgtctgtgattataatttcttacgaatatttggatgtccttcacatttccatgtcaatgaatccaaactggatcctagagcaaagaaagttattttcttgggctttaatgaaggagtcaaaaaatttcgattttggtgtgatgagtcaaagaagatcgtcttaagccgagatatcacatttgacgagtgtgttatgctaagacagactaccttagagaaagaaaatgaaagcccaaataatctttctaaggtggatcttgagattccaaaagatctagaaaataatgatcatggtgaagatgagagtaatgatcaagaagagatctcagttaagccagaggttccctcagcatcaccactagtcactcaacaatcagaatctattgtcgctactcaatcgagaaggaagattaaaaggcctactagatacaca

SEQ ID NO: 110805 - DNA, 4646 bp, Cannabis sativa
tcaaatagtattagaatacacaaaataaaaagacagtataaaaatgtacagtaaaaaagaaattacggccgtatcacagtataattgaaataaataggaaaaatatagtatgatttgtaaatttcccgactacgagtaaatgggccgaagttaaaaaaaaaaaaaggaaatggcccttctacccctcttcttctcttctcttttcaatagagatccacaaaccggccactcgaaagagagaaagagagagattcactttgcttcttcgtaccttgtgaattggcaaagatggtgagcaaaacagagcaaacccagttggaaaggcttgagaaccaggtcgataatggtggtggaggagcttgggagtacctctgtttggtcagaaagctcaaggttcggcgttccgagaaagttttaaagcatggtttgtcgatcttgaacgaccataggaagcgatccagtcttggttccgaaggtcagtattcctttatctgatatcaaatataggtcgattttttttcttcttattattcgcagcttgattttcaattccttggattgataagcacactaattactacggattggaagcagtttagttctgtagaaattttggtgtgtttgaatttatgtgaatttaactgagtcatggtttttgtggattttcttcggccgttgatactggatcaaatttgggcacgagtgtgaattgagctagatagtgaaacgcttgaatttatctttagggacttctttgtttttagttttagttttgaatttaaaacagtcgtttatctgtttaccttgccaatttcgggttcttgggatcttcgccgggtttaggttatcccgttttagtatacaacacaagaaattgacttcttacgttaattagtatgtggtttgtgtagttattatgactttggtcaacggagtcttagatcctacttcttgcttatgtttgaagaatgaaaataagtttagagttgcatactattattaataagctggaaatccatccacagtcttcaattcgactaattggtaactttgtgtatcttatcacagaatggactctatatgagcaagtagcagttgcagctatggactgccaatgtcttgatgttgcaaaggtatggtgaaattttggtttccagatttggaaatcttgttaatgatttcatacacagtaatacatcaatttgtgtctaatttttgagattgaaggtggtatgttgaattatacaatgccattgtcatagtatttagcacaaaatgctagatgaagtactgaagaaaatcatgttaacacttaaggaatttagatgtaactttatttatcaagagaaaaaaaattgattaaaggaaaaaggggaaaacttctgaatatcctttttcgtgtcaattgctgggcttgcggattatttaagattggtttttagctattagctaggaattcttagcactgtctctgatagtgtaggtttgatatctatatcatgggtctgataccattttgctatgtaattaacttgcaggactgcataaatgctttgatgaagagatttccagagagtaaaagggttggtaggttaatcaacataccaatgataaagtgcgtaaatatctgtgttttaatagaaataatatattcttatgtggtactggcatgaatcacaggtaagctagaggctatgctgcttgaagcaaaaggctcctgggcagaagcagaaaaagcttactcaagccttttagaagataatcctcttgatcaagtaaaattttgtgcctttgcagtttgaattgatgaaatcaatttgtaatactggattctctttttcatgtttttatgaaagaactttagaatgatattggatggtatctaactttttacattttttctacgtagggaatcctcaagaggagggtagccatggcaaaggcacaaggcgatgtttcgggggcaattgattgtctaaataaataccttgaaacgtaagaaactatagttttttttttttttttttctgttgttgagaagtttgcttatgacagggaaaacatgttaactcagtcaccttttcttgtcctacagatttatggccgatcatgatgcctggagagacttggctgaaatctacgtctctcttcaaatgtaagaactctttgtttgctcattaatgttattatcttccgtgataccatttgttactttccaactgataagctatgtctaggtacaagcaagcagcattctgctatgaagagctaatattatcacagcctactgttcctctacaccacttagcttatgctgacgtaagtggctaattttttacttgtctgtgtgcaccaactgcattactgctgtgactttgatttcctatacttaagatttgagattttcttattattttcttgtcttcatggtcacaggtactttacacactgggcggactggaaaatctacaggcagcaaagaaatactatgcatccactattgacttgactggcggcaaaaatactagagcgctttttggggtttgcttggtatgttctctcttgagacactcatttgtcatttattgcactaatttttgtgtcagttgtccccatgtagttgtgattaatctccatggatgcttagcactattttaagacatttgatttttgtatatgaccgctgttccaatgctgccaacttggtgactgaaacaaagtttacttcatgttactagtgttcctctgccattgggcagctcgcaaaaggtcggaataaggaagacaaagagagcgagctacaatctctggcagcagcagccttggagaaggactacaaacgaagagcacctgcaacactgtccttgattacgaccgccttaaaaagcttaaaagtttcatcataactctaatttaattgaaactttgtttaagtatttctcttctctaaagttgtgattggcaacttgatgctaaaggcctagaatttacacaaggattttcatattattattttttgcattttgtccccaaatcagtttaagggtgtgctttattctctatttactctgtagtatgacaatgacagtctaggattgtacaactcaattgggatatcttgtcaattctccatcttgtgtgctctccctgctaatttgtttatcttatatttcttggaagaaaagttcagagtagcttggcattgttggtttgtttcatggctctaatttggccttctgaacttcaggaattcctttagtactgttttttttttggtctcatagagcaaactgtcagcttaagctttttctaaacaactattttttcttcaatcaatcaatattgtggcgactatattaaaaaacacagtggagaagagctttttcaatcaatcagcctagttgctaggtgcccaggttgatatgtacacgaagtttcgtaaatgcgattgtgatttcgtcttggacattattgttattttgtttccaaaacaagatatgagacttggaattaggagaaaatatctatcaagtggtggtttagtcccaaacaccacactaggccctaggttgacatttggtctggggctcagtattttgtccatcaaacgatagttttgttctagatatcactcttattctgcccccaaaagaagatttgaatgcttttgcaagtttatacatgtgttaaacgcaagttcactgacacccatgtacactagtgatcacccggttgtcacctagtcctcactagtgattcattaggcatctcccatgcacatctagtgaaattgccaagagaacttcaccggcatcaaagaatgagctaaggatagttatcacatcattcaagcatctcaaaatatgtctaaagcccaagaaaccaagttttgggcgcctaggttgaccttttatgtcaatctggtaaaatggctacctcactcaatttttatccaaatgatgtgcttatcgagatttttaaaaactaattaaatgaaagctttagaaattaaataactattaagtaactaagacgaaggattttacgtggttcaggcgttaattatccctagttcacgagtcagtatattgggcttataagctttttaaatgtattaagtagtgtttacaatataaaaccctaactttgtttctctagatttttcttgaagaagaagaaagcttagaggatatttttggctgagcttcggctatctcctcttgcgatcccccattatcaagaaattaaggggtttatataggctaaacttcgagtttgggcatacccgtgacccgtttggagttttttgtaaaatttgacccactattggggcaaaatacacaatatacatgactatgaggcccactaaggatgttaggttcgtggggcgacgattatgtactgatgagaaggtcgtttggtacaaggcacgtgttgcacagagatcacacctgtcagacaaaggtgtccatcggacaaaaaagggtattggtggtacacacactactatggtctgccgtaggggacaatatctgatcttgtgtcagagaggaggacactgttgggaatattttaccaagatctagatttactagcaagtatgttaaattaacatcctaaatatgaatatctttaaaacaatgaaa

SEQ ID NO: 110806 - DNA, 5152 bp, Cannabis sativa
  modified_base (5097)..(5103): a, c, t, g, unknown or other
aaaaaaaaaaggaagagaaggttgataaagccttaaagactggtgaaaagtgaggattttgatcagttgggaaggaaggaacaatggcgggagttaatcccacaaaccctcaaaacccaaatcccaatctcaatcaaatgcaaccaacaccaccaccaccaccaccatcatcatccattgcagccactcttcttattcgtcaccttcccgaagccattccccaagacactctttctcgactcttctcccactacggtgcttcctctgttcgcccatgctcctccaatggcaggtactctatttattcatgtataataataaaaactccccctttttgttagttccaccaatttgaactttttaacggtttttctctctacagattgaggaactgcgcttttttagattttcaaaatgaagcattggcctttcaagctcatcgtcaattgaatgggtatgacttaaagctcatattttgaataaactaggggtggcaattcaggtcatgacctgcacacgaacacgactcgagattttactggtctacactacacgaaaattatgcgggctgtgttcatgttttataatcttttcattttcgtgtcaaccatctaaaataaatttaagaactccaagatgacactataaagtataaacaataatttagcttgttttatgaacttttcatgccacgggtcgtgtttcgataatttaagacttcaacaggcctcgaacacgacacgccaacacgaattttcacccctagaataaacccactttcagttttgaaaaattatgaggttctttttttttttgaataggttgaggtttcttggtaaagttttgaaagctgaaaaggcatctaagcaaccccagaatgatgatgataataaagctcagccaggttctcatgaagctcaatcatcagttctgaacacttgttactctaaagaaaatgcttctgagcaagtttcgaaatcggggtctgtgcctgctcttgaacccattgcacctagactaggtgtggattatccatttcctccttatcttgagtatgtgagcatttctttttgcctcttttagtaacatattgaaataacttaataccatgtttagacatatgtgctttgattagttatcaatttcttttgcatttgaagttgagagtcagagtttgaatatagatgttaagtgtaggaacacacttgatgattatagaatttgaagtagatattggagtcccaatttctgagataaatttttgaaagatgattgatgataagttggagagagcagaaactggtgaagtagtaaagatcaaagtaaggatggcactttaagtaattggaagagggtggaggaatatttagaaacgatgaacttaaagctaatactctctatagaattggaaaggggaagtggtgaagaaagttgttatgaaagtaatgaaagagtaacagaatcagagttgtaaatgaggcatatttttatcataattaaaaagaaaactcattttttgcaaagtgccagatttttgatccaatggtttcacttcatgtttgtataagatcatagctaaagtactctctttgaggcttagagaagtatgacagatacgattttaaaagctcaaggtgtttctattgccgggcgataaatcttagacgaagtactaatgatattgctaatgaagtagtgtaatactgtagagttttggggaggaagggtttgatttcaaaaagattttgtttatttttcttctcttatgctggagaaacagaaactttgttgcgaaatggcaaaattagatatatggatacatttcttcagtatccctttcagtatttgtaaatggaaggtcaatgggaagatttcgtcggtttataggattgaagcaaggggatcttctatgattgtccttgggggaagatacattgagcattggttgttaggagggtgttattgctgaactttattcagctcgaggtggtgtttcaggcaaagttgcatgctgagttttatatttgcagaagggtgattctccataatggaatttttcactgatgaataccttttgtcattttttcaatgtcagataacttctttcaattagtttcttgcctttgcctgtcttcttacagacctctcatgtacctagtataatgcatgcttgaaaatgtccgaaagtaatatctatgttgtctcccttgtatagttatgattatgtttaaagtatagattttggttgatttgattttactgaaaaagctttttctacagatatgcctaccctccaccagatggtaacatccttacaaacatcgtaaatgctctgattgctgttcctcgcttttatacgcaggttcgtttaatctcatctgaagctactattagaattacagtttccatgagtttatgaatggcgttagaattaatcttaaacagttaaatagattcttaacatttaaggagcaccgagcattaccatattacttacaagtatgtaaaaacaataggtcttgcacttgatgaataaaatgaacattccagctccatttcgaatggctatgccaactccgcctctaccaccgttagcaccagtgccaccacctccaccaccacctccccctcttgaatcagcaaagcaatcattggcagaatcgtctagtgaagagtcagagatggaatcttcagatgaggtaacatttgtagcttctgggcagaaaaacaggaaaaagtttcaatttttatgtctaatttgcttcttccatatcttcttttttttacacgaaagttcatgtatgtacacatttaaacatcttatttttcgttcgtgtacttttccctgcttttcaactcagatctttatgtctgtgatgatatcttatgaatgctatattttagacatatgggggcacagcttaaatcatgagttaaatgtaaatgaaaatgtgtatcgtgctgtgtcgtttgatcataggatgctgcaaatgtcgctggaggtggaagaggattaaagcgtgccaggcgggaagcaatcgtaggtcctgcagttgataaagatgtagctcacgaaactgtgggattaaaatcagcaacactggtaccgaaggaaagaccagttataaaaaagaggaatcctgtgatgcaggtaattaaatgtcatgaaagatggtaatatgatttgctctcttgtcctaaaaattcgactttcttttttctctttttgcagataaaattagcacataaagcagtccagagggaacacaatgatgatgaaatcgctaaagaagcagatgatccaaaatcagaggatttagatattaataaaccgtatgcaagtccagaagaaatacagggtggaaaattaggccttgaggaattattatcacttccagtgtttaaggtaccaactttaaatcttggtatcgatttaagtgataactacgagaagtttaaagtcgatttcttttactcgtttctttcacttttgtccagagagtggcatgaaaccttgtcatggatttttttctctgtggtgtttgcttcataattagacataaaggaaatattattttgaaatttaacctgtattttgcagaattataaaactgggaaccctgctcctgtattgtatataaagaacttggcaaaggatgttgttgcagatgacttctactacatttttggtgagctctcattcattagcataggtgtttgaatcgaataaaaatgttcgtaaaaaatactatgaaagaacttattttgacccgatatataatgcttatgttgtgctgtaggatcattgtttggaagtaccgatctagccaaatcaagtctcagtgtgaagctaatgcaggtatgatcactaaacacagtcaagtttttcgaaatccagtagtgtatcgtgttgttctttgaaaatgaacatacagtctctgcctcaaagtagtcgagcaagaagtttcggtttatctatttggcgtaagccatctttgtttgactcattagttatgggctcttttcaatattttgaagctttttcggtctagagttcagaaccatgatagaaaatattgtcattcagaaaatttgttcattatataattctcttctttcctggtaccctatgctaatgaattgttattgttttcaatgccaggaaggaagaatgaggggccaagcttttttgacattcccatcagttgaattagcccataatgctttggtaagtatctgattaaactaaatattacagttcatgactatgtccacttattttcaaaacatatcattgttggtttcagaatctagtgaatggatacgagtttaaaggcaagccgatggtcattcaattcggccgcaaccctgcagcagccaaagaaaaatgaatataccgatgccaaaactcgaaggttcatttcgtttgcgattttgatgctaatgcctccatacacccctctcttaaaatattttctaactctgcttaatcacagctaaacaccatttacgatttgccacacgagcaaaatgtcacgccgaaatgtcacataattaatggctaagattaatccaggcattctgtgaaagaggctgagaagaacatgattgaagcctctggtgcaagtaaattcattgggtcattcaaatttgaaaattattacaccatcactaatggagttatttatatagggaaagagaaatgttcattgtaaattcaatataacattcacctaggaatcttgtcattcagttgcatttttttttgtagtcttttcatttattcaataaattacaggtttttatttttattatttgaaagtaatggagagcttgatttaaactcttagaattttaaagaaggtgattgaagaggaaacatgattcttggttcatggacttgattgaaccctaaatgataacttcttgtaacttgttgttattcatcccaaacacgagcagcctcccgagcaacgtaggactgtgggattgcaggcaagcctcgcgaggcttgggagactgtttcaatggggatggagagtatcgttctaacttcttcaataagtagtttcttttattaaggtggcgtttggtaannnnnnnttaatcagttttttgtttttaaaagtagaaaagtgaaaatatttttcaa

SEQ ID NO: 110807 - DNA, 3427 bp, Cannabis sativa
  modified_base (1026)..(1029): a, c, t, g, unknown or other
  modified_base (1138)..(1141): a, c, t, g, unknown or other
tttaaaaacaaaaaaagtcacttttaatatttttttaaataatttttttttcttaattaatattttagactctgaccaaacccggatccaaaatcccccctcacggctctgaggttgaacccggcctctgactcgaactcgaatccgacctcggacttaaacccgactataataaaataaaaataaaaatgaactttacaaaatatacttttgttttctatttttaaaattgaaaaacaaaaatgattacaaaacgtatttttgtttttcaaaaacaaaattttttaaaaacaaaaattttactttcattttgtgagtaaagaattagaaaacaaaagtgttatcaaacggtaccttagtttttgcttataaatgaaagtgattttgaaagtaagaatattaataataaaaaaaataagaattaaaggatgagtttaagtacacttctttatctttttatttatttatttattatttttttgtatccatgcaattttattaaattgactataatactaatatttttaatgatagtatttttttataattataacacgtttcctacaaatttttaggaaaaataagatgtaaaaaataataagtaaattggaataactcttaaaattaaaattttgacaacaaaactctttaaaattattgttagcaaaagcccacttttgttcctctgactttattatttgctaacgtggctcacttgagctaatgtcaggtagactgatggatatctttttttttttaaaaaaaaatgtgtttataaataaaattgaagttagacctcatgatcattacaaaagatatgaacaggtatggtagatatgtctaccatgcccgtgacattgttgacaaatgtccatttggccacattatgggccgcgaaattacagtttctagctatagaagaaaaattacaattagtcataaaagtagagagaagtttgcagtgccgcacatagttctcaatcccccaaatagagtcatccccttttaggttcttgattacaatcnnnnaatcactctccaccaaaacaaaaggatgatgcaatgataccgccgtctccatggctaaatgacaggccatatcattgcatcatccttttgttttggtggagagtgattnnnngattgtaatcaagaacctaaaaagggatgaccctgttgggggattgtagactcatgcatatcatgtcactagtaaattaatgacgtggcatatgaagaaattaaaacttaatttttttgaaaaactaattataaattaaattaaagaatcaaaataaattaaaaggaagaattaattaaaataaaattggtgataaataaaatacattaatgatataaaattaaaagcataaatataaatcaaaaccaaataatttttattctataaaaatccaaacctaaaaagagatagagaaagtgcaaagggagaaagacgtgaaactcaacaaattaaagaagagattcatcattatcgtgggaaattgaaagaaacccaacaaatttgtggaagccaaaggtttttgaaatggcttatcatcgtcaaggtcaagaagaaccttctcctgactataataagtaccatattcatattttttttttaaaaaaataggtttcaaaaaatattagtgctatggttatcaatgtccgagtaaaatgagttaatgggagagttttatactaacttttctatctgatagtagctttaatagtttgtgaagtttgggacttgtggtccatactgtgtaaagtggttggatatgatattaaaatgtaagatttgaaaaaacagttggggaatctttagttgttatcttcttcaatgagaacatttccacctttttataattttatattatttattgtcttttgttgggttttggggttaattgctaatgggagttttgtcaaaatgttggggaagtttgatttggttttcttaggtcacccctatgattaactatgtgattatatattaactttgcaggttcgaattcggataatccatggtgattattggtacaacccatttggcaataggaggtatgagaatagtcgaattgcctacttcgattactgaggttttaataggttcagcaaactgcatcttgaagaaatggctttagaattgggatactaattcccttttggctttttttaagccaaaagggaagcacctgaatatgggatttagagttattgaggaaaatgaaattaatatagtgttgcatgatttgagggttaaaaattacaaggagactggatgaggaagctgtaaggcatgttccctaaccattatcatcaaaattggacaagtgtatcctgaaggagttgccatctgacagtaatttagtatcacatgtttttgtcaatctagtaggccatcatgaccctaatgataatttcttcaacaagtttgtgcagtggggtaatttagcagcaaagtggattgatgaacaagttgaatctcgtaagtgcaaccccaacctggtaatattgtgcctgagacagtgattatatcatcatcctcatcatcagaatttaaggaagatgatgatgatattgttggaaatcatattttatcaggatcttacttttactaaataagtatgttgattaatactaatctaacatcctaaacatggaactttaaaaataatttaaataaacatataaaagattaagaaatcttacaattgtgcagcataaattatgactcattccatttgaattctctaactcttgttcctttctatcgtagagtattatcaagaattcaaacctgaatcttcttttgatgtgagagtgtacacggtcttccacactatcctgagtactttcttgatttgagtgggcaagtactcaatacttgtagcacacaaaaataagtgaggaaaattgtttgtatatactataaaattatatctctcaaaatcttacctttctgactataatctatgatctcaaaattgtatacaccatatatacagttgggtatagacgtgtagactagagaaagaagagatgaggaattcgaatcctctatagtcaattgaaacttgtatctcaagtttaaagatgaagaaatgtgtagagaggtgtgtataactgagagctataagggtctatttatagtaatgtcttagggttaaggttagaattaagagaaaattacactgcacaacctaattattaaattatttatatacttaccgctgcaaattttattcatgaaaatgcagttaataattttgaaacgtgtaccgatattaaacgcccagctccttactattcaatcacgtttattattattagccattcactttaatttttttaggcatattttactttctctcagtttttgttttctttaataaatttagatgtaatcctctctctctctctctct

SEQ ID NO: 110808 - DNA, 3011 bp, Cannabis sativa
atatatgtattatttaaaaaggtaaaaaaaaatttgagcccctgggctaggtgagccctaagcacaaacctagtccatctatgtttagggcgagcctgcattttgtcatacacattattatttaatatattattaatttgttttaactttatttaaaaaaatagggaaaacataattataacatcaatgtcaaattttagcatcaatattattattttttaggtttgcatccaaatatctccaatagttagcttcttataagcattcttctttatcaccaagtattcttttcaagcatcaccattaaagatgctttattatgcaccaatacaacttggtatttttatatctaaatattttaatcttaaattggtttaacacagtagcagatattactttttattaaggattttaattccgacgctcccattactttttataaaattacgtagttaattacattacttcatgcacacacgtacatacgtacggtacgacgggtattatacgtaaaaagcatgcatatacaatacttgcatttcccttacattgatttcaaattataataattaacgccgcttttattaaaaacatacacacacccatacacacaataacagcatatatagaagaacaccaccacccaataaataattgactatataaaataattaatacaacgacctcatcactaaaaattgagctcatcatcacactagtgcaatctatcattaataaaaattggtattgctcaattcccacccccagtacttgaattcacataacatgaaatttcattaataatatcatccaaaccttgaatattagcttgattgaaaatgtcagttagtggcaagtgatcacgatcatgatcatcatcatcatcaaaaaagtagttataactagcgatattttggtcaacaggttcatgacttatttggccaccagtcaacgacgtcgtttcatttttggctaagtggtcgttaaagtccgcggctacgacgtcgtttgggtttaaaacagctacatcatccgacatgaaaatctcgtccaaatcaaaatccatcgaaaactcggaagtcttatagttaataacgttgtttatgtcagaagaagcagtaaggttataattattattacttttggtaaaatgatcaccaatttcccatgaaggaatagtttgaccaactatgatttgctcctgatgatcattatggtgatgatgattaagtagtaaccaactactggaactggaagtaggataataagaagggtccgtaacaaccttggagcaacgaactgcttttgtacggatgacgtggccattcacagaatcatgatcatattgatcatactgatcatcatgatgatgaggatgaatcggtgatgatctttcgttggaggttttcataagctcttctaaagatgttcctttcacattaatattaatattgatattattaatgttgttcaccctcttcctcaaattagtgttccagtaattcttaatttcattgtctgttcgtcccggtaatcttcccgcaatcaaagcccacctacaatataatatatatttacatacatttaaaaaaaattatacaaaattcgaaatataataaatgtagatatataattgacatatacaaattaacgctaaaagctaggtactaggtagtagtactttctttagtgttacactaatatttatcaattaagaattaagtatcgacttccgtataaattaatttatttttcaccatcactatcaggaatgacaaaactgcaaggtgtgacttctaatgtgctaatagcaatgcttgtatacatatatataatatatacctgttacccaagagcctatgcagtcgcacaatgagatcatcttcatcagtggaaatgttgcctctggtgatatctggcctcaaataatttaaccacctaagcctgcaactcttcccacatctcttcaatcctgatcagttatacgtacatatagtcagtttatataagaaaaagaagaacatatatatatatagatgtaatgtatgcccaaatataccagctcttttaggaagatctctccattttccagggccatttttatgaatgtagtcagcaaggattttgtcttcgagagcagaccatgctcccctgtttaacccatctttctcacaacatggtgatctccccatattaagtttccctctttccttactattattattacttaggcccccaaatccaaactctctaagtcaacaccaacaatactacaactaactcaaaacttttgcttcttattctattatgatgtatgatgtgtcatatatatagagagatgggtaataaatcacgacctatataaatatatgaataattcatcattgaaaacacgtggaattaatattttatgtacttataaataaggggaccaccccagagaattaatttatagaaacgtgggatatatttcggcccacttaattatatatatccttttgcaggtgatttcttatttttacatgctccatatcactatatattcgtttatgcaaactaattattagttttcccctttctcttttttatttttctaaattaacgtactttacaaagcgggatctcttaaattatttttctaaagacttgtttagaacgccgtattaagtcgtattgtattgtattatattatattgaattgtattttatgcaactttttatgtaaaactgtatgtggttttaacatagtattatataaaaatatgatatatatatttatatatataaataaattcaatataatacaatacgatctaatacggcgttccaaacgagcccttaatattttattgttttgaccaggaaggtccacaaggttttttctttattatttttttttttttgaaagtaaggttcaaaaaagttaaaaagaagcaaattgatgaaattaatttactttactattcctatcacgacccgagccctaagccgtggcagatatgtaatatcca

SEQ ID NO: 110809 - DNA, 3263 bp, Cannabis sativa
  modified_base (40)..(48): a, c, t, g, unknown or other
ttaggacataaaacccaacacatacttgtgagtagatctnnnnnnnnngtaaaataatttccaacagaactatcctagtgtcttaattcaggtgattaatgatcaacaattacctgacatgcttgaatttgaggatgaatatggttcaaacacttcggttggggttaagtacgagtggaaaccgatctcttgctcacactgttttggtgttgggcactctgctgcagaatgtaagaaggctggtatttctaagcagcaatgggtcttgaaatctgataataggaaggctctacaggttgatgaagagggttttacaaaggttaatagtgtgaaaaagcatgctgaaaaaagacagtctgttgctggtgccaatacaacggaagtgaaaaattattttcaggttttagacttggaagattctgttactgcaactgatataagtgtgcatccggatataattactacagataatgaggccaatacaagaggggggggggggagaaccctctctcttcaatggataagttgctatgttggattgttcaaggggctaataatcaatccaagcaacaattaataaagcgattcattaatttgcaaaaggtttattttgttggtctcctcgagactagagttaaggctccaaaacttgaaaccttatactcgaatgtatttgacggatggtgtttttcatctaacatagcttggcatagtggtgggaaaattgttatagcttggaacccgaatagatttatggttgatatcatcaaatgtaccaaccaaatgatgcatttgagggtctcaactactgaaggatttaatagttttctcaccactgtgtatgcttcgaataataaaggataaagaaggaatctatggaaggatatttgtgccttatgtactaatgagtattggtgtctaatgggggattttaataatattttggccaaggaagaaagaattgggcatagagcaagatcttatccggattcagactttcttacttgtgtgaactcttgtcatttagaagatgtcaaagaaaatgggaacttttacacttggactaacaagcaaccgggtgaggatagaatttattctaagatcgatagagtgctagctaaccgaacttggatcaacaaatttgagttagctgaagctgtttttcttaatgaaggcttgtttgaccactcacctgctatcctttcactacatcctaatcatggtggtggtaaaaagccctttaaatacttcacaatgtggaaatctcacccaaagtatgaggaagtactgaaggatgtgtggaaaacagaaattaaaggaaatagcatgttcaaagttgtgtcaaaaatgaagaaactgaaagctgctttgaaagatttaaacagagaggcttacccgaatcttcatagtgctgttattaaggctcaattggaccttgataacacccaaaaccagctgcagaaacaacctctagactcggccttgcaccagcaggagaaggtaaatcgtgagcacttattggaagtccagaagtcttattcttcttttttacagcaaaaagcaaaaattgcttggatgaaaaatggagacgccaattctgctcccttcatgcttgcattaagcagagattgagacagaataggattctctccattgagaaaaatgatggcagcagagtcactaatccctcataaatcacagcagctttcttagaattctatcaaggactccttggaaccacaatgggacagagaagacatgtaaataggagtattcttgctaaaggacctatagtggcatctgaacatgcagagaaattaacacagaatttcactaaaaaggaggtcaagcaagcggtatttagtattccggggaacaagtcccctatgccagatggtttttctagtagcttttttcaagacaactgggagctcattggtgatgacatatgcgatgctattctctcattcttgaactcaggtaaaatatttaaagagattaattctacaattcttaccttagttcctaagatgaaatgtcctaattctgttagagattttagaccaataacctgttgtaatgtgatttataagattgcaactaagcttttgagctctagaatcaataacattctccctgaaataatctcacaagctcaaggtggttttgttaaagggagatttataggacataatattctgatatgtcaggacctggtgagacattatggcaggaaagcaaacaaacccagctgcatgatcaagttagacctccagaaagcttatgacacaattgaatggaattttatagtgctgacagggctaaattttcattggtaatgaattgtgtcacaactcctaaattctccctaaatttcaatggagcattacatggcttctttgaaaccaagagaggaattaggcaaggggatccaatgtctcctttgctttttgttctgggaatggaatatctttctagattaatgaagcaggttggagagaaggaggattttcatttccatgataggtgtgctgagctcaaacttaaccatctggcctttgctgatgatgtcttgttgttttgcaatggagatagtaagagtatcctttacatgctacaggccctgaaattattttctcttacatctgttttgcacccaaatccaggtaaaactgccatatattgtagcaatatgcaaaatgaaactatgaaccgcataatacagctttctggatttactaagcaggatatgccctttacttatctggggatcccaatttgtgggaagacgatctctggtaaagaatgtgatcttttagcagaaagaatgacgactagaattaagagttggagttctagaaacctctcttttgctgggagaattacacttattaactctgctctagatgctattcaggcctattggagtcagatgatgatacttcctaaaaaagtattgagatctatagaatcaatttgtagggcattcctttggaaaggtcaggcactctttcatggggctgggtctattgcttggaataatgtttgtcaacctaaatctgcaggtggtttaggaattaaaaacctggaacattggaataaagctaatatttgtaaatatgtctgggcaattgctaataaacaggagaatctctggatgagatgggtccatagtgtttacatcaagaagcaggagtggtgggattactctgcctcgattcggttgttggaaattattttacccggatcttagatctactcac

SEQ ID NO: 110810 - DNA, 2974 bp, Cannabis sativa
taatacaagtcaatactaaatatagtattgtattaaataatactaatataatctaacacaatacaatacgacataccaaacaagccttaagtacatcgaatatgtataatagcaaaataatgtctaaatgaattatactaagtacattatatttgtagcatttatttagataaaaaaaactaaacatagtgatcagtacacaatagagtaaataatgagagtaaaagacagttttgattatattttattgtaatcttattttgtatcctataaaattcctatattttaaatttttttttttaaaaaaagatatgccatattttgtggcattattttgggagaagttgaagaatactttttttttttttatacattaactaaattgacctttaaataaagtttaatttaaatatacatatttttatgagtatggtacccaaattatcctcacactcataactaagacataatttcaaatataatagatttgtgttttttgtagatggatgtgaaggtttgtggaaaaattaggagaaaattttaattagagaaaaatgaaaactatcatgaagtaataggggtaaaattggtagaataattgaaaaaaaaggtaaacataatagattttgaaaaagagagtaaaagttaaaagtatcaagttaaaagagttatgtagtgtaatttcctccattattttttatgccatatttttataaacaatgttaatttttcccataattttgtaaatagtccaacaaaatattgcaagcccattgcattaagtaacttgtggttgtttgggccatccatcttgggctcatttcaacttctcacacattatgttgggctaaattgatagccaaggaagtgggctgttgggaaagcccgaatcattatttaacttatgaaatttacattgtttgctcattttatgggaaattaccacattttatacttaaaatttttgcaaaaatatgatgattatacttttctcaaattctacaagaataataaaaatatttattaaagcatacaataaaataaaataaataaatagtaactcctaaaatataattaatagaaaaattatagcttagactaaattttgtacaaaaaatgtgggaaattaaaatcccaataacttaagactttaaatataaaaacataaaatagaaacttattttattttgtttttacatatcatatttgggcacggtttaaaagtaataaatctgtaattttgtcttttttttttgtttttttagttttaatacctactatttaaatctggaaaagtacccatcttttggtttatttatcctgatatacatttatacttgaagttttcttaaattactttcgagtaaaaaaaatagagaattttacttatttttataagaatgcggtaatttgtgatgtaaaatattgcgttgttacaattgtttcaaattttctaattttttttttttgtttagaaattttttatattattataaattaacagtcatttacaataatagaaaaaataagataagacatttcgcttattcaagatacattttcattcaattttagtgcgtactttgctaagccatgggcagcttgattagcttgcctacgagcatgagtaacaataactctaggttaagagaataaaagataacaaacatcattaattagataagaaaaacaagataagtctctatgaagagaattcaatgcagaggatactcttagggcgtctgtttccactagtgctattggcaattgttgttgagtactccaatttagactgtggaagagtgcctttgcttccatttcatcacttctgaaacaatcttggactggtttagaaaacgcagcaattactactcctttgttgttacgtaccacagctccaattcctaatattttatcatgaaagttgacagcagcatcaatatttattttaaggaaattaccttttggtggcatccatgctatctcatatgttggcctcccattgtcacttgtcactgaagataaagtatgttgttgctggtttgctacatgccatgaagagaggttgtgatttgagacatgctggtgaatattatcttgaccagccatattatgtgatctttgttgatgcatcagattcataggtatggattgcagctggttatcaatatcatggtttataatgtaggtggatctaggatatcattcaagcagggtggaataaaatactaaactaatataacatacaaatgtaactatataattatttaggagctacataattttttttatacattaagaaaagaaaaaacaataaacatagggaagagccccaccttatgttgagtattaaaaaagagcatttttaaaagacattagttgtgcttaatacttttttgggtgtcatattggtattggtttaattaagttttgaatcctatataatttaagaaaataacttttgaaaaatatcactaatcaatcatacggcgtcataagtattaaacaccactagtgctcaatagcaatgcccattaaaaagttataattcaccatatctttgagtgacaatggttttcttttttaatattgaagtacattgaggattgtttggttgatggtaataacatggaagtgaatgtaaaaaagattgatgtaggggtgagttgtccttggttggccatcgtacaaggtggtcgtagagacggactagttgttgctggtgcaagctattagacatcgtcgggaggtagcttatggcaatctcatagtgtcttattttggggtcgttgtagaagattgtaagagtctattagaaacaatgtcacattttttttattaaactaatagggtcgctattattttcttgcacgagcattctattttaaatctgaatgtatttttacaaaaaatgatgttctctggaatgtaagtacatgtttgatatcataactaaaaaattattttttatttt

SEQ ID NO: 110811 - DNA, 5149 bp, Cannabis sativa
  modified_base (30)..(53): a, c, t, g, unknown or other
aagttcatgtttaggatgttaaataacatnnnnnnnnnnnnnnnnnnnnnnnnggtaaaataattccaacaataagagctccttgtactcttctggtcatccctgaccactccaacgcatccattgtcacaggaaaacttaatacatagattccttatggaagttattcctccaaaatctaccaagactagacgtcctagtattgcgttgtatgtcgtgggacaatccactaccacaaaagtgcaatgtttgagggcacaaagattattttctcctttaagggtgatagggagttggtttttcctaattgacatcagagcatccccattgaagccttgcagctgaatggcaaaaggtgagaggtctacctccgtgagtctaatttcctagaatgcaaatttgaaaaaaatgttcaccgagcttccattatccatcaagactctggaaactcgtttgttggtaatttgggcttcgatgactaaggggcccttgtggagaaaatgcacatgttaggcatcctcttctgtgaaagtaataggtagattcattatttgaggatgttgagctggtgattggacaatgctacacatgtccccttctctgcctaactccctcaaataccttttctgggagtttttggtgctttcttcatggtgtggtcctccaaatattgtagccacatgtccatcaactaatggaaaagttaggcctaggggatatgggtttctcagtcccggagccaagatggctactgtagccagagctggtggagcaaggagtgccggaagttgcgatctaggagcttgagggtgacctaccctttgcagaggatttacggtaccctaatatcctggaatgaccaactattctagatcaacccccctgtctaggatagataattggaattcgaatccactgtcccaagtttcctactttgaccagcattttgatctcatccttcaagtggttacattcatttgtggagtgtcctacttctttgtgattctcacacctcttacttggatctcttttgaaccctcccccttgaggcgttcatgggggctttatatagtggaccatgttgcaagttgctttgtacacattctctcaagtatgcactaggctggagtcggtgtaccttggttcatattccttctttcctttctttgaatttttactttgtctcagatcatttcctcctctcttgttttgggactaacttatattcttctttggaaattctactttcaactgttcgggagtaatactgcatccagtcagtgccactccatacccaaaaagatggtattgcataggtgcttatacgaattcagatgttctatagactgtcagggtatactatgttccaagaacaggaactggtgaaacgaacctagaagcaaaggcaattggagttggtgccagaaggactccaaatgcttactaatatgcacattccaaattaatgaagccttgggccctggcaatgaattcagacaacatctcaccctttttctttgcatttccctgcacaatagggagccaactgcaagtcctgatttaaggccacaaatttcatgtcatccgttacttttttcttgggtgctgcctccattatgcgctaaataaagttcttcaagctctccctatctgttgcttgacattagtgatggagcccatttctatgtcatagtcatgggcaccaatgaattgtttccagaaggaagatcatagttctttccaggaatggattgatctggagccagtctcttccactaatctttagtagatttcataagggtcagagagaagcacaagcactaggcatcctcacttactctgatcacctgcatcctcttgttgtatttggctagatgagtcttaggattagtgtgcccatcgtacagctcgatttggggcatcttgaagttctccaaaagtggaacctctgggtcctcatcttctaaatcagtgagggccccactttattttcggaccaacttcgtcaatgtatcaatttgttcttccatttgtttggtgttactgtctgagagatctcttccacagaatttgtcatttaagtggtctttgaggtccttaccacgtggccttgccttctcaccttttgccttttcgtacttagcgtctagacgccttctgagatccaacatggaccaactatcattggagtactgtccccatatcccaatgtcctagtttactaaattactagagcagtttttccttcccttgggcttgggtaatgttgtaccaatcccttttggcactacatggcctttctaggtagaaggggatctgagcctggaggtattggttgccttctgtgcctgagaaggcctgttggccagattcgtgtttttttaaggaagtgtaggagcatttgggttcttaggttcacttacctttgccttccctttgtcctgtacaggagcaaaagttccaacattggcagggttttgtctggtgtttcctctgacgcgttccactgagaggtcattgtcagaattcccatcatctagatctccgaacttggctcaaaggcaagccatcattttctccattctttgagaaaacttttgttgatgggccagcttttgtctggtttcgagcaactcttaagacactcgaaccacttcagggtcttgctcataatggtagccatctttataatacccatcttttatgtactctccatcgtcctcctcctctttgtcattctcatcatctctttcattatcgatgtcatcatgttgattgcttaggtcgtcctctcgattattcacattggatgtattccaacctctagcattgctcaactgggcgtgctctggcgataggggatttacttcctccatgatattctcgaggccgccttgaagagtcctcttaggaaccatctttcgtatgaaaaccatggtagcagtaacactataggttttacgtctttctttagctctctatgaaagtaccaaaatatttaccgagattttcaaaaactaaatatttgaaaactaaaaaaacaataaaatacaaaaatgaagagatggagatttttacttagttcatgtgttaactagtcaatctattagcctcttaagggcatatttgatgtgtttataatatttttacaggaaaccctaactctgtactatatgtttctcttggagaagaagaagacgaagagtaatcttggtagagctttggctacgtaggtcgtgaatctccccttcgtatgaaaatagaaaggtatttataggctaagtggcgggtatggacatgcccatgacccgcctaggatttttgctaaaagctcactaatggggtaaattacatgtgaaagagagagctgactattggatcccttggaaataattatacccatgcgtgctgcagctggataattggggatcatttgtacattgtggacatgtggcactcaaatgtttaatttttaaaagtagagttcacgtgttgccgaaagctttcaccttttaaagcagaggtttgtaatattcatctagcaaaaaggtggtggaggtgtgcgcactaccatgcctggatacaagagacaagatttgatcttgtatcagaaaaagcataaccatcacttggtgacttggctcacaccaaaggaatacgtccgcaacactctaggtggcggacattcacattaggttcttcgagtacccatccgggtattagctgagcaggcttccatatttaggtccctccgagagagacaacataccttccgtgtccgagaagcttggatggggcaaagtggacttccacatatcttttaggcttgacttattcttgactccgtgaagcttctccgtgacagggttataatgaaggacttcaattagggaaattatgattaatcccatcccttatttgccacgtgtcacatgctaaaaaataaagataacatctttagttctcaaatatttagtttctaaaaattttggtaaacagtaataaaacttaaatataatactcaatattataattttataattaaaattattaaaacatgtaaaactaacgttatatattaatttattgatagagtgtgatataaaaattaaaatatttataggtaaatatttaaattctaataattcaaatatttttatatgattatatataaaatattaattgagatgttatataaatataactaaagcaataaaatatacttataattttttttaagaaaaacaatattataatttaattattgtaaaaaaaaagtaaagcacgaatttgagcccatatctaaaaataagctgatctatttaagaaatatagacagcacgagcaaagcccgacacaaatccgagcatggcacgaaaatatcaggcatgctctttaaaaatattggcatgacacggtacaactcatattttcttgtagcatgacacaacatgacacgtatttttgaaaaacacgaataaatatgaaattcattgtaaaaattagtaactttgtaaattataatatatatatatatatagtgcaatatagtttgaatagcaattattgaattcaaaactgttaacctcatcacactacacaaattagcaaaaatacaaataactacatcacaaagaacttcaaactatattttttgtgcataagcttatggtattcatctcttcactcttttttaatcacgaatgaatactttagaaataatggcagaactaaacaacaaaataaggaggggccaaataaaatatattttcacctaattttttagtatgtagtattttataaatcaatataagaagttaattagctttatacaacgtatataaaataatgaaaaataacaaaagacatcttatagtgccaagtactataaaaagtggcatatcgttaatatgatataagaaaccgctaaccacttataaagtgtcatattaatatgatattgaataccataagaagacacatataaatatgggtgactactcaatggttatatttttattgtaaccatcgtggttacattttccttttatctataatagcaggttaccaataggtaaaacttccctttttaaaatcaattaattataattaaaataattaattgaatatttaacaagacctcttttag

SEQ ID NO: 110812 - DNA, 1345 bp, Cannabis sativa
tttgtaaagtattttgtaatcgggatcccgagtattttgtatgaaatattataagttttaattaaaatcaacacacgaaagagccaacgattgtcaacaacactcataccaggttggcgcgatacaagaatccaggtgttatttttgcgcaaagtaaagaactcagtatccatggtagacttccagcgagggtttgctatagcagcacttgcactgtcaggttcaagctcagttattagagccaatagtgagggtgagaaggcagagaacagccgaggcttacggataccagctttagcccttgttggcatgttagggggaatggcaggtggggagttggatggcagtgaggtatggggtggttggcgtgtttgtttggactgagcgagaggtgacagtggaaggtaaatgtgtagaagtatgatggagtaggagtggctggaagtggaagggtgtttgtctgctgggctaggagtcgtttgttgtggggttgcagatggacttaaggatggattttctggcagggcagcagagtaattgttatgatcattcgttacaatgccatcatgacgatctgaagtcacagtggataggtatggtagccattgagggtagaggctaggttgtaagggtggctcaatgtgtgcactaggatagatgaagccactagcaaaggggaaatcaatttcatcaaatgaaacactacttgcaatatagaatcagccagaattatgaagacacaagtagcctttgtggctcggactacaacctatgaatacacacttggcagatcgaaattgaaatttattagtattatatggtctgagatagggatagcaagcgcatccaaacactttcaagaacttatagttggggttgagattaaagagttttttgatgggacatttatatttaagtacgggtgtagcaaggtgattaattagaaaagttgtagtttaaaatgcttcccaccaaaatcttttaggcatgctagagtgagctagaagtgtgagacccatttcgactatatgtcgatgttttctttccgcttttccattttgttggtgggtatgaggacaaggacgcctaaatggattggagatatggctcaaatttgcgatactcacctccctaatttgtttgtactgttttaatggtggtgtttagttgttttcaacttgaagttggaaatttttaaaggtggacagggcctcatctttggttttgaggggaaatatacaggtgtggcaactatatgttgggttttgtgccctaaataaaacccattccaatataatcagatttacttattaatgaagatcagaattaacattttatgttgcat

SEQ ID NO: 110813 - DNA, 6506 bp, Cannabis sativa
  modified_base (6450)..(6451): a, c, t, g, unknown or other
atgtaatcccaaataaaaggtctaacacaccaaccaatactctttttacacaaataaataatcactcaaaaataatttttgtaaggaataattggtgctgttttgttttagttcgttttgagctaaagtttttgtatccatcgtatttcttcgactcaagtgagggttttaataacaataacatctcggcggagggatcattcttaaataagtggtctctttctttttttgtcaaaaattattaattaattttgagtcaaatcattgtaataataataatattacatcagtagaactagtcagactaataatttcaccatttgactatatgtatatatatatataatttttttttttgactattggcaaataatatttggatttgaacttaatttagaagaagaatgcatagatcaaaatctatttaattcttgaaaacataagagttgacattatcattgaaaggaaccaccccacacacacactcaacacaaagagaaaagtccattactttcaatatgtaaaaccaaacaagttattatattatgctataacatatgaatatttgcacatatattttagacaagagcaaaaaaaaaaaaaaaaaacaaaaatggcagggtctcagtgctgttctaatccaccaactctgaacccacacagtggagaaggcaccattgaactactgggaggcctcaaaacctatatctctggctcttctaactctaaacatgctcttcttctcatttctgacatttttggtcattacccttcccactaatattgttacctatctccttaaattgatttacttgataattaatagtcttattgtgtggacatattttcataactattgtatttctttttctttacttgtttgaatttttaccatcttacaggatatgaagccccaaacataaggtatgcaattcttttgaaaactctgtctatctattttttatcttcactttctttaagctaaaagaaaattcaaccctatggtggaaagtatttttaagtaaatacaaacagagaagcagtatcggtatgcttattaagctgtattaattttactctgtttacaagatccaaagacaagtcattgaatatttccaacagtacttatattcaattttcttctaatggttaatgatttcaattatggttaatactactttgtctataaaaggttagtagcagacaagatggcagctgctggattctatgttgctgtgcctgatttcttctatggtgaaccttttgtatatgacaataggcctctacaagattggttaaaagatcatggaacagtaatgactttttaaacactttttagttttttcccaacaaattcatatataagagtaatgatatgttcaaagcaaattacacataaactttacatagtttataaaaatcatctttatttaagatgagtcccgctcgttaaaagtaactttttacatagatgtgtatgaaatttgtgtgtaatttatgcgccctgcgctttgggggagccaagacacgggcctaatctgtcttatcccaggatcgactctgcataggactaataataactgacaatgttgtcacaggataagggattggaagatgcaaaagcagtagttgaagccattaaagccaaaggtttttctgcagttggggcagctggtttctgttggggtggtaattcaaatggtctttttcttagtttttgttaataataatctatgtttatagtgtcatcttctccttgcttagtagttaatttgttaccatgatttttcttaatatatttattgttttgtcaattcagccaaggttgttactggactatcaaagtcaaaatcatctattgctgctgctgtgctattacatccttcctttgtctctttggacaatattaagggtatggattcttgtgtagaatatttcgaaatccattattaacctttgttattaaattgtaaaatggtatccatttacagaagttaatgttcccatttcaattttgggtgctgagattgatgattatggtccacccgctctcttgaaacagtttgaggagatcttagctgctaaacctgaggtatggaatggaaggtcatttcagtctttttatttatgataataatagtaggctttgtatatgcttatttgtttttatatcacataaaatttgaaattgatataggttgatagctatgtggagatatttccaaatgttgtacatggttgggcggtgaggtacaatgctgatgatcaagtggctgcaaatttggctaatgaggcccataagaagatgttagaatggttttctttgtatgtcaagtagataaaaagggttattgaaagaaataaagatggcatcggatcttaatagagaatataactattagtgttcaagtgattagttagtgttttatatcagatgatccttaattaaggggacctttttagactttgtttttttcaatgaactatttataaatatcggtgcatcgtttgactcacttgaaagaatcgtttttttgagtatcgtgagaaggatcacgcctttaactaggtggatatgatagggattgaatgttgtattaatttatagtgataaatttggacaattgttgttgactctctcaattgtgtctttcaactcactaatatttgtgttaaaaaaaataggaactatttgtggaaaaaaatactatgttttatcttttgacgaaaaagtatctaaaatgataatgttagctgcatcgtaggtacttgttaactttattagacgatgtaacaaatttgtttactaatacatttgcggtaaacatacttaagttgtgctgaaatttgcactgctagatgctgaaaaaactcgagtacttaagtgcaacttttagcataactgaaatatttgcgctacaaatatctttccaaaccaatatgacatagcgtctaatgacaaagttaaaaattgcaccatagttacttcttaagcttgaaaacacatcaagtacatctcaaactcagcttgaaaacaacacatcgagaacttctcaagcaaaagaaaagaagtttttctcttttgaaattcaatctcaatgctgctcagacacaccaatggtacgaattggtatggtatagatctaatcatgatagaacaaattttgaaggggcctcaagttatctcttaccaaataaataacttggaaaatgcaagtaaaatcagatagtaccctgtgcgttttttgtttcctgtttttagtcaactgtctttgtttaaattcaacgccttaagctacatataatttgagagttttgacccaaaaaagattcttgcttccaaaccatctctgagaaaattataattagcacaatagtttcaatatttttttttgtaataaaatagaaattacactgtcctggaaacagaactagaaattgttaacagaaccacagaaaggactgccactaaattaataaacgttgaaaaggaaaattggaaatataaaatctgatgattttccaataggacacaaaagtgtagaaaatgctctcattacttgaaacatttagcatccaataaagcctctccctcgaaaggctcgcaatcttcaatcatctggctagcacgctccttctgagcctcatcggtaatatcaaccttgcgccactcatacagctccatatcatagcactcatcgatgataaactgaggaacctcttgtccacggaatagccataatcccttcaccttgtagggtggctctgaaccaatcaccaacatctttccaaatgcatatttacgagccaaatccattcgctgcagaaaaccacccaccttgttcaaagtcacaaatgagacagtattctcatcattgtacttgtaatcacaaaaccaaagagagtacccctctggatcatacatgtcccagaatcctgcaaaagaaagataacattaagaaatgatacttcagtcttactattaatgccataatttcattaaataaggaacaaaacacaataacttctaatagaaatccttgtcaaaagaaaaccttttcagaccattatcagagtgctcagcaaacttgcaaggtgatacatataatttaagaaaaacaaatgtcaaggctttttcatgtgtgagggtattctcagactaggttacacctaagtcagaaatgattgcctgtcttactttgtatatgtagttcaataaaacaaaaagtacctttgatggcaacttcacggaagttggtcctggtgttagagtaaagcctcttccactcatccagaatcatcttactgggaggcaaaaggtcaagagggttctttgccttgggcttgggtgcctcttcttccgcagcagccaactctactttaggtttggctgtttctttctttggctcatccttggcttttggtttggcagcttgcacctgtgaaggcttcttcgactgaacaggtggaacagagtctgcttgtttcacctcacccaatattttatggaaattcggtagattaaccatggtccagaagtatctctcgatgtgaggaaactcagaggtaaaactcttggtaaggatgcggctaaatcccaagctcaaattacatgtcatgacaatatcagctaatgtaacagaatgcccaaccaagtaagtattgcaagcaagataagtatttagagcatcaagtgctctcttcagtgcagaaattgtagcttcctcagcctggtgatcaatcaagaaaaaggagctaacttagatgaaaagttgaccgaaaagaaacactactctaaaaacggaaaaacacaaggcggggaggagagaggactaaccggaggtaggtatacagcatacccaattcgtggaataaaccaacgcaaaatattggcatcaatttccaatgttgcaaaatcaatccattgctccacatgagcctgaaaaacaaggagacaataataattatcacgttcacaacaataataatggtccttaacatcacattatcatccaaatgcaccctgatagtttcactgtgtccatgaggaatttcggtgaataacttgaagatcttaaatgaagttaaaaggaacagattttaccgatagcaacaaatcaagaaacaaatgataattctacatggaaagcttgtattcatcctcaaaagaatatattaataatagcttgaaagtcactcacattttcaatcaatgaagatccaagaagaggattatcggccttcaagcgagcaactgcaacaagtaattgtaggctataaaattgaagtaccgacaactatcatgtacaaaattgacaaataaaaatgaaggctcaccatagcgtgcaatggcattgctctcaaatatgggaccatcaggtgtttccaaaacaggaacctgcacattacattacacatataattgtttcagttcagacaaagcaacctttcaatatggtactagacttcttgcatactaaaataacccacctttccaattgggttcatcttaagaaattctgcagttttatttgtaacacccatctcaaagttcttgaccaattccactttaacgccactatattctgcagcaataagtgccttgaaaccatttttattggtattccccgcgtgtagaacctaaaagtaattcaaaagaaaaatggtataagaaaattcaattataatttataattaaaaacaaaagaaaaaaaccctccaaatggctaagttatcatgctactgtagttattggcagtagcgttgaaaattctacataaaatactctacaaattatgggaatacaccactttcactcgagaagattgagaaacagttatacataactagaaagcaagacaggtcttcaatttctataaaaggttagttttatacacacatacatacatctatatctacatatataaacaatgtaaagatgttaaagtgaaaataaagctaagaaagcttaccagagccattttttaacacttgatggaagccttcaactttctgggaaaaaaaatggtcaaaacagagattatataattgctaacagagaaagagatctattcagtaaccggagaaaaatactacagcattaaagtacccagaaatgaagcaaaactaacctgaaatcgtagcagatgaagttggaggttttttagtgtggaagacggagcttctttttagggtttatgaagagtcctgttttcttcttcttcttctttgtctttttcaaataaaaaaaggcataataattttacaacaatacccttttacattcacaaatattctagaggcatttaagtatattccaatgaacttttttgttaggtcatgtttggttggaagaaatgaaatgcataaaatttctattatgttggtgttcgatattgagaggaataaataaagagattatttcacaaaaacataaaaataataaaaaannttataaaaatacggttttacggaattttaaatatttttacaatttttttaatttt

SEQ ID NO: 110814 - DNA, 8053 bp, Cannabis sativa
aaaaaattagactaagaaatttttctgaatgccgaaacaagttaagggtgcattagaacatcccttttaagggaatgcattgtagaatcactcaatatcatgtaccaaaaaaatggtatggtgtgttgggtggataggggcccttaatatcaaactggctattgagttttctttttaccaggacacagtgattatatgagtgatagactgagtccgatagtaacatgtaacagagtacgtatctgagtttctgaatttttatttctttttcaacaaatgttaattgaaaatccaattaaatttggttgggacccgacaccacatttattcgggtgttcaataattatatatgtatgtgccatggcttccgcttttaccctatcctttttgtcttggttcgaaattctctgtttggcagtggtgaaaagtgaagagagaatagacagtaaattttttcataatttattaaggaaaaatgctaaaagatagcttctaaggtgtctgacaatccatttcaaaataataataataaatttttaacactataaatatgtctattattcaaatattggttctacatattataatttaataaagagtaatttcacctacatatgagtagttgaccgatatttttcgcaattacttaattttgtctttcaaaaattacttatgcatgataaagtatatttttatgtgattttaatattaatcaaattacttatgtatttatttataccataatatacttataaaggagttctcttttgtttttcctctcaaaacaatctcccttcttacttttcattctttccatatttatagacgagattggagaagcacattggggtttaaggtacattctctttttctctctaggctctatttgggcttttcccagatataggaaatgatttatgataatgggagcttcagctggattcgaagtaggagtttagtgagacaagacacgacgagtttgcagctgatgggacactccaagacacaatgtcacaaaattatgagctaaaccttagtacaacttctttttgataacagatttgccgtctgcaaggacacgtgacttactcccgaatggccacgtattgtggtaaaaattacagacaacatttaccccaagttccagcttacaattttgtaagttgggatttgttattgactatctttttagctctctcccggaggggttgccatgatgtcataggtaaatgaagcacgcttgtttgcacaggtacaccacgtgtttcttaatgagtggctcgtatgcttgcatgtttttccctccttaattctggcgacgtcgatttgttttctggaacaaaatcctgagaggtgaaataaatgtagggcaacaataggatactcgagtactccaaacatcttctcataaatgtcttttttcatgtccccccaatcgtttgatcataatgtgttaattggattttgtagaggaccgtaggatgaaaagtatccacagggttgaaggctataaatatcacttgccttcttcctttgtataattttattttctttaccatctctgttgagggttcaaactggaaatatctttgagctcgtcaaattttcttttactttttctccgatgctgtcaggcacggtactactagcattgttcagttgcaccattctcgatgtctcgaccccaattttataagtattagtgctcatttgtgattaatttctgttgcgtattgttctcttttttttttggaagatttcttgattctagaaatgcctccaaagagtaggggatttttgaacaacttttggtcttggggttttggcttgtgcgtttggttgctttgtgttttgattttgaaaaattttatgtcgtatgttcttcttctccttgttgttgtaacaagtatatgcttacttgattttcttttttcacttcctcgtttcatattctcgtttttgaaagcgttgtatttggcacttgataagtgcatatttgtctgttaagctatattattttctctcattattattattaaattaactctttaaatctttaattagtgtgattttgatttattatgattttgaaaggctaatcatgtgtttagagtattttagaatgattttagcatacttcgatgaaaaatatcaattttggagagctcgattttacaagacataacttaattgtaaattttgataatcttggaagcagaactggacttggagctaaacacgaaagttttagatcttgttcttagccttttggaatatccggaattgtccagttctgagttgtattaaaggagctatagcgaaaatactaatctgaacactcgacaaaaaatttcagcaggaggctctcgtcccaggaagcctaaagcttcgctgcaatgaacataaagcttcgttgcagtgagagtgcgatttcagaaattttaaaatttgtcttttatttaaatcaaaggatttttatgggggtataaataggaattttaaggctcatttttaaggacttttagactgtatttttgagagagaaactcaaagggagaaagagaagaagaagaagaagttcgcatcatcaattgttcatcattattgttgactgaaattttcggcaactaaataattagagcagtgaaaataattagagaagagtaaatgcaagtatttttacgtggttaggacattaatgagccttagtctacgagtatttgatatggaggtatttctttacagataatattctactccattttccccctctccaccctaaatatgcttggggggtatttatagctattttgagagaggaaaaaggcctctattgtctccagcgtccaccttggctttgtacaaagttctcaaattagcaaaatagggtatgcgcgtctacatagtaggttacacagggtttaggtgagacaaacccttatccttccttgattgatgtgacagttcattatgtagtcatcacttacatccttgattaatgcgtaatcaccgaagaatgagtttaatgcattcgacacatattttcatattcgtctataaacgtttcctccatgctgcatttaacgcctgcgaatagtttatctctaggaccctaggcccaaagcccaactcctggagatggacaaaaggttgatccttctagatccagttatagctctaggaggagccatttgattatatccacttaaatcataagcctgcttaagatatcctcgagcacctccaaatcgtaagctttaattgccacgtgttcgatgacagagttgccacgtatattggacaaaagcaaagcaatatttacaacccaagtcttatttaaaaactttataaaatgagacttgtacattgtctatggtctcagggagtgatgtggtaaacatcttgcgcgggcgttggctatttttatttataatcattccgcctcgttttctacaagcaacgattcgattcctgcctatttgatagaccccttcattaatgcagttgtcagagaggtactcaagcatttcaaccgccctttccttttatcttgcaagtttatcttgaccgttagatcactaaaattcggacggtttgaaccctcaacatccgatagtactcgattaggttcgacacttaccctgaagggcctataaaagcttaacccttttgtgactgggacttttactcaccatatttctatttccaggccttacaacccttccaacaaaattccagactccccagatttcctcctactcttcatccgtcgttgccagacgaactactaccgtcatgcggcgacttccactccagcattgtcttcatcgtgtaagtttctctctctccctctcttgacttttcagcatggttgagcagactgtagcagtcagtagttcatcttttaggaaacattttgtgtgcatgtcttccagggtcatagctatggcgatttttcttgggaagtcccttttcaaaatgtctgacgttgttgatattttatttttctttttgggacgaaaggaaaaagccctttgttccttcttaatagacgaattcagtttatttatggttcttgcctagaaaatttggtaggaaagaaacaactagacctttgaagaaagcaatcaaattgctagttcgttggtggatcagtgctacgagcttttaaaagattttaatggagagagcttgaaggctaagaatattaaggaggcttccagatggtctcctccctcctgtttcggtggtcaaaataaatgttaatgtgggggtgaatgccttgtccagttgctgcagtgtagggtttttgtaacgggatcacttgggtaatattttggatgtgccaatgctgagtttctgcagcgtcctctgaagcccattgctattgaattgtgggctattagtagagtggtcaaagcggcgaatgaagcaggtatctccaaggtgttaattgcttcagattgtcttaatgctatctcctttcttactaatccaaaaaggggcatcagtgactaggatagtttggtttgggacattaaaagtgtttgttgtaagtttgagttggtttccttttagtttcgagtgtagagatgttaaacttctcgctcagtacttagctaagatgactttagatgttaaagcttcctcttgttggaacataatataatttttatgacacattttaatatttttcttttaatttctaaaattatatgtgttttttttaaaacattttttttttcaataaccaaagaaactaaaataacaaaggcaattaacttaaagcaaaaaaaaaaaaacatgttcattaatgtatacatacacaacacatatataaaacaatcctctttcttgctatttctttattataaaacagtttttttttaacaaaaataaaactcacatgtatacgtacatactaccatactgtgtaacctttataatttgactttaattttattaaccaaaaaaactatcccatatcatgaggtacaaactaaggggatcagtagaattattctatataaatatatatatatatatataaaaacttagtttggttggtcgggttgattaggcgggttggtagtatttaaatccgttcaatctattgggtgagttatattttcgtctaggttttaagtttgtattttttatcgagttattttaatttagttgaattggatggtttacaaaaatttatatgcagcctaattattgatatataaatttaattatcatactcacatattttcaattcgggaaacggcaatggacacaatcgatatctaataacgatgctagttcagaaaacaataatattcttaattcagaaaattaatataaaaagagtaaatgaaatgtaattacctaagataccttatttgattcattttctagtctgtcacctgtttttatttcttcatcaaatacatataaaaataaacatataacacctattttatccttaatattaaaaaaaaccatttttcatcattggtatattaaatatttaatttattgttttgtctgaattattttcacaaacaaaaaaaggtgcaagtgtgagtgtgcaagcgctcattgttacctgaagagtgacccacaaaagagatgagagcgtgtacttgtaaatctaaagaaaggcccacgtttttggttcttgtctgattctttttccaatcaaaacaatgccataattgcagccgtttaagtgagcaatgaattgggaatactataattgaataataaagcttagctaagaatatttaatgccacacacacaataatgggtttcaacatgataaactaaaaaagagaaatgaagagaccatatatagagtcctcttcaagctaggttatgggttcgaatccagaacctttaagctattaaactaatatatgattgtaaaatataattacgctatactaaaaaaaaagaatcctcttggactctgagtaataaactcccggcatgagactttgacacgcggttagatacgacacaactaaggccagcttagtgatagagattagagagagtacagctataaagtgacttgaattcaaatacacaagaaaactaaccacggattaagctggcagatgataggaatttgcaagaaatgacctaagagacgcccaaggaccacaatttttaagcacaacaaagctatttaacacgtgcttaaggcaccatacagtcatcattaagtctcatgctgcacattttaagacaatgtgctcgtatttgggggttataattgaggcctaaccatgcattaattaactcctacaatttttatttattttttggtaaaagtcccacaaacttaaatctatctgacattaaaaataatgacatagggtcagctaatttaatggaaataataataataaacaagattatcttaagtgttttcttgtgctattaattatgtgctcatagggtagcatattatttttatcacagatcataagtattaaaacacacttataatatatatatatatatatatatatataacttattaatactcataatcatcaatcaagatttatattttatttagagaccaaaagtaagataaacacatacattttattgataatctatgtgagccatttgataccaaaaatctccaatatagattaacacaagcacaaaattagagttctcttagagagaagcaaaatgtggaactatccccttctatctttctaattactattataattaaaccccttttacacttaacacatatatatatatatatcacatcttcgtagccataatgggttatatactaattgaactaaagtacttcaattaatggtataatataatttaatgagccaattataattataagggtgctctcatgtgcctctaacataataaataattattaaccatttcattttggttgttgataaatattagacacattgttaataattatggttatggaattatatctatgattatataagtccacaataattatttcaatattttctcacttggacaatataatcaaaccaccatgacatagtctatcatcacacataaggtaatcaagtaaatcatgcataacatcttatcgataagatatatatattatgtatgaattgtctttgaatacattcaatccaacattaatcattgacaatcaaatcaaaatatgcatgaggtacaacgaaattgagactatggacattcacctccttttgtacttatcactttaataagtaatacatacataaataaacatgacaacaacaactagaagtgactacaatatcattatgcatgttcaaaacataagtcataagcattccatacaaaatactagcatgtttgatacataatagtaaaactccaactgagctcaacaagctaggctcgtaacaatctcattcgagcaacatgctctaaaaatacacatatgggtagtctttcgttagtgggtccgccaatatgccagtggtaggcatgtattcattagaaataagagactcgataactctctctttaacaaaatagtactttatatcaatgtgtttcgagcgagaagtacttctagcattattagagaaagctactgctgcagaattgtcacaatacaatttcagcgacctcgagatagaatccataacattcaatgctaaaatgaaatttcacagcgatattgcttgacaagtagcctcatagcacgccatatactctacctccattattgaggatgttgtgagtgttttcttgacacttttccataaaataactcctccaaccatcataaaaatgtagcctgatgtggatttcttatcatctatgcaccctacattatcggcatcactaaatccaactatataaagagtgtcagcttgctgataactcaacatatgattcttggtaccttgaagataacacatgaccttcttagccgctttccaatggctaagtccaggatcactcaagtatctacccaacacgccaacaacaaaagcaatatcagggcgtgtgcatacttgagcgtacatcaggcta

SEQ ID NO: 110815 - DNA, 8757 bp, Cannabis sativa
  modified_base (6649)..(6653): a, c, t, g, unknown or other
tctctctctctctctctttgggttcaagtccataatactcctttcctcaagtgaagtgaaaatttagcctccctggtggcctcgcagttaggtcctctacttgaaatcgataagctttctcttagagaaacttggagcccattatttcgtgttagaatcatgtttgatatttcaaagcctgtgtccagaggaataccaatcaattttcaaagtatcaaaaaggttgtgtggctaaccttgaaatatgaattgctgccaaacatttgctttttctgtggacgtatgggccacagttacaacaaaggggttttgaatagatgaaggcctatgatgagtctacaacccctccttatctctgttatgatgagaaaatttatggtaaggttcgtgtctttactaatccactccttgagaactctaacaatttaaattttgaacctccttcaatgatttaattcatgtcatccaaccctgccagtggtttatgtgtttcgaatcaagttagcccagtgatttcatctccattacaactgacaaacttcatagcaaactcggtctctactcaacctaaaggtctttattcatctgccaatgccacaactgaaaaagccccttacattggaaaagcagcaatccatcccatacttcgatgcctcaactaactccacagacagaactaactccttctttcattgccttgctcaatggcaccatgaacaacatgtcacaccaacaaacttctctgattacgagttctagccattcttcctactcgagttcttcgagtaattcctccaactccattgccagccattccattgccctactttcaccctcaatcccgctgctggacacgagtaaattctttgtgggaatgccaacctcttttacgatgggcacttcggcaactccaccaaagaagcccaacaaaaagagagccaattatgtctcaaaggatagtttcaaaaagcaatccattatggttgatggagtttcccgttccatgatcaagtgtgtcaagtccaacccggttctagcatcgacatctaccgtcctgctcttgaacaggtcttactcttgagcaggccttcctacaaccatgaggatcgtgagttggaatgcacaatgtctagggagtgattgtgcattctgaaatctctcccatttagctaagagttgtaatcatgatatattatttattgtggaatctaggttagtttcaggttctattgacatggttaaaaattggcttagtttctccaatggtttggaagttggtagaataggcaaggggtggcattttgtttctttggacttctaatgtaactgtcactttattgaatcaatctttaaatcactttgactactatatttgttcttcctctcttaatgttccttcttttcatttgacatgttttaatggtgccccaaacattcaagatagaccaaatacttcaaaattacttcactatattggtcgaaacaatgttggtatgatcattggtgactttaatgcctatcttaacactaatgacaaacatggaggcaacattgacaaaagtccctcaaacaatttttgtcatttcatcgacagttttaatctcggtcccctagagtttgagggccctatctacacttggaacaacaaccaccctaaccatggaaacattcaagagtgaattgattggtgtgtgactaatgatcattggactgaccttttcccaagtaccactctcactcatggaggcttttttggctcggatcatagagctttaaaagtccacctcatacccctttctaacccctcgatggtttcttaagtccaacgctttcttttcaaaaatgtttagctccaggagcctagttcggaccagcgtattgttgattattggaaatcaacgggtggtaattctgatcccataaactactcaatgaaaattcaagaacactacactttcaatttgtaaaagtagaaccacaaatccactttccattttgaaagatagatcgatataacttctaaagagcttgaattggtccgttccaatttgcattgggatgataaaaccagagatcgagccaatatactttagcatcgtctcgatatattactttatcaagaagaactgtattggaaacaacgatctagggtgaattggttgaagcatagagaccaaaacacaaaattcttccacaaatttgcatcttagaggaaaactttcaaccaaattaaagaccttattgatgatgaaggaaaggtcctttccttagaggaggaaatcgagaattacttcaagaatcttttctcttcctctgacccttcttttgaggatatttctagagctctccacggcattaataaggagctttcttctctagtcaaggttcctctcctagaaacttttttggaagatgaagttcaaaaagcttttttccaactgcctcttgataaggctctaggcattgatggtttcaacacaattttttatcggatgaactagaaccatgttaaacaagatgccctcaaagttgttcttagcttcctcaatcggggggaggaaataattaacttgaataaaactctaatcactctcattcccaaggttaaaccttcaaagaccatcaaagacttttgacctattagcctttgtaacatcatttacaaaatcatatcaaaaactcttgctaataggcttaaaccgacactcaacaagctcattagccataatcaaagtgccttctcccgggtctcctcatatcaaataacattattgttgctcaggaggtggctcatgctataaagcttcggacaaaaggaaggaaaggctggatggccttaaagttggacatggctaaagcttttgatatagtcgagtggaatttcatctggtgtattatggaaaaatttggctttccccatgagtttatacatctaatcttcagatgtgtctctactatcacttaccaatttaatttaaatggacgtgtcttgggctcagtttgtccgactagaggaattcgacaaggggatcccctctctccctaatattcctcttatgttctgaaggtttctcttccctcattcgtcaacatgagcaatcaggtcttttgttgggtttaaaagtatccagaaatgctcctgacactcttcaccattatgagctagccacagtacagtgtgttaacttggaaaaatcatctctctatctttcaccaaacacaactctcagggaccgcacccttatttcagattatttacaaatgccaatttgtgccaaattcaaaaaatatcttggtcttcctcaatgtttcggttgataaaaaaaaggctttcaactacattaaagagagagcctggacttacatcccaaattggaaaaacaagtttttctccaatggaggcaaagaggttttgatcaaagcttttatgcaatctatactctcttatgccatggcttgcttcaggcttccagttagcatttgcaagtctcttgaatccatgatcgcaaatttttgttgggtaaccaatgctcaaataactcgaagataaactagattgaatggtccactctttgtaaatttaaaagcgatggcagtttgggcttccgatctcttcctcatttcaatcaagcgatgcttgctaagaaaacttggagacttttaaaacaacctcaccctctggttgccagaatccttgcagctagatatcatcctcattcttctttccttaacagcacaattggtctagccccttctctagcttggcatagtattaattggtggaaggatttgtttaaacatggcctaatatcaaagattggaaatagccaaagaactaacccgatgcatgactactggattcccaatactagatttgtaactacattgagagatcccccatctcatgtggctcactttataaatgaaaatatgacatggaacctaccaagactctcccaagttttcccctaagatgtgactcaaatcatccttaacatcccccttcccttatccccaactaaaaactctcttgtttggcaacacacaccttctggctcttacaccgtcaaatctagataccacctaagctacactctagatactgtaaggtttgagccttctccttcctagccccccacctggtggaagttatactttggaaacttaaccttcctttaaaagttaaacactttgcttataaagcatcaaagaatactctccctactttggtcaacctccaccatagaaaaatagtcccatccccattatgccctttctgcaaatttaattggaaaaacacttgtcatgtcttattcttttgtaattgtgtcaggaagcattggaaaggtatgcccttttactctattcttaaagattcagttcatattaagttttttgacattattgtttatcacagtgcaaacttatttactaaagaagaggtaaagttgtttgtttacttgtcttggttaatttgacatgagaggaactcattcatagcaaaaggaactccaacaactcatcaaaatctctgggactttagccactctttgattcaagagtttaaggaagcaaggcaaatggaattaaagatgaacttgtccatgctgggatacaatctcggagtggatagttggatccttcctccccctggcctctccaaactgaacacagatgcaactattgacatcaactctaacaaatcagggtttataggagttcttaaatatagcaatagagatacgataacagccatagagatcccctacaataggacaggtgatcctcacattcaagaaccgaaagctcttctcttaactcaatggtttattgatgaacaattccatgtcaatttcattgaaacagactgcaaatcaatttagatgcactatggaaggatcaagattacaatagtgtctttggggacctcttatcccaactcaaggtgcgactttctactctcccaggtgtctctattcgccatatccatcgttcagcaaatacaaaggctcatgatgtggcaaagaagactttgagatcatttgaaataatttgttggattggtgatgaggcttgttttcagctctctttcttagtccagttagcttttttatcttaaaaaaagttgttaaatttttttagtattttatataaaacctgtaattaaggttttttttatttgtcaatatttttaatacagtccaaaaaattttattggctacacttaagtatatattaattaatgtgtacattcaaaaatcatggttaaaaaaaatatttttatactataaaaataaattaagtgttcctaccataaaaatattttataatatagctgcatacaactattatatctcatcattagcaatgcttttataacttttgttgccatctatacagtaaattttaaggaaaacaaaaacatcactagttatacatgagcatattgttattaagtattagtagtgcttagtattttttagatgtgttgtcttggcattagataacgatactagcctacaatttattatattaaattatataaaattcgatatttaattatactaaaaagaatattgacacataaaaaagtgatagacactactatttttgaacgtttctcgtaaaatatccacgagacgtggaaaacaagtaacaatttgttggtagggacgtaattaaacacagtacattattagtacattaactcaatatctccataaatccatgtagtggttccaatacaattaaaaatcaaagcgtgtctatacttattttgtgtttttagttttggactaaacaaataaagctaaatcaatcattaattcattatgttacagtttggtaaagtatctcttacttaccaaaaaagaaaaaagtgaggaaataagagaaaatcagttaggccatattctgaaatatattaggatgaggatgaggatgaactttgttgtttttttttaagtgttgaagtaattaattaataaagtacagattacctgccataacataacgtttgtttacgaaaggcatgctaaggccatttacattacacgtagaaccaataaacaccgtgtgagagacgttaacgtgtgccaaaagtcataacatttatagttgttaatatacatatattattctaaatattatttttatttttttctctcatttacataaaatttattattttttttaaaaaaaattactttaataattctccactataatttcacatcacattaaattaataattttttatctaaaaaataactttcttctaataaaaaaattttaaaataaaattcatgtggttgttgtttatattgagcaatattttacataaaattggtcttgaaaattaaaccacattatatatgtggcaagatactctaatagataatttctattggagatgctctaatgtggcgacacaagttaatattttcttatttgtcaatattattgttaatataattaagtattgcgtctcacaattaatgtaataactttaggaaatcactaactaaatacaaggtgacacgtctaaaatatgctagacaccaaataacgccaaatgggcttgcttctgacttttctgttataactcctcctcctctatcaaccctaaaaattctctctctctctctcnnnnnctctatatatatatatatatagcttgcttcttgatttgcatgagttgtttttgtgtgtgctgtatataatttcgactaattaatagatatatacgtactacttctccatgatgatcaaaagggctctgtggaacaaattcaaatctccgtttatagatacaggtatatatatacttatataatttgtaatacacgtacatatgggtcttaattatttacttgttataatatattgattaattagaatttttgctgggtttcatttcttatgtgagaaaaaaagtatatattatatatataaagaatataactttttttttctgtctaagtacaaatggtatatatgaccatgttcataatgtgtgtgtgtgtgtgtgtgtttttttttgatataatgaattaatgaatgtgtttgcaaaggtggcaggtcatcacgcatagagggtggcaatgataggttgtccaataacaagttgagtgttaatgaagagtacgcgaaggccttccgaacaagctcttatgaagaaatgtggggaagagttgatgggcaattaggattaacaacaactactaccagttcattagaaccaaggccagaaacactgaagaacatgatggagagattaaaactccaccaccttttgatcgaatacttcgacgcaagcacacaagcatgtcacacgtgcgaattgcttctacaaagcatccatcaaactcgttccgaatataggaaaatagaaaaggtcattaagatgagcaaaagggtattaatactccatgattgtactactaatagtagtaataattatggtgaagatcatcatagtcatgagcatgaccaacaagaatattattgccgagccatattcagagagctgacttcggttagattaataaaccctttgacaattataagccctcttgaatatcgagatattcggaaaagttacatggttttgctccataaactaacatccaaagagaagaagattaaaaggagagaaaaggtgaagaaaatatgtaagaaagttggaggagttgggctcgtggtatcgcatagtttggtcttggttgccttgttcgtctttgcaatattacatggcatgtttggtcttgtggcggttcctgctgtaatgggctgttcttcaatttacttgggtaaaaagagaaaactggatttggtggctccaaatcgggttgggaaggtaataaatagtagaggaggtggtggggttgttgagcagcttgatgtagctgcaaaaggggtttttatattgatgaatgattttgatacgatgagtcaaatggtgagaaggttgcaaaatgaggtggagcacaagaaatctgtggctgatatatgtgtgaggagtaacaagtttgagctattgaaggaggttgtgaaggagtttcatgctcaggattctagctttttggagcaactacaagaacttgaagaccatatttacctttgtttactcaccataaaccgatccaacaagctactaattaatccaacagattatagctaggatcgatcaactcgatgtgcaccataaataggatatatagtactatatatagttctctgatgatctataaatgtatatttatatataatatgtatacatgtcattgggtaacatatatttatatagtatcatgtttacttgcaatagaaatttaatattcttcacacattgttttaatgcagttaacggcttatatttagttaaagatgctgttgtagaatttttgtctttttttaatttatactgcttggttagtttatttttattcattatgctccataggtgcatgtaatatactattatgtacaatttatctattaatataatgaaaattctatttcttccaaaaaaaaaacaagtgtttgagatgcacataaagatacaatgccatttttatcagttttattttattttatgaagggtatgtgtgtctcaatatgagcaccactccaatcacttcaaccgtttttattttatatattttagcgtctgtttgtaatcttcaatatttttatgttgtttgaatacatttttgggaattttaaatttaatagcattgttattagatactagta

SEQ ID NO: 110816 - DNA, 2816 bp, Cannabis sativa
gcataaaacccaacaataagtactcgcttcctgacactgttattagaaaaccaagcagagggttcccaagtggctctcaaaacctttgttgtagtgcttggtcaaggtttcctatgagcgcaggtgcattcttgcctcttcatttgtagttcgtgttgatagttgattactttaaagcctgcacatatcagataaatccaaatggttactggattttatcgacattcttcatcttctatcgtctacacaattggctcatgctaactcctcatgagatcaacttcttatgtgatctaaaaagaagtcttactcaaaagaagaatggcttatgtgatcagtttaaagtgtatattgacaacatcactgaaaacaattgcagcctctaccacgaagagtatttctataatcctgacatcctttaaagacatgttactttcaaaaggcttttcacttcaaaaggtttgctccattgacatgatgcatatagcagattctatgttgactgatattagcttactggaaagggatggagaaatatttttcattgatgacaacctccgtcgtgtgagcctaataatgacttgtcagcttgtgtatgttgatgctcgctttgctgataattcttggacaatgcctcttgaggatgaggagactgggtaggatagtattgtcattggctttgatgaaatttcaggaggtggtattgaggaaaagatattgaacttttaggtccactgaggctagtgtgtctgagggagttggagaatcaataggttgctgatgcaccaaagtcatcttttacttgtttacttactttcttatttgtcttacgtactaaccatttgttctttttacagacaagatgagcttcctcgctgccatggtttcttgtgctaagaggaagaatccagtgaccaagactgaagatcctcccaatcgagagattgcataggcagctcgtgtgacttcttcaactcctctaatgaagtcaaggaggaaagagaagaatgtcatgtccagcaatccttcccctatgagagatccacacaagggaaaagaaggtgaccgaaattgaggacgaaccttctatatctccaatggttacctctttgaaagtttgggatgatgtcgatcctggctctctggaatcagagcttgtggccaatttacaagcacaaggcaccatgttgttggtgactagagatattctgatcaactccaagtccgaatgcaagcctttaggaagattggtatccaccaaacctcctcatattattgttcgaagagattttagcaacatctttagggtagttagccttaacccatttttacttatctttttcttctttaccaagatcttctcctgaccttatttttgtttcttgcacgcttttgttagcttcgcttatgctattgataatgagcataagagagttgtagagccagctgagaaattggcagttgctgagcagagagcttctaatacggaggccaaggtcattgacttggagaaggccactggtgaacttgagactggagtttcagaccttcagggcactgttagcaatgccagagatcatgaaaagcgccttaagaaagagctttctgctgcaagaaagaagacttttaaggtagaagagcccctcagaaagtctcttgacaaaaagaccttgagtgttgttgagctgggaggtcaagctcatcaacttgaggaccaagtggtggccctagaagtaaaggtcattgtggatatcgctctttatgagggctactactttgattctattttcaactcatggtcgcgcaatagtggatctatcagctttaactaggcagcctttgctaagaaccaggttgctttcttggttggtgaatgtaaatggcatgatattgagtttttctttatgacatcgaatttaacttgaatggtgatgtcttggatgtcggggatgctacaggagttgaaggctacaaccctgagcatccgaacatgcctgcactcgtaggtgcaccagaagtgactatggcacatatcgaggagcttatgcaaaagtagatagttgctagtttttttaggatgttgtcttagtcccctttttttattagcattttgctttcgtgtgttagtcggtcggcccgagcggcctttcgctctggatattccttataagaaatattttagaacttgtttcaatttaactagaaattaatccaatttaattagactttattctaatttttatccaaatttatacacaaggtgatgtcgcatccacttgggtgacacgtgattgatttcatgaccgggacgggaagattcttctctttgatgaaccgtggagggaaattggttactcaaagttaccagaagctggaacgtccgagtaaggcatgtgagaacacccgaccagttctaacatgtgagcagctcgcatgagcctactagaggatgtgagttgaataattttaaagatatcccacatatcttcatgcttgcaagacacaatattcttaatttcatgggatggatatgtagtatcaaagaaaaaaaggtaacttgcctagtttcctatttttctcattgtaattatagaaaataaatagtttcctcatttacttcttattaatttttggaaaccaattgatgtaattaatccctataaatagtagaatcatctcactatttgggacaagaaattcatgcagagagaaacacatgagagaaacctagattcaagagtaaaatactctaagatcattgtaagagctttcgagagagatcaaggccttattgcttctctactcacaagtcaata

SEQ ID NO: 110817 - DNA, 1595 bp, Cannabis sativa
  modified_base (1526)..(1561): a, c, t, g, unknown or other
aaattgctgaataatttcttatatttttatggatgaacaattaataaatttttaagaaatttataataattttctacttgttcaacatcattcactgaagtgaatgcaataattttaaataatcgatgacattatttactactcaaacatttccagaagaaagtggaaacaaccaaaagatgaaataccacacacaatcaaaatacatgaaatctataaatcatgtgtggaattgagtagctcagagatggattttgggaggtgtgattactggagtcgagagttaagtagtgtatcccaatgcactggcttctcctgatggttttggagctactctaaaggcttgagtataagcctcttctaaattgatgaatctttgggcccttaacaagaagtctaacaaagtatcaaacctctttctctacatgtcattccaaagcagggatccaggtgctatccctgattgtagggccactaacttcatattatctttgactttagttttcgccactacttccatcatccattggacataggttttgggactctcgctaggctgctgcttaacattttttagcataataacctccatgtcaaagtccttagcaaccacaaattgctttctgaacatggattgcaaatctcgatagttttgcatggatttgaaaaggaaatcttttccaccagtcttcagtatacttagttaaagtgagaaggaaacacaaacacctttcatcatcactaacttgcaccaccatcatcaagctattataccaaggacatgtggtctatgggatttgtctaaccttcatacaattctattcgagccatgtgaaagtgttctggtagtgttgcatctaaaatccttctgcatggctccaggtcttcatcatccaaattagacacgatgccactttgcttgtagaccagtcggttcatgattttggttaaggtggtgatttgatcctccaaccttctagtgttatcgtctagaacttcacatccacaaattcaatcatttatattatttccgaggtctccttcgctaggcttagctttctcacatcttacttttttctcttttaacattcagacagtccctgaggtttgttgtcgacatgttgtcttcaggatctaagtcttctatttcaatgctctgtttaacagaattattggggtagtttttccttccctaaacgtcaggccccagaacctcagtatgatgcctttcattttagtcgactctgctccacgattgactggacggtctagccctagggcttgagtggacctatctttctacaatagtgggttgactgtattcttgttgttctataaagcattatgcacgagcctcaatggataattatttttctagggctcaaccattttggcttttctcttgtcgtttgttggattagagggtccagccccgggatggttatgctttctcactagtgggttttgagtattgaggtttccctttgctaccatgtttgtgttggaagttattttaccaggaactnnnnnnnnnnnnnnnnnnnnnnnnnnnnnnnnnnnnaatatgaacttctaaaacgatagtaaattaaaca

SEQ ID NO: 110818 - DNA, 3267 bp, Cannabis sativa
  modified_base (42)..(49): a, c, t, g, unknown or other
ttttgtcatttaacaaaacacatggtccaattggtaactttnnnnnnnnagagggtccaaaatggtatttacaaaaaaaaaaaataatcataggcttgggttgtttcactctaacacgattagatctactagggttcgttcaggttaagaccgaaagttgatgtttgggcctagtatatatgtgggcctaactccagctttctgtcttgcttaattaacacaaatggacttgggcgtttcaacattgggcttttgcgttgggtgtaatccaatttttggcctctactctacaaataccaaatatgaaaatatgaaatgaaattaggttgcttctcacttctctttttacttttatctaatttgcagggtgatggtacctcgccttttcccccataaaaatttttgatcaaattttatttaattatcagatgccattttatcattcctaagattcgaacttcaatgtcaatatggttttgagaatagcctaaaagatgagcctcatcagagactctccaaaagaaagcaatgccagatatctaaagaaaaataactctcaaatcctaaccgggtctcggtccacaacatctctttcacataaaaataaaaacttcggtttcttttggataaaaacacgaaacttataaaaatacagaaattttggttaacttttataaaaaatactgtcacatagaaatcttttcaaaattattgtatttttacaaaacactagtaaaacacaaagcaaaacaactcaaaacaccagtagaacacttaaaaaatactagtagaatatcagtgaaaacttaacacagtatattacagtatgaaacttacaaaaaaatacatttaaaaaataaaaaataccatttgacagtatttttgtaaaaaaaaataacaaaagttagtataacatgtaaatatccttaaaaatatcttcaaggaattgttaggcccgtagattcttaagaccgcagaaattccaactaatggtgctcataattcttggtgggtctagacaccagaacccacctgcttcgtttttttggtaactcaataacattattggaggaaagattattaatagttactatatcagtatccatagactcacttttggaaatcggaagcccatgaggagattcagagccaaatctttttctttttaattcagtactctccacatttgcatatgtggaaaatgttcattgaccacaataacatggtcattaagagcagtgtcctttccctcgcaaatacagtgctgagtggctctgttcacattagtaatggttggcaatttatcagaatcaattgcattctaatatagccaaattatgtgggagatcattaactacacataagtcaaccaacaatcaaccaacaagataccatctttcatcaatctcgggttcaccttcgatccacattttcttcatcaaacattgcttggacaaaactcaaaaagataaattctcataaggacaaactcagaagggataaacaaacactctcaatagaacgagagataaaacactctgaaaaacaagaactattttaacaggttaaaatatattaatgttaaatgtctgtaattaatagtaataataataataataataataataaataatattttcttttttgaaataacttatgcaccagatttcattagtatttcgcagttaagcgtctttgatgagaataatattaagataggtgattttttaagagttctcgtattcgtattgaggctagttcaagtggcgataaaatataattgtgaagtgtgtgtgggattttaagattgaacccaacttaatattatgcatatatatacataatacacttcaataaaaaaaaaattaaaagtatataaaaataaaacaatgatcttgctctttgattcaagattgacattatagcttgataatgtatgcctgaatattgcgcttaattaataaatcaacaatattacataagttgtcgacattgttgagaatctttctttttttttttccttgacatttttaatgtggataaatacatacatacatgaacaaaatttcatatatagtctcagattctctttaacacccggtctttattttattacaatttttttatatataatttaggaccttttgtttatatatataaatactctccacatattatggggtcacccctgcaaaaaaaaaataatatatagttgactgctgtgagatggcttgttaaataattaagcttaattaatttggaataataataataataataagacaaagtctttggatgaactactacccacaagtagagcagcatataatatatatttataaagacaatggcagaagtggttatatagagaatccattgtggttaaggccaaagtgagttttgtggtttaattctcatatcatcactttctacccactcttgacaccattcactcacccacttgcttatcaatattatgtctttcctctcaaaacaagccctagctctaccttaattcctttgagtcaaaattaatttataattatggcaacatcatattattataatatatatatagataatttaatttaataagtaatataaaaaaattataaggtatcacattgtggtcgtattagatttaattttatttatatgctattgataaatagttgtggagtttaaattctacttttggccactaaataaaagaagagatgatcctgatatgtatttacaaagaaaagaaaaagaaaaagaaaattaagatggcttactcacaaatttaagaataaagtcttaactaggatatgagcttttcaagtatgtttactatattataaatttacaagaaaatgtagatactatatatatatttatatatatatatatatatatatttatattagcgtcatataagagattaataagtgataacacacatatatcttggctttgtgatagtttttgtattgattatattagctaaaaattactaatgcatgcattaattactcttttatatacatatgtaataatatgctatatatataagttaggacatcttaattaaacaaatccaatagaaagaaaaatggcaaaaattttgatgtttccatacaaaatggcacccaattgaaccacatattccctattattttacatcaatgtcttaattatatatatatatggaagaggtttcaatggttatatttttatcgtaaccatcatggttacatttttttaagtcattggattactattaaa

SEQ ID NO: 110819 - DNA, 2245 bp, Cannabis sativa
  modified_base (2174)..(2175): a, c, t, g, unknown or other
ttattatcgccaaaaattaaactaaagtatttatttacaactggaaattaaatttaggtatttatgccgcaaattactctaaaaattaatatattacataataaattccacaaggggcaaaacattgtctcagccaaatggccattgtttgaaaattgaaatgattaaaactaagtctacataattaaagagttagagggatcttcttcttcttctttttcttaaaccttgccttcttcagcataaccaacctcatccttcttggtctgctcactgtatgctcgcatctcatcggctctagcacccaagaaactcaaatccacctcagaatttgcaatccatgctctataaatggatagcttggccatcaagttgaccctcacctttgcatccgatttgtcctcttcaatctttttgttggatttggtttgggccatctggttagcttcaagaagttctttgatcctggtttgatcagcttcgagcttaatcttaaagggcttcttggatttgtcttagtttttagcattccttttcaactgagagatctccattgaagctttattccattggttagccaaaacctcgtgctggtcgttaggtttgctaagttcaatgctaagaggtgtaacactttggaagcccctctactgagccataaaagataagaaggaagcctgcaaaaaacgaggttagaagaaggaatcaatgaataagatatacaaattttttataaatttgggactaactgacttcagaagttcaacactcattgtcatacgacttgaaaatttccctagttgattaaatcccagtcctcctgttggaaagtcttgaagtgacgccagttttaggtaacatacaacgagtcatcaacgcctgcgatgataggaaggggacaggagggctccaataaaactagcataggttgagacctaaaaatttgaccagatggatagaccccaaggctgtctactagagcttgaaattgttggcactaaagagtggctatggtcttttctgcctcgattgaaagcttggttgaggcaaatttcttaccagtagtcttgttggttctctttgtaacttctgggtttaatctagaggtagcttccacagaggctgtccttttcttgcctcacttagtgggaccagttggactgcatagaaggtcttcaaaatgcatatttgcgagatagaaattaaaaaacattaaaacttgtacaagcaaaaggtataaaggtggcgaggctaaatctcccacttagaatattaccataatcttcagacgaggaggaactgttataataattacttaaatccctaaatccaataatgatataaagatcaaaatagttaatgggagacatatcctaatgtgaacaactagctctatcaaagttagtttcatactgttcaatgattctaaagtaggagctgtcacaacttaattggacgtgatgtttaggataataactatcaaacctatgggccattaagtcgatgcaattttaaatgaataaattatattgactatccttaaagtgaactaatgttgttcgatcggccctaagaagagtaggagaccatccacaagcaccaagattattacctcaagaggcctcgtcttcaggttcccaagtggttacgtttttaaggtagtggatgcgaacaacatagtcctagtcttcttcttcctcatgcaaagggacttattgctagtttggaaacttggggttttaaagtcattgtgcactgatctctaccgagaagggcacatgcctttagattattaccatgtaacaagaagtaagctggtcgtaggccatagggaagattgagtaagatctcatgtctttcctttatctctagagtgtagatgggtctcttagtgaacgctagaaacatgaaaaaaaaatagaattagttaagtacaaaagaaaaagaaaactcaaaaccaaggatttgagagaacttagtagttatgtatgattcgaaatttagtgaagttaattggatacagacaagtggtccaaaagaagtcatccttgaactccttttttattgggtagccttacgatgatctcgcgatcattagtatgggtctcgtgatagtaaaagcctcctgctctatgctttctcgtaggacagacctgttggaaatattttaccannatctagatttactaacaagtatattgaattaacatcctaaatatgaatatctctaaaacaatgaaaataa

SEQ ID NO: 110820 - DNA, 2318 bp, Cannabis sativa
  modified_base (35)..(69): a, c, t, g, unknown or other
  modified_base (2234)..(2251): a, c, t, g, unknown or other
aacattaaatgttagttctgatctatattaataannnnnnnnnnnnnnnnnnnnnnnnnnnnnnnnnnnggcataaaacccaacaacttgaagggtggacaatcaaacttttatggcaagcagggactaccaatctacttaagtatgttgctatgagttcccctatttattcgatgtaaacttttatgatccctaaatctctttttgattatttggataaagtgatcagaaaattctattggatcgaggcctcagataagaacagatacttggctttaacaagttggggcacaatttgtaaactgagagagtttgaagggttggggataacgaaattcagttacttcaatatggccttgattaataagttgggttggatgttgggtaggtggaccaaactctttggtgtaaagtgtttcgggcaaagtattgcaaaaggagaacattatttagaacctcaaccttccgaataatgcatcttttctggcatgtggtattttggcctctcatgatcttaccagaagggaggggtgttggcttgtaggtacgagtcgtgttattgatttatgatctttgcatgggttccttggctcgctttggaggattaggtggctgccttcaatctaagaatacaagtgcctagtgagagttgtcttcctccttcttttaatgaaacgagtaagcttgttatgataaatcttctagattggttcgcaccccagatggcaaatcttttttcttctattgagtaactccctttggggtgtgaggatcttttcatctttcgatgctcttgatgggtcattctcagttaagcaagcctagagatctttgcttaaaccaagatttggggttagagatgatttatggcagaaaatttagaaggctctaattgtagaatagataaaattgttactgtggaaagttggaatggatattctcccttgtgggcaaaaacacagggtgaatttaactgtatcatttatgatgacgctgaagattctttagtgcactaattctttaagtgaaaattacctcgtcgatcttagtttagtagtgtttgggggcatacagatctctcaaatttgttctttgttttaggggtctttagtcctaagagcatctccaagaacacattaaatttggtgaacagtatcactaaatttggcgttaaaaagtatttctactccaccacaacaccaaaaattacactaaaaaaatattcctcattattatattagtttttttataaaataaaaaaaattaatatcatattaattaagaaaaatcaccacaattgttatattatgtactattgattgtactttaattttataatattgttgtgtaatataaggtatgtatactctcgattaataagaatatgatatctagtgtgtctaattttaattttaatatgtgtttaaatttgtattatttttattgtgtaattttcttaaaaaaataaaatatatacatataataaatttttacttaaataattattgaaaaaaaaatttaaggtattcacatgtaaatttacaaaaaaaaaatatatattataaagcgcttttacaatgcacccctctaaatgaaagaatcacgctacataaagttttgattttattttcggcgtgttaaattttttaaaatttttcaaaattttgtaggatgtattaaataactataaagtacacgactatatatataaaaaaaaaaaagactaaataagtatctcaaataccaaaacagatatgagtatatcagtccgccacttttaaagaagtacattatttttttcgtattaaatttttcaaaagttctcaaaattttaaaggatgtcttgaataactagtaaacatacaagtatatataaaaaaaataaactaaagaaatttgtcgggtgccgaaataaataggaatagattcgtaaattaattttaaaaatgtgcattataaaatttttcaaaaataaatttttaattttataaatataataatataaatattaattaaatatgtaaaaaaaataataatatacaatatgccgtgacaaaacttcaaaatgcaaatcactgcatatatgaagctttgccgtgtccttgctctaaggttggttggatttctaggaactctaataaatgtgctcgtaacgcttgggcagcttcctctaaagcgtgtgcctttttatcttgtgggaggtagcatccttttgggaaatttacaaaaatacnnnnnnnnnnnnnnnnnnttacaaaaatactgtcacacggaatttttttaaaaaatactgtgtttttataaaacaccagtaaaac

SEQ ID NO: 110821 - DNA, 3187 bp, Cannabis sativa
ccaaaaaaaaaaaatgtataaagcgaaagaaaaactttccacttgaaggaagaacaagatggatatagcttcatgcattttcaaaatgtgccacatattgaagtaggctatatatcttatatacacgtacaaaaatctccaatgattataggatatctgtattgatgatgtatccaacataccggtcaagacactgtaatacctgagcattgcagagtgtgcagaacaaagcttcttcacccccttgctgctcagtagccgcatattgttttcggcaatcttcatgaacaaacactgcacagaggacttcaccgccaatacaacaggacgttctctttgtaggttccacttgattatctacacttcctagttctccaaatgaacctttcttactggaattatcccctcccatagaacttcgagaagccattgatggggaagaatgctccccaatggcaattccatcaaatttcctaggcatgtctttcgctgatagcccatgatccgtgttcagtttattttttgttctactgtcccaattagacataatgctagggtctgcagggtttattgccgtacaccgaacataaagaatgaaaacaaggagtgcctgcaatgacaatcacattagaataattacatacaaatgaaagatcaaacatgcctgctttaattttatctctgggttcaagaacatgatcttaacggaatgataggttaaggttatacaccaaaatgaatgctttagagggaacatatcaaattctgtaaacagaagttgatgaaagttctccagagacgttttccagctacattttaacatcataaaaaaaaattcttacatagtcatttttttagtattaactaactcacataccactggagagtagatcccgatcaaaacatactcccagatgcggcctccaaggaaaggagcgaagaaagcatagaatgcaaccactaacaagcagaatacggtgatggcaacaacctacacaagtgaaagccatgtttgagaatatatttctgtacacaacaaaaaggaaaacttgagtacgacccttaggtggcatttagttagaggtaatgaaatggaatgataacaatcttctttccattcatttgtttggttgcatatcaattttttttatgcattttaaattttattccatttcattcttatttctattctcattcctattcctatgtttttaattctcccaaccaaacaccaccttagatattaaataatcaacatatcacattgatagatattactgacaaaaattccaggccaaatgctaagtaaaagatatacattttcaaagtacacttacaacaaagcaaaacataagttgaagaaaatgatgactgaatagtggctattcatttgcagtacccaaagaaaaaaattcattatttcgttggctgcttctgctagtacgagtttacattcctaataaatattagatatgtaaatgacacccaaaaccgccaaaaggaagcttcatgtgttctacattaaacactagcattactcttcacacatgaaatgtcttgagattaggaaccttcaagtaccaaaagttacaagaggagtactcaagttaagttaactacacccaatccagaaataaatatattatttaatgataaaacaaacaaaaaattacaagaaaaatccctgtactaattgagcactgaacccaaaaagaaaaacaaaaactcatacaaaacttggatcatctcaactttcagcgctcagaaaagtaagtgtgagtttttccttgaatcaacccctaatctatttttcaaccctagaaggaaaaaggagaatcccaaaatagaaagaagaagaatatgaagaaactaccatgtagagaagagaggaaaaaaaaaatacctgaaaggtgtgagcaggtagctgccatccatgtttacggaccataactgctcaattcagacaaaaattccacaacccaaaaacctaaccagagtgtctgtgtgtgtgaatgagagagagttaaaagatagtagttaagagttaatgttgtgaaaccgctagagagagagagagagttaatgtttggctctctctgcaaaaaccaaaatgccaaaaacaaaattaattttcaaggaaccaaaaaggcatccaaaaaagaaaaaggagcgacaatcacataaaatggtacccggacagcctcgattgtcaccagataataccaaaaaaaaaaaacccgaatatatattaattaaaatactataaaagaaagcaacatgactttgcaaaaagtggaaaatgaagttaaaaaccagaaagaagtaatgcagaagaagaagaagaagaagttgactaaatcaattctggtatctcactcatcacgtaaaataaaaaaaaaaaaaagtaataaaataataaattgattagcgttgcagttctcgcctggctggcccagaatgtgatacatacatatataatatgatatgaagtaagggtgaatagtccaaagtaagaaagaataagaggaagaagaagtaagtggtgtgatggagaatagaagaagaagaagaagaagaaatgacaaaagaggaaagcgttatttgatatttttatttattaaaataataataaataataaataatagaaaaagaaaggcgttgacagagtggagtcggagtgagttggaatgagttgagaaagatgactcggttattatttaagtaaagaatggttacaaaggccaaggcgtggtggtagtagtagtagtaggtttgctttttggtggaaagaaaggtggtggtagtgccttattaattgcgggacccttttctttaatgcctctgtggctcccaccatcttaactctctctctttttttatagcactcaatattaaaattctaaatatacacatctattttaagaaaaaagaaaatatttattagagatgtttgtttctttatttaatttatttaaaacatctcatacatatatattatatataaattgcggctatattaatttataaaaaattatcggagatttttttaaaataaaaaaaaaataacaaattattaaatattaatcgtgttgcaattaataataaaaaaaatagcaatagtcagttaaatctaaatataattaattcaattaaagtgttgcaattaataataaatttgttcatatt

SEQ ID NO: 110822 - DNA, 3907 bp, Cannabis sativa
ttttttttttttttttatggttggaacttacttttttaaatctcacttagtattttaactaaaaaatatgtttagagatcataattagaaaatgcattaacaacattctctatttactcttagcttctgcatgttttcaatttatacttcaaaattaattagactataaattttcaaaaagtagccaataaatcgagttagcataatttacacatttatttaaaacggaacaaattattatatagggaatagtcttttgagtatcttaattaatgcagtacttaatagaagatattaactattcataactagtactcatcgttttgtttcctatccacatcattataagtaccctttaagttaagtaactaaatttaattaatgcaatcaaatagtttcatgacgatgactactcatctattagtggataatgccaactagaatggaggtgcctattaatgtttgatagttgttaaaatttgagataagataaatgaaattttattgtaaaattaattggtaatggtaggagtaactcatggatcttatccttatgtatgttttaatctttccacacattaacaatgtgagactttctaacattctcctcaagatggtggctattttttttctcaccaatcttgcacgactcagtcttaagtggctctttttggttcacagaatcacagtggctcttttgctcagtattctcgaatcacaagcagttcattttggctcatttttttggatcgatttttggatttgaatcgattactcgttaaagttttaatttggctctgataccatattagaaattgggatgaaaaatgctgagataaatggagttccatctcaaaatcaattgactatgagagaagtaactcatagatcttatatatgttctaatttttccacacattggcaatgtgagactccctaacaataataaataaagttaaaaaagactcgcaaaagaaagaatacccactattgacactggtggcacaccatttttttttatttgagtaaaaagtaatttgtaaggcctaacaaacattaaaagagagtgcctgaacattatttgtttgactctactttttatgttttaaatgaaatctcaaaagacaaaaaaaaaaaaaaaaaataggttggaaacgttgcttttcttggacaacagtgcttgagttttttttgttgaaagcaggatcaattttgggttgaaacggactaagttagcacggtctacccagctcaaggcaaggcctacctagtattgggcagcttgtgccattgtacaaggttcctcattttctaagtttttttaagaaaatacctatttttgattttttttttctattatacatatagtactgttattcacgtttctggaaggaggacatgcggtacaaaattaaatataattattgtattaatgtgggaccaagctttcctagtcacgaaaggccaaactagatctgaaatgggtagaagcccaataagagatcagagccttacttcgatttaaaacgatattcaaagggtcgaaagcctactaagccttttggatctcataagggacggagccctccaggcataccaacgggcatgcggaagcttaacgaagaataggagtcagatgtcagccttgacgtgtttgctcctctgacacaggattagactctcttccctatgtcagagcatggtagtgcgtgcacctcctctgcgtacactcattttgtccgacgactcctctgacaactttgtttactaggcgtaatttctgctcgacatgtgctctacgctaaaagtggtactactatacggaactgtcaaaccacaaggaaaaacctttgaatgggccttatggtcgagtatattgtgtatttttgccccaatagtgggtcaacttttacataaaacctaaacggatcatgggtatgtctggacctgaactctaacctatataaacctcttaaccccttcacataaggggataaggaaaaaagtttttttgtatcacatttctaaagtctaagagaccaatatacgaacttgtggattagggatagataacgcccgaactacattaaaattcttcatctcgtttacttaatcattatttattttcttaagttttcaaatatttagtttctaaaaatttcggtaaacacatacataaataaaaaatacaatttaagtttctccgttagttgttccatgtatttttgtataaatgaaaaagaaatctacttttaaaaaacccttatatattaatgtaaaataaaaatgaaaaattctacaatatagtgatgtactattttaaaataggtgcatcggtatatcgctatctttttatcatccaaagtaaatttttagtctaattttttttttaattgtgtagttatttaagacgtattaattttttttttaagaaattcgaaaaaaattaacatacaaaaaatatggtttaaattatctattattgtagaattattcatataaaattactaaagtaaagtgcatttataagttttaaataaagcttcccttttatatactctttttacttaaatacccctaagaaaagctcataattaccatccaaccaactaagatagcttaatttataatcatacaaactatattctcgcccaaacttttagctaatattccttaattaaaaaaataaaaaataaaaaaatcatatttttcattttcattttcattttattttacttttctcaactctgctttttattaaattcaattatcaaactgaaaattcaagatccgagacgaatcgaaaactcgaagaatcgaagaagaagatgaagatgaatccgatgaacaagtgtttttcatcataatctagccatgaatttcaccaaaaagctttctaatctcgaccgtcgtaactttctcattctaattccaccactttccattctcatcttcatctccatctcttttttttcaccatcaacaaatccattctcctctttcgctccaattcgatccttccttctcggtcgctcaaactcaatcctaaacaacaatgtctcttccaccgccaacgcaacaatctttctaccgatgcgaaacgaaacggttgagattcggcggcgaagcaggactaggatgaaaaaagatgagttgcttagatcgagaatagcggtttgtttagtcggcggcgctagaagattcgagctaaccggaccttctattgtagaaaatattctgaaacagtatccaaattccgatctgtttcttcacagtccattggataagaacgcattcaaattctctctcctcaaaaccgcgccgaagctcgcttccgttcgaatcttcgaaccgaaacccataccggagactgagaccgaagctcgagttctcaccgctcataactcgcctaatggaatccaggttaattaatttaattattaattaattagttaattaattttgtttgaactatctctatctgtgtcttaatttactgtcgttttattcgtagtatattgccgttttggggtgagtcttttgattatagtcaaagaaatttgttttatgtcttctgttcttcgatttattaatttaatttaatttttatttgaattaaataattttaggcaaaactgaaagtgacctttttaccaacttttgaactgcccctatatgctatttcttgttggcctattcactctaaaataaatgttttgtttggtagaaagaaaactcttaaataaatttattttttttctcctgagaaaataaaaaattaaaagtgaactctaaaattaggtacacccgtacatcttcatatatttgttcagtttacgtatttgggagtgaaattataaaaaaaaaaaaaaaaaaaagataaataccattttagaccctctgtttt

SEQ ID NO: 110823 - DNA, 1855 bp, Cannabis sativa
  modified_base (1618)..(1654): a, c, t, g, unknown or other
tggtaaaatattcccaacagtaaacatctctctattgggagtgatgtggaaagaagctcccaaaactactacccactcaaccatgttatcttcgacacgcaaacattcatcaacaatcactattgccacttcttcttttgtagtggcggctgtaggtgtgttgctgtcaccattatgtttcttcttgttagcctcctacatttcttgcttcataaagtcctacaatatttcttaatgggacttggcttgcctcagtgaaaggagccatcaatttcgcttatggatttttattttcctctagaattttcatttctatacctgccttctttgttttgacttctccccctattttctaaaatatgggcttgagactccacacctcttgccttattttgcttttcaaataaaaccaaggcctctgcaatgacttcatactcaaacgtgtccttcccataagagttatgataaggtgatcatatgatggaggaagtgttgccattatcaacacagccttttcctcataactaaactttactttgaaacttatcaattgggaaatcatgacattaaaattactcaaatgttggagcatatccccattgtctagcttccgcatctggtacaacttcttccacaagtaaaagttgttagaaagattcctggacatgtacaaattctctaatgtctctcagatagttatcttttactcttttgattctatattttgcaagacgctatctaaaagatttagacgaattttactggctacgatctcatctgtctcctcccagtcttcatccctcatcgtaaaaggatttttctctatgcccaataatgctttgtggaccttctgctggttaaggagatcgttcatcctcctttgcaagagggaaaaattaccgctatcgcagaatttctcaatttctagtttttggctcgtcatgtttcttgagtctcaccaaccactatacttgctaggtgattcccatgaaagactatgtatatttatctcaatactatcaacaaaggataggcccaaatagtctcctagacattatcacccttataagtgagttcctaagaaagatgtggagactcataggcagactacttaaattccagtctcttagacacaactacttacgctgtacgtaagcaatgatgatgtaggaatagagctccagcctcatggctctaataccagtacttaggaataatggaaagtattccaatttcccttcaggatcaatatttgcaggaaaatacaatgggaagtcaaataattctttctgatgtgaaagatcagtcctagctgcaatcacagagcatattcataattttcatatatcttccgatgtagatagtactacaaataattatcaaagcactaaatgcatgccaagaaatcctctaatggcaaataaaaatcactaaaccttcaactatagtaataatgggtacacaagattactgtctcaagttttgacaaatacttaaggaatacactcaaaactctcacactcactagtgtggtaatctcaccatctctctacaaactatttttcacaatcttttaggaattagctttttcttactctcttagatttctcttactaannnnnnnnnnnnnnnnnnnnnnnnnnnnnnnnnnnnncttcactcttggaatagcttgtgattggatgaacaaatgaaagcgatggatctctatttatatgactcctttgatgtatgaacaagacacacaaagttaatcttgcattcaatgcatatttgaatatgtccatatgcctcaattcaaaaattaccattgtaacttttcacatgattgaaaaatacaaccacattttcacat

SEQ ID NO: 110824 - DNA, 3956 bp, Cannabis sativa
ttcatattaggttgttaatcaacatacttgtaagaaaatagatcttggtaaaataatttccaacaacaccctcccatttccatttagggatctggagatgttgaagtaatcccgctggcccctgatattctgccttaacttgttcacaagttagacatttcaacacgtactcgactatatcacctttcatacctggccaccagtaccaacagtttatatactggcttttgaaaggggtaagtaattaatgaatttacttataatatttatatttcatatatatatatttatattatatacatttataatgacttaattttttttattattgttatggttgaagttaccactgtcttccactcgactaacactgtaaaagcacaaaccaatccaccaccgaatatttataaagtacattttgtagagaccgcataatgaaatgaggggaaaatcgcaaagtgcacatagaataaagggaaaaataacatccccaaagattcacttatcactttctttctgctgccctctccttctccccacattcctctctctcacccacatccctctcttgatgtcctctctctccccgcgtccctctctccccggatcctgctctctcccttcatatctctatctccccctgctctcctctctccccacatctctctctccccactccacttcacacacctaagccactcgctcatactcctcctctacgcaaggaaactcacattaacttgacccttagcaaaattttctaaatatttgtttcatctcttgattattatctctaaagagacaatatcaaaggaacgtgtgacaaaggaggaagtcattggaagcatgcacgcctctgaagaagtggttgtacgataggtataagtagtagaggcactctttgtcttactcaaatgaacaattgacagccgaacaccacctctacactaccagtctaacatgttaatcttcatgtaacaaaaggaattttgtcccattaattttgcgaccacatacatttcagagcctccaatgacacaagtataaataacttattttgaaatgctgtaaggggtgaagaaaaaatcagttgtaagagagctttttgaaatcaatagagtagtattttcatttccatatgagttcttgaaggatcataaacatctttattttaccttaagctcctagcatttgatttttttctaattatttagtttacaagttcttgccatcaataatttggtgtcatctatgagaagcaaaaatccatagcttcattattccccaagttattagctatagaaaaataccaaggcaatctcgtcgcctgcatgatatagaaacacgtttggacaacaactagtttgttgcctttcaaagagaaccactggtgatcatcgtcggataaggtaacagagaaaaccctcaaagacaccaagacaacgagggaaactatgtacccacaacggtggtcgaagacagccacggtggagctggttaagccaatgagcagagagatagagccaccgcctcaatcacatcccctaacaaagataatcctcaggtgttatgaaggccatctttagttagatatcaaccaccttcggaaccaaaagctcctggtacctctctccacagacctgggaaggaaaattgggtatactcagtgagctcaagcacctaaactcgtccttgcctataggaaatgaacgaccttcgattgaaaaatcaaaggatggaagagacaatggcgaatttgcaataggtgttgaatttttttgattaaggggcaatctgacacacccatcattctacacaagaatagagatgcaaaacttctagatgattgttcacaacacgatggaagggtgtcccgacactccactagaaacacccctcagtcgactcaagggaagagtcccaacactaggagcgcaccgaagggcagaaagcaaaacgtcttacacatcaaaagaagatgaagaccaaggaaaactccctggatccatgagataatttcaacaaaaattatttcctacggaggtcagtaccacccgcatttggcaacactatctctacagagaaaattatgaaattattattgaccataagagtctcaaataattctttactcataaagaattaaacatgaaacagagatgatgtttgggataagccaaggattatgatcgcaagattctttatcatcctaggaaggtcaatgtagtggtagatcacctaagcaggacaggtcctaggcaggttttcagtacaactataatctcccctcaattggtggttgatcgacctaataattttacatttcaatttgatttgttagaaagaatcaaaagtgccctattggtggattttaaattaatgaaaactcgagaagaagttttagctagccaagctaaggatttcttagtgttagacaactggaggttactttataaaactaaagtttgtgttccaagcagtgtcaagctcagaagagagaccgtagatgaagcccatactactccctaatcattacatacgactttaaaattttattactaatggtgtagtatgtagaaggatgtagtagattatgtatttagatgcgcaacatggtagtagattaaggttgaacatcagagacgtgtgaggttattacagcctgtaacgcttctcgagtgaaaatgggaggatgttactatagattttgttgttggtttgcctagaactggaggtatgtttgatttcttatgggtgattgcagtttggtttactacataagtacactttttactagtggagacaacataagcagtagatctttatggacaaatttttgtaaaagagatactttgtaggattctaatgtttattgtttcggatagaaatttgacgcttacctctaagctttaggaaagtctctagagggccatgggtacaaagctgaagttcagtacagtttccaaccctcagtcaaatggtcagtttgaaaggacaattcagatattggagattgtgctacaagattgtatgatggatcttgaagtttcattgattgagtatatgcatttgatagagttatcatacaacaacaattattagagtactatagggatgctccttatgggatattgtgaaataataagtaacaatctccaattcattaggataagactggagaaaggaaatacttaggtctaaatttagttcagcaaacaagtgatgctataaagaagaacaaggccagaatgcttactttttaagtggatagatgagttatgtagattcaaagctcagaaacacagaaatccaaagtagaggatcatgtaatcctatgaatatcaccaatgaaaggaatgaaatgattcaaggaaaagggcaagaatatgccctagatttcgagggtctttagagctttttaagatggttggattagtgatatatagtctagctttgcctccaatattatcatcggtacacaatgtttttcatgttttatgttaaggaggtatgtttcacatctgactcatattctgagttatgaagccctagaactttaacctaacttatgatgaggatcactcagtacagatccttgataagtatgacaaagtactttagaacaagactataattttggtgaaggtactctagagaagcagtaaggtggaaaaggcaactcggaattaggttctgacatgaggactcatcatccagagttattcatattagatttcgagaacgatattcttttaatagggggataattgtaatgactgcatagttaaatcattaaaattagcaaataattaagaatttaattactaatttatgattgtgtgtttcttagtagaaattagggctcgtcgttagaaataggccatatgaaaataatttttcaattatggagatatatttaaattctaggtgtattatattgtaacaccctaactaac

SEQ ID NO: 110825 - DNA, 9427 bp, Cannabis sativa
  modified_base (3692)..(3702): a, c, t, g, unknown or other
  modified_base (9360)..(9397): a, c, t, g, unknown or other
gatgataattcaattaatatactgctggcactcctactttatattgttacttttcctaactgtacgggaaaataaaaacatggacaaaatgattaaagaacgatatcaacgagtggcgtatattgaattgtaaattaaccaaaggccaagggtctaaatcattgcattattgggggtcaccatatatatatttacgagtcacaaaaccctagctaaaaacccacctcaaattattatttgagactcgtattgataacatcagcaaaagtaatgaagcaaatttaagcaacccttttttttttacacccctgtttagcctctttatgagagaataatggtcgatatatgcaccaccacaacacctacgtacgaaaagaagcaaaattcaaaacaatcaatgtcacatcatacattgatgattatgatgatgatgatgatgatacattaattatttgaaaagaaaaagaaaatatatattcagtagaaatcttcttaccgaattcaaaattaaacaaccaaccaatatacttgtagaatacaaacaaagaacacataaccaaacccattatcgttttctattactcacacttttattttggtatagtcctttccccattgtgtaactaaagaaagactactcatcaaccctaccaaaaataaaaagactcattatcgatttcttcatgcatgtcagatatgtatatgtatacatgatagatatgaatatacatatgtacatgtccaaatacacaaagaagaagaaggtgtgtggtttcaatatgaaaatgcaattaataaagtgtagatttcctctgtcgcacgaaatccatatagtttcatttattgctaagtaaaaaacaaaattttaaaaataatggaatgctacacacatttcgagaacaagctcgttacacattagctagcaattggatctaattaaatcagattagataatattgcattcactaaattatgttagaatttcaatttcactaatttgataaatattatgtttggtgtaattttataaaataaataaataaagtttgtttaacaaatacccattaaatttttattatgaggcttgagcaattaaattagtaatatattttcaagaaaaacttctttttattttacacttaaaaggaaagaaaatcaaggggatagaaaaaaaaaaataaggtgataggaaagaaaatatatttcacttatgttgtttggtaaagtgcaaactagtgagaaaggaaataggagtagaagtacttacaaaaaaaaaaaataataggagtagaagtaaaattacttttttaaatttctatttaaagtattttaattatttaattaaaaataaaaataaataagtaatttaattttatatgtgttttaaaagttttctcaaattttctctccgaattggaagggaattaataatattagcggacctattcaatttctttttctctccaattttctttaatttcctttctctttcctgtcttaccaaacaaacaatttttatttttatccttccacttttctctagtagcttttctttcaaatttaagatagaaggagaacaaggtggtgcaagtgacaacgtggagctgacgaagcgggacgtgtttcgtttagggcacaaaccacaataacaacaacaacatacggcttagttaacttaaactactttaaggtcacgtgaatcgagctctctattaattaataattctaaactcatcaagcctgatctctccataactaaatcaagagtataacgtaaaaaaatctctcatcccaatcaaataaaactcgtaatgtttttccaagttaagttggtgtgtaatggcgcgtgggtcctcttgaaattacaataatggccccatagaaactactcgagtccacccaagtccctactagagattagtagtgaacggtgtacacctctctggcccttttggacatttgcaatggagaattttttacacgcgaagatgaaggcacgtgagcctcagatttttggttttgagtgaaatgaatgaatttatggtacactacctactaaagctccacctgtcatgccacaagaatgagtttaataccactctcccaagcttagctaaaatccaattatttaattattttctcttattgggtctactactaccgcgtatatgaaattttgtgtgtatatatatagagggttgcatacgcctaatattaaccatccacatttgcataccattttttgcatgacaacttcaaaggagttagcttagagagagctagggcttctcaactactgaagaccagctttttctggccacctcccagagctagagagcaagagagaaaaagagaaagcagagacataaacattattattattattagtattagtattcattttccagcatatactatatagcttgtattattcctacatatattttttccttttgtaatatcaagatatggccatcttcaacgttcaccacccttggacatttacttttgggatcttaggtatacatataatctttatgatcgctagctatcattggttatatattgttttctctttttcattcttttgaaactcattagccaagctcttctaatcatgaacatcttagtatattagggctgatgattcatgatgatcatcactatagtattacatactcatcaagatggcatgacttaatattttacatatactggatcattattttttcttttatataaatataaatatatatatgtgaggtccacacttttgttactgtcatagtcttctccaccccatcagctatggcacttttatatttattattattgtatttgccctgcatattaagctgaatgtcttcatccttcccttcttatttgcttagctacattaatatttttaaaccgaaataaatatatatatatatatggtagcatataataaagaggcccccaacttgctacttacttataaattaaattaaatctactcatttcttgtcattaattactactttttacggtttaaattaataactaatcaactaattaattactttttctttctatgatcatatatgacgtacaggcaacattatttccttcctcgtgtacttagcccctttgtaagtattattatattatattatataatttcacctataatttgttattttttttttttccttataccatgtaaagttggttaaatattaattaactttttttttttttttgtggtgtttttatagaacaacattttatcgagtgtacagaaagaaatcaacggaagggttccattcactgccttatcttgtagcattgtttagctcaatgctatggttgtactacgcattagtgaaaaaggatgctatgcttctcatcaccattaactcatttggatgtgttatagagatgatctacatcaccatctacatcatctatgcaccaactcatgctagaatcttaaccataaaactatttgctttcatgaacatagccatgttctcttccatctttcttcttacccaattcgccgtaaaacatcctaaccaagtccaagttctcggttggatttgtgtcgccatttccgttagtgttttcgctgcgcccttaagcattgtggtgagtaattaaaaatagggactttttcaattttacacattaaaataattttttttttttannnnnnnnnnnaattctacataaaaattcctattgcaactagcagtgcaacctaaatcaccacaaaaaatcgtatgacaatccacatagaaactaccgtagaaaccactttaaaaactcaaactgtaattttttttttttaaaaaaaaaaagtttaaaaaagggataattccccttaaaaatatacatatatattttgtaattgaaggtcaaccaaatctcaagttcgaccttaagttttctttctaatttattttattttattatttttttttttttgtaaaaaaaaaatctattttgccaattatttgaacatataattagtttgctaggattctttttagtgatttttgaaaaataatacatatttttaaggcctaccaaatctcaagctctgccctgtcaacaccttaagttttctttctaaaaaaagtaataatagtaataataataatatattttgggtaattattctaaaataattaatttgctatttacttttaccaggcacaagttattcgaacaagaagtgtggaatttatgccattcaacttgtcatttttcctaacgttgagtgctgtaatgtggtttgcttatggcgtgttactcaaggacatatgcattgctgtaagtttattaatttaattaattactgtaaataatttgacacagtaataatattattaacatatatgggctttttgtgtacatatgatgcagattccaaacgtagtgggcttcgtattgggccttgtgcagatgttactgtatggaatctacagaaacaggaaaaatgttagtgttgatgaggagaagaataaggctcatgatcaacaccttaagagcattgtaatcttaagctctttagccacttgtgaagttcatcctgtggatgttgaaacttgtgaccaagtgactactgttgaggttaataataataacactaatgatgataatgatcatcaaaacgggactactgccactactgaacatcatcatgatcaagacaagaacaagcaagagaatgcagttaattaattaatatttcccccatagttaattattaattaaatccctattttgtaatcttcatcatcatcatttgcagcatatatatctatttaagaaattagagtcgtaaacaaagccaagaaagagtagtactagtgcattatgagtgtctttgtaatgaagctctatttatttttataatactttttcctttttttaactgtttttttttttttcactctgcgcatgtaatatttaatacgaaaatgtactttgtttataacaagaatgaagtaatcgaattaattattaattgtgttttttgttagtcattttcgtacacctaacccttaaccacacttgttacagaatgaaaaggaaatatgattttcaaaggacaaaaataatgcacacacatcacataaatataaagacaaagatatatatacatatatttatattgattttggtacgttaaataaatgtagtagtacgtagtactagctagtaatagtagtgttcatatacagttgagcttaaaaatagaagaattgaaatatgaggtggtgatgttcataaaataccccatctaatttaatacgcacaattcaattcaatcaaatccgtaaattacactacatatatttatatatatttaaaataaattgtatatgtaattaatattttaatacaaaaaatattaatttaagaatctaatacatatgatataaatatattttaaaatttaataaattaaatttatattccattattatatagtaaaaagtataatttaaagcaaaataagttattttttttacatataattttttttcctttaaatttatttatttatttattttaatttgttgttgaaaataaaaaagaataataatttattttgttttgttgttagttatatatataagaaatattttttaataaaaataaataacaatattaaaaaataataaattcaaaataacttatttaatttatatttttatagattgaattaaatttaaattattgtataaataaattagatcgattcaaactataaaatttctacttcgtaggaatggaatgtactttaaataaaatattaaaaatttgatgaacctgtaacacaaataaaaacaaaaagtaaataaatatttggattgaagcttgaacgaaaggcaatagagataaaatttaattaattgcgtaagaaactcgtatactaattttccctcaaattaatcattggcagctagctagggaagctgggtgggtgtggttcaggtggatgggcaggcttttgtcagtgcactgccacgtattcactcaatggtgtccaactcatcttccacgtggcaccattactggtcgttcgtttaactttcaaaaccaatcacgatcacgaatgagctaataatttatttattttattttgagtacaatattaattttatgtctttataatttcctttagatatttttactgaatctatgctcttaaaataagagattcttactggttcacctgtatagctaggttcacgtacaagcatgtacggtcaaaagtacagtttacgattaactgtgatgttttttactaagaaaaaaatattaaatatttggcacaaaacagaaactctaatcaatcattgcccaatctggggcaaataattcaatcaggattctgagaatttttctaccactatatattatatatacatattgatattcgtgcggctaaaattctaatagtgcaaccccgtccattttgagtaccaaaaatctgttgaataatgattggattttgtcaagaaaaatgcatttggtttatctttataactgttgaattatgattagactcatccaacccttgttagttattggaattaaaaaaacaaatcaaacctagctcaaaatacattcaaccttaaacaaattaaataaagtttatagtagataacaatataaaaagcactctagctcttttttaagagataacaaaatcattctatatatatgtataagaaaaatctttatagtaggataggagcaagccacttttggtccaaccggtaagagtgcgcgtcttcactattacattaggtctgtcgctaataatccccctaaattgttattggacattaacaataaaagtttgataattggtcgctatttgtagttattagtcttaaacttagtttgttatttgattgttaactctgttaagttagttggtctagttttatataacagatttctgttatggttgttaagtcaaagtcagccctttccctttatataaatactatttcattcatttaataaaacaacttttacattgctttcactaatatggtatcagctgcttaaaaatctcttctttctcattcatcgtcttcaacctctgttctaccattgatattcaacatggctcgaactcgagctactggttcaaggagttctggccaaaatcctccgcctaattcctcttctactattccagatgctccacaacatgacgatccgatcattcctccatcccatgtgattactggagaaaattccactaaccagaatcgaccccctcttcgtcctgcccatgaagatagttctagcccttattatctcagttcaggggatcatcctggcctgatactggtcactcctcccctttctgatcagaatttccaagcatggagacgagattttgaactatctgctggtgcaagaaacaagaccgtgtttctcaaagggactctacctcgacctccgattgaagatcctctccacaaccattggctccgctgcaatcaaatggtaatgtcatggatccttcattctatcactccagaaatcaagagtagtattatgtttcttgaaactttggctgagaagtggactgaactccatgctcgatttcatcaaggtaatggtcccagaatttttgagcttcgagaaacacttatcactcttcgtcaaagtgatgactcggttagttcttattttacaaaacttaaatgcatgtgggatgaaattcaggaattaagaccaaggattccctgttcttgtgctgcttctattgacaattagctttcttgaatcaagaacaggtcttacaatttctcacaggtttaaatgaatcttatttccctgttcgagcccaaattcttcttattgatccttttccatctttgtctaaagtcttctccatggttatccatgaagaaagacaaagaaaacttaaaaatccccatctcccactgcttgcttctgttcaagatttaagccaacagcctgctgcactggctcaaaatccctcagcctgtgcagtctcaaccaatccccgatccaataaaaagatgcgactctactgttctaattgtcacaaaccagggcatttaaaagaaaaatgctatttcttgattggtttccccctggttatggtgacaagaaaaagaatgagcagccttctttccataatgcttcatcttctgttgatcaatacagtgttcttcacaatcttaccaagcaagaagacattcaagcaataatatccctcctaacacaaaagttacagccgactcatcctcccacagatgcatttgcatccaatatttctagtaaccattctaatcacctatggattgttgatagtggtgcttcacaccacatttgctgtgatttttctcttctttctaatgtgcacaaaaatactaaagctaacactattactttacctaagggatcgaccactaacgtttctcactcaggtgatattattttctcaccagattttcaactatcgaatgtactttatgttcctacattcaaatttaatctctttagtgtatcgagttatctcaacaacacctctaacagaatgcttttcaccaactcttcttgcacattacatggcacaatgaacaagaggattgggactgctaaaaggattggcaatctatacttcttgctgcaatctgacagatctcacaaaactcctttttcatctacttgtaatcagttcaataatacttgtaacagtgcccattcatggcactctagacttggacatccttccatattcacaacaaatttgcttaataaacaattacattctgaacacattaatgtttctccttgttccatatgtcacttagcagaacagaaaagattacctttcaattcacaaaataatattgttgctgcctgttttgatttaatacatttggacatatggggtccatttcatgttcaaagcatcgaaggttataaatattttttgacaattgtggatgaccatagcagagatacttggatttatatgatgaaatccaaatttgatgtgcaaattctaattccacaattctataaccttgttttcacccaatttaacaaaaatatcaaagtggttaggtgtgataatgcaaaagaactcaatatcaaaccattttatgttcaaaaagggattcaaatatataattcatgtgttgagagacctcaacaaaactcagttgttgagcaaaaacatcaacacatctttaatgtggcccgagccttggctttccaatcttctatagccttggtatattggccctaccttatacacactgatgtctacttgataaaccgcacaccaactgttgggttttatgcccnnnnnnnnnnnnnnnnnnnnnnnnnnnnnnnnnnnnnntaataaagataagaaataacatttaatgtt

SEQ ID NO: 110826 - DNA, 1797 bp, Cannabis sativa
  modified_base (684)..(686): a, c, t, g, unknown or other
attgtattctatatatctatagagttatttaagtagatttcaactcaaataagattacctttttagttgtctatttgatgggttcgcgcgtgctaccaagtatatttacttattattgatattattgttacaaataataaaaaagagtatgacatgagagtatatgggtggccgtggcaatgtgtaaaggaaatctaaaaagtaataacgaaaattgtcaattctaaaatctacaatttcgaaagttgaaagtgatgttggacacaagctctagcacaatcatccttgccttaacaacaatgccataggtagatatgtatgagatagcaaaacaaaacttttatttccaaaattttgctcatatttatatattttttgaattgacaaatttcatcatatccgttcgtgtacattttgattatgatgtgttctaaagagtttattattgagtggtccctaccataattatttaagtaaaattttgattatgtagttgttgttggtaccatcacatgtactcatttatgaactagtatgatatcatatccccatacttttcctctgctactaatttgtgaaattttctttcttattttcaatgaaccatattgcatattaattggtagaaatatatggttttatttttctacgatcacttaaagaaaatgatgatgatgatgatgnnnatgatgatgatgatgatgagaagctcctagagttttgtaactgaaagaaaagtagataagaaaatgaaaatagaaagggcatggagcactaagattggacaatgagaatagtatttgacacccccaagatttgtaaccctaccaaaaaatattgatcttaaaaatgattacattatttgttggtatatgtaacttttcaggtgatggacacattcggatgctctaaacctaatgctctttccactcactcattcacacacactctctctcaccctgaaagcctcatcaacatatacacacaaatttcaagcttatatgacaacaaagtgaaagtggggaagagaaaaaagagaaggacaaattcctcattctttagtcacaaacaagccaagccaatttatattataaatcaaaagaaaaaaatcaggtttaaaggcaaaaaaaagcccaatataatgtctttttggtgtgaaattacaaccacaaaattttgatattcttagtatctaaattaaatatctgccacttgattaatgaaagatattcatgttgggaaggattataaatatacaaatatatatatatatacatttaggatatgacttttttgttggaggatttgtatgaagtgaaatgactcattcagtgcaaaaacaaaactaaaatatgaaaagtactagtatttgtagttgtggtccctcaaaccttttttatatatttatcccaattcttagaataaatgtcattctagctttcttggtcgaaattctgtttggaattgtttatacatgtgtgtttaaattttttaagttgaacaaaaatcaagcaattatagtagtgtcattttggttgtcatttcttccctagaatcaagcctttttagatctttaaataaaagtttgataaaaatataacgacacaaagaaaatgaaaccatatatatctcttaataatgcccctccattcacacattctctttataattccttagtgtttgattgagagaaataagaatatagaaataagaatagaaatggaattgaataaatttaaaatgtataaaaaattgataaaaaaaattattaatttttttatcatcatgcattagaat

SEQ ID NO: 110827 - DNA, 4193 bp, Cannabis sativa
ttacagtgagatctaatttaacatccacaagcacagaagcagattacatacatctcaaattcagcaaaattcttctcataatctttcatcttcctattcaataacatatgaactccatagagtgactcctttttaatttctctaactatataatgcacttgaaaaacaaaattgttatatatatactagtgttcgccaaatatgatacacagttgctgcaaaaacagtagccataaactcttccatggtctctttcctaacacccttgagccagccatgccaagcagagtttttcaacagccaaactgatcggcccagctaggaactaatccaatgaattacttgttgagaataaacgcaatcaaaaaacaagtgactgtgactttcttcaaaagcaccacaaatctaacaaagtcacaatctataaagatgtggcagttgagtaaattgtctctagtaagaagattattattgacaacttgtcctagtataaattgatgcctaggcatgctcattctgttccacacacactgataatacttcatcttttcttgcttcaacaaggagttgtatagtttgcttgttttagactttccaccgacccttgcactaatgtcttgctgagtaaaaatatgtctaaaaggcataacttgcgccaataccagcttgtatcagctttaagctggtacccccagatatcttttccttttaaataggtgtgattcacccatttaacccaaaggacctctttattagaactaatttcccaaatatactttgcaagcaaaaccttgttccactaattagttccttctttaaagccaagatccccacaaactttggaaaggaaaaaattttcccaagaaatcatatgcaaattacttcttgttccattattcccccaaaggaaccaacaacagagtttattaatctctttgatgctttgagaaagtaagaaaatgttcatctaatagtttctcaaacccaaaagaataaagtaaatgagggttcagtgcatttaatccagaaattttttacaatttattcaaggtgcttaggacaaatcttaaaagtttttagaaaatgttatgggaattttagttgattattacttctaatagaatattttaattgtttaataagtttgataagcttttggtctaaattttagataataaatttcaataaatctattctttgttttttgtcaaatacaaaggaggaaatgaagatacagtttacaaaagccttaaatatgcagactacgaaagccattgaaaaatatttagatttacccatgataggtgggaagaacaaaacagagattttcaaaccaataaaggataaaatatgggcaaaactacatgattatcaggcaaagcttttctcacaagggggtaaggaagtgctagtaaaagttgttatccaagcaatgccaacctacctaatgtcttgttttttaaaattccaaagggcattggtgatgagattgaaaaactaattgcaagatacctgtggggatcagttgacaacaaacataaaattcattggagagcttggcataaaatttgtaaaccaaagagtgacagaggattaggctttcaacgttttagtcagtataatgaagctcttttggcaaaataggcatggtggatcttaatgaatccctcatcaatactggctcaaattttgaaagcactatatttcaaactcactaacattctagaggaagataagggatcatatccttcaccaacttggcaaggtattttatggggcagagatttgttattaaagggacttagacagagtatagaaaatagtaaagacacaaggacatttagagacccttggttgccaagaccaccttcttttcttcctagctcagctcttgcatatgaggtggcaagagtgtcagatcttattgggtcaactggttgttggaattattgtgtagtacaacaacaattcaacctccttgatgcataatgtatttttttctataccgttgagtccattcaatcatgaagactcatggttttggcattataccagtaatggtaattatacagtgggaagtggatataacactgctatgactttggataaatcattatcctcttcagctagtgatgtattctcattatggtggaagcaattctggggtttaaaaatgcccagaaattttttacattttgcgtggagaggtttccatgaaatcctgcctactcgtaatgggttgaacaaaagaaatatagtctctaacaattcatgtgagctatgtggttttggaggtgagtccaatgctcatgcaattttctggtgtccctttgcacaagaaatttaaatacttttggattttaatttcctacatgaagtgagagaggtaattaatcttaaaaatatgttactatatgcacctgaggtggtagaaagggaattgtttgaaaaaaaaaatattattagtgcttgggccatagggacagagagaaataaaatgactcatggtcaacaattaagacaaccacaacagaatgttaattggattgccagttattatgaaactattgtatctgctcgtgatggagccaagcatagtagcattagtcttcaaagaaataggaatggtttggaagttctacctagaatttctcaagaagaacagagccacacaatacttatggttgatgtagcggttttgaataatacaagtttagtcggcttagcgactattattttttcagaagataaaagggtgaggtcaactttatgcaagcctctcaaaagttagatagtactttaactttaaggcacacatttctcgatttgtataagcctttaaatttttaagctttaagttttcgatagcattaggctcgatttacatggtgtggatttaagattgaataatattaggacttgatttacaagttcagctagcataaacactattatattttaattgctaaaagggtgaggtcatttttttgctaacctctcaaagattagatactggagtaactttaaagaaaatattttgatgtgtataagattttaaaatattttctagcaagtttgagtagtatttgttattgttttatataatgtggatatgcgtttttagaaagtttagttagcaattggttatacagtgttgagcacttttgtatcaggttttgatgtgtcatgccttatgctgttttcttttcgaggaaaatgttttgtgttgagttttaaggttttctttcactagccaaagggttattggatagttccttctttgttttcttgtttttcttctttagtttgggttgtgttttcccgttgaggtctgtttatagtttttacttatatcttgttattgtggtgttttatggttttattgtgttttcaggtagtatttgagttttacaagccgagatcttgacacttttggttggacttaattgggctctttcatgcggaatcccaattaaagagatgttttcaaattcgttgtctctggtcacagctattaacaaaggaagggtgttctttaatgagctgggcatactacttgaggatatcatagttttattgtctaaactttcgagagcatttttgtcctatgtggctcaggatgcgaattctgcagcacgtggtttagcaaaacatgcccttgagaaacacgatgagctatcctggttcaaggaggtgccgccgccaattatggattgttgctttgttaatcatgttaatcaccgcttcaaaaaataatagatatattaaaaattaataaaagtaaaatttgatacaatattattattatttaatttttagtaaataaataaaaaatataatttatttcttatatataatttaaaaaataaataaataccctttgcgaaacaagagttgtttaccagttaaataataaaattaagttatttaatatattttttttttcaaatttatgatttgagttgctcggtgatttttatgtgggttgttatgtgaattttaactgtaatttaaattgctcccttaattgctatgtgaatttttatgtaaatttctataaaaatataaacaaaacaaactaatttgaggtctaaaaataaaaaacccaaaaaacttagaggaaattacactctatacccactttttgtttcatattttaatttttaccttcattttactactctttaatttat

SEQ ID NO: 110828 - DNA, 1357 bp, Cannabis sativa
ccaaatcaatttgttattaaatggttgtgtttgatcatttatttggtatggtttagttctaaattaaaaaattaaaaattcagaccaaatcaatcgataaataaccctagcagaatgtaaacgaatgagtgtgcgagtatggttggacaataattttagtgacatgctctttctcgacaaattgtagtgcatttttagattcgactagtagcattttttgatttggacattatttgaaggtttataaatgaagagaggagaatacaggatatcctcatgtcgtactgtctcctttatcaggtagatactattttcatgtagtattttgctcaatcttgcttgtttggtaagattttctttttaatgctgttaaagttgtatttatttttgtttgactggtttgttccgcttcttttttgtccattttgttataatattagaaatttatcatccttgttctttgtgacgttagctttacgacatttttggtaagtctacccaatagtgtttctcttagttgtgtgcacctttttgtaatcaacataggttgttgttgtttagtcatcttataaattttatgcaattttacactatatttggtaggagaaaaaggtgaaaagatagagatgagagctcggaaaatcaaagaagattacaagtccttttatttagcaggagaaattaaaagagaaaaaaaaaagtgagagaacaaatttactcaaaccttcaatttagaattcatcaattaatagaaggattagtcttcctcttcaattattgtaaattataaaaataccttaaaatatattattaaaaataaaatagtaattatatatacttcccgcactcatccttcctaacaaacatagattattactcttctttccctccattatattctccctcattcccaaacatagtcttactttctccaatcttcataagcttgtttcctttacaccttccattaatattcttcatattctctttgaaaaaatagcatatatctaggtccttgatgcatatttattttaatacaaattgaaaatttttattaatttgttaaatcagctaacaaacataactcaattaaaaaaaaaacattacatctattgaaaactccatagtaaaaagaacataacactaacaaaactatgactatgagcaacatattagtagaccctttaataaaacaaaaacatattatttgagtaaataataaagtcaccataaaagaacaatgataagtttccaataaccactaaatgataagtttaggttaccaaaaaattcagacccggatataaaagggtgtaaattaaatgggaaatttgattttctatacttagaaaatcaa

SEQ ID NO: 110829 - DNA, 8411 bp, Cannabis sativa
caaactatcctaatcatgtatgcaaattgcataaggcaatctacggtctcaaacaagctccacgagcttggaacgaaaagctgaaatccactctttgcagcaacggttttacatgttccaggtctgacaactctctctacttttctggttcgggtaacaaccaaatactattattggtatatgtagacgatatcttaattacaggccccaacaagtctctaatctcacgactggttcaagatcttaacaaagagtttgatatcaaagacttaggacccctacatttctttctcggggttgaagtgtagagaacattcgctggaatgcatttatctcagtcaaaatacattgctgaaattctcagcaaggttaagatggatggagctaagccaagtccaagtcccaccagttcagctatcaaattatccttgtctattggtgacccttttttagacccaacactctaccacagtacattgggagcattacaataccttacccttactagacccgacatatcattcattgtaaataaactaagtcagtttattcatacccctactacaacccattgggatgcctgcaaaagacttttcaggtatttaaagggaacaattcatgagggccttttcattcaacccgctgctcgactggaacttcaagcttattctgatgtcgactgggcaacaagcattgatgatcaaaaatccaccggtggttatgtagtgttccttggtggaaacttaatatcatggtcagcaaaaaagcaacaagttgttgctcgctcaagcacgggaagcgaattccgtgccttaaccaatgttgctgccgaagtgaattggatatgtcacttactcaatgaaatccagatctctctaccagcttgcccaataatttgggttgacaaccagggtgctgcatctcttgcagctaatccagtctttcatgcgcgatccaagcacatcgaaatcgatcaacacttcatccgagaccaaattctggccaagacactcgaggttcgttatgtgccatctctcgatcaaactgctgatattctcaccaagtgtctatctactgatcggtttcactatctcaaagacaagctcaaagtgtgttcatcaccatttcgcttgaggggggatgataaacaagtgtcagagttagttttttgatagttagcactttttgttgtaacagtttaatgtttgttattttgctgttagtattttctgttaattactctgttttttacttcttgtatcaactctgtaatcagctccctataaatacaatgtctcatttcaagacttgcaacttttgcaaagtcttgtgatccaatttcttcaattgtgtcctcctagaattgcatagattagttcacttatttcacagattcaataccaaataccaatcactaaataaatatgataccaaagaaaaatatatcacttaaaattttttaaattttagggtgcgtttagaaagccacaatttaattgaatttgtgtgtaattggaggtaattacacaatttttcatgtttgtctgaccatgtaattgcactgtaagtgtgtaatttgaagtaattgaggggttccaattatattatccaattttcatggcccccatgagaattgaatgtaattacactatgtaattactaaaatctttccatattaaacattaactactaaaaaatattatcttttcatgtaattactaactattttgccaaacaagatattaggaattcatatgtaactaccacctcatatccaaacacaccttgcattttaaaatatagtgtaattactaaactgtataattaccaccctagtaattacacagttacttccaaacacacccttatataatttatataatcactcataactaatttacgcatatagtatactgttaacaaataattaatgattatatttgaaaataaattaaaggaacgattaaaataaaatgaaaaaattatgcaccaatttagtgtaaatttaaaatctaacactactaatatgtattttagtgattgttcatgtaataaatcatgctccgagactttgatatctaccaaatcatatccctcgaactttgatatatattaaatcaagcccctaactttcatccatgttagattagacaaaaatatttaaattcaacaatctcaatagttcatggagcgtttttaataaccttaaaaattcaaaagtataattttatacatgtcaaagttagaaggtaaaaatgttaattatcctatcttttatccattctcaaaaaatatagtcaaagagttttaatatatttcactctgttttacaatttcaatttttatgaaatcttgggtgtgacatgaataatgagaaaataaattatgtagctgacttttcttggtcagagtagtgtccatggtgaccatggcagaagggaagcaaaataagtaaaggagaaataaccaaagaaacatcgaatcgaattacagattgatggaagtggaaatcggtctattaccataaccactcacttcaaaccctcttctctttcctttctcaatcgcttttactcttcttctcttcaatttgtaaaacgatggtatgattctcatatttctatttcatacaatatgcaattttgtggtgattgaatcatttgtgtttgattgactcgcgatgttgcagatccgattcattctcttacagaatcgccaaggcaagactcgtcttgcaaagtactacgttcccctcgaggattctgagaaacacaaggttgaatatgaggtatgcgattcttgttcatacacgattcttgttgagaaacacaatgattttgagttggattttgatttctttctttcttgcttaggttcatcgtttggtggtaaacagagatcccaaattcacaaacttcgttgaggtgatggtttctctctttatttcccctaatctttttcgtttgatttctcatttcgatccataattagattaatggctttagggtttgaaaccccataattaaataattgaacaaagtgattttaggaagattggttaaagggttgtgaataataatttttgatgagacttaattcttgcagtttcgtacacacaaggtaatctacaggcgttatgctggattatttttctcgttgtgtgttgatattacagataatgagttagcatatctggagtgcattcatttatttgtggagattttggatcatttctttagcaacgtttgtgagctcgatttggtttttaactttcacaaggttagttgctttttctccatgattgaatgttgttttgatagtgtatgtgtttgttatagagaatatgacatcaagaacttcaatgtatagatgaatatatctaatgttactatatattttcttttatctaaactgagcatattgttgtcctgtgaatgtgaaggtatatctcatacttgatgagttcattcttgctggagagcttcaggaaactagcaagaaggtgtgttatattgagctcttttaatctttattcgtttagtcttttatgcttttcgtttgtgtgtgtgcttttctcgttgactgcattttatgcctggagaatttagttgattgttctgcttagaagcctatttttaactccaaaatgcaacctcttgtgataatttactgtctgtgtggaaccaaaattttggtacatttacaattgtcagatatgatatggtttagatggttaagtcactgactgttgtatctccttttctcttcatctttgtcattattggctaattaatcatctctctcattttcatttgagtttttttttctttcttcaacaagggtctgagaaaggattgtgggcttttttcaaaacttaagaaacatacatatttttttatttgtggccaatttttttgaattttcagatatgtaaacactgggaaaatgtgagatgcaaaatgtttaaccgtgaaggctgttttttgcaggcaattatagagagaatgggggaactggaaaaactagattaagaattctgtggtgattgaagagtgtgtagaactaaatttgttttattatgatatattccctattgtaatatttgaaatggaactaaatttgtttcttcttcgtatttgcatttcaccaatatactttccatcactttttctttctatttttgataattcatgtgaaaatccttctatcctttgttgaattgaatggtcattctatcctttgttgaagtatcattcccattacaatggtgaaattttttccattaaaattaaatttcaaataaaaaaaaatacaattccttccataaagaagtttaattctagttatggcagaagttgcagatgtagatcgggcaataaaggtttttttatatattttttattttatgttttaacctcaaactattcacagtttgaacataattaacgtgtctaatttcatattttagactagaatttctgacgaactctgcactcatggaaagtttaatttattgtctcatttattattataaatgatcataatttaagaaaagcttggcatcactaatttaatgatcatcctaacttattattgggaatcattcactgcatcattagtgacattagaccccttaattacacgtatttttggtctttaatatattatacatgtactctaatctaatctaatgttaaaaagcacaatatataagctaaaattaaaaaatattgttacaatcattcacaaacccaacaaaaatactaaatgattatagatataagtaaacttgttcattgaacttaccaaaataaacttaaaaagtcaagtcaaagtccatatcattacttcacaaagcaaaatataaaaccagtctatacatctggtaagatgagaggttactacgattacaaagcaaaagcataaaaaacataaaagaaacttatgcatatgcacacatcaaaagagcaagtacattgcttttccaacacagatctttatcttacaaaatcacagcattgatgatgatcaacttcactttcttctcctgcattttaaccaagaaaaaaccaaaatatatgtagatttaagagaatactgtgtagcaagaaagaaaattaaaggtatagactttagattcacattacctacctaaggcgtttgttaggagtccaaccatcgagcatgtactcaacaacatccttcaaagttgcttttcgatcttcttccaaattccatagctcatgaactggaaaacgaccacttgggttgtactcattcatctcaattaatgcagttttaacagcctcataagctttctcacccaattcctttttcagtcctttcaacttcttatcttccccatcaacaacttcctgaattaaacagtcaaaagggactatagagttaccaaaagaataagtgaaaatgcttccatttacccttattcctaaataataatccaagaactcaatcacattcaaatgagccaaatcatacacaaatagtataaaccatatatatttatgtataaatgtaccgtgagtttgcctctgattttgacaaatttgaaagggtgccagtgtggatctctaatatatttgctccataatgtgcatttctgcatagcttcatagtggttatccttgctacatttcattgcttcagtgaatggttcagaatctaattctcccattctcttaacaccaaaaggacaagaagaagttgaggcatttttgaagtgctacaagtcaattaatgaaagtattaaatgggtatataactaaagcatttaacaacaaaattagccaatgtgaccaaaatacaaacatctacatctgcatgttttagatttatggaataaagtcataacaaaaatcttacattaatgaagagcctccttacttcattcaactcatccttactctttttttcattagcaatgagagcttccataagctctttctcagcttcagcctcttcttcttcttcttcttcttcttcattttcttcttcttgctcagcttcaggttcattttcttcctcagactcagatgggttttcattaactttcttgttctttttctttaacaggacaaataacaaagttacataaattagatctcagtgcaaaaccaagacatgcaaatttgatcataaagaggtaattaatatttttaagtgtaagctcaccttgtgttggttttcaatttcttcaagcttgtgcttcaattcttgaaccttcctcttttctgattatattaataaacaaacaaacacattaattgattataacttgaaaaggctaatttaactaatacatattattagatttatatgaaacctaccttcataatttgcttcatatagttgtgatatttctttgaaaagtgaacatcttctctgtaattcctccagactttctttctccatattatcaactcaatccaaagacacctttgttgttttattttgactagccttccatttttatagtaagttaaagaaaagcaattattatagagttttttttggggctaaattctttaaactatcacttaacttgcacttaaccatttaatttcaaacggcaaaaactggttacaaatttaaagtatcatttatttttttagagttatcactacttatgtgtacagttttatacatttatcaaatttatattggtataactaatattattatttaaaaaatacaaatattatttcaaaatttataatatatattttttaaaatatttcatttaattttaaaataaaatttgaaaataataattttaggtgtaccaatataatcgtgtcatgtgtataagagtgtacacataagtagtacataattcagttaaccgaaaaacaccttaattttactacttagtttaataatttcgaaaatttactgttaaagaataattaaatacaagtaagacaaaaattgaaaaaattttactacaaaatttattatcaaaataattttttattttttgcccaaaaaactctttattatataaaaaaatttgatagatatgacttctcagaacgatcatgagattctcttctgcatcatatctccttttctcttttcttttgaaacaaagtgatgtgacaacataaattttttttttttttctgaacaacataaattaaacaaccagaatactaaccaaaatagttccaacccaatgttaaattataataatattttaataagcaacattttacattttttaacaacttagtttttggactagttgtgagaatgtgtgcacataccagaaaataattttgattatgtatatgatcaatttttaataaggttatttaggattttttttttccgaattttgacatgtaccaaattatgtcccctaaacttctttagccgttaaaaattctcctgaactattgagattgttaaatttgagatttttgtccaattttagtaaaaaaagtttaacatggatgaaaattcaggattatgatttagcatatatcaaagttccaggctaatgatttggtagatatcaaagtctgagagcatggtttagtacataaacaatcactgaaacaataaaattgaatgaaatcatacaaaagcccttaaatctaacaatctcaatagttcaggggaatttttaacgacaaaaaaagtttagggggcatgatttggtgtatgtcaaagttcgggggaaaaaaaatcctaattagccttttaataatgtccacgtatataaaatattgatttatatatttaattattttcttttgaaaagaaaaaacataaataattcactaacacatcaaacctaaaaagtctaaaagtataagtaaagcataaaagattaaataacaaaattataggaagtcctggttacaaaatgcattctttacaagagaatgggtaattcttaaacctattataagagcattgcaaggagacggtatattttcatatatgccgtgaatattggtccaaggaagctgtatttcacgcagcattttgaagttttgtctacagtgcacggtatatatgttgtgcactgtagacactgcatatataatatatatataatttaattaatatttataaaattaagaattattttttggaaaattttacaatatatatttttaaaagtgatgtataaatctattcctatttgtttcggcacccgacaaattttgtattcattttttatatagtcgtgtatattataattatttaagaaattttacaaaatttagaaaaatttggaaaaatttaacacgccgaaaacaatacacttctttaaaagttgcgcactgatatactccaacctgttttggcattcgagagacttttttagtctttttttttatggtcgtgtacattaaagttatttaagtcatcctgcaaaa

SEQ ID NO: 110830 - DNA, 4674 bp, Cannabis sativa
taaatatattacaagtttattttctttctgtttaatataaaagtttaaattctgcgctatttttattagtaatcccgattaggggattagggtttcataagtgttttggatagcgtgcatgattatttagggtgttacataacgattcgcttcccgtccattgacagactcttccatgaaagacttcggtgtttccatattatttctttttaggatgtccatagcatattgatattgagacagaaacagagtgtcacctgatctttgtgcctgaaacccgaggaaataactaactgaaccaagggttttcaaagaaaatttagcttgtagatcattgataactttgctaacaacctttgagctagcacgagtaattagaatgtcatcaacatatatcagaattagaagaagacttcaattttgattgctaaaaaataggttgttatcatatacaaaatttgtgaaaccccatgcaagtaaggcacttttgagcttatcataccaagatttaggtgcctgtcttaagccatacgaaccttcctttagttgacacacataagtgggatagttaggatcctcaaaaccttgtggtttgtgcatgtaaaccaccggttctaaatcctcatttaaaagggcattattaatgtcaatttgttgtatttccaagccataagtaactgcaagagtaaacattattcgaatagtgcttgctttgacaacaaggctaaatgtatcaaaataatttactccaacagtttgttgaaagccctttgcaaccaatcgagcttttagtctttctacagtaccatctacccttagttttatcctttacacccatttgttatctataacatgcatgccatgatgatagggaactaagacccatgtgttatttttcttaagagcataatattattctcccatagccttgttccagaaaggattactcaaggccattttaagagaggtaggttctttaagataacactcataattttgtaactcagctgcaagaattttgggtttgtaaatacctaatttggatcttgtagtcataggatgagatgatgttgttggaggtgcagtttcgacaatgggaaggggtgcagtagtgtgatggacagtgggtggaggttgatgatcttgatttgtagtggatggaccaggaacatatggctcatgctgctgcattgtgtgagccatgtgaggggaggaagtaggttgttgcacaggttgctgcactagttgtacaagttgctgcactggttgtgtatgctaatgtattggggattttgggtaagattagacacatcagatggtatagaaatatattggacagtagaacatggtgatgttgagatggaatttgtagagaacagttgcgactaagggaaacataatttaccaaatgtgacacttcgagcaatgtatattctaccagatggatgcaaacatttataccctttatgatgtggactgtaacctaagaaaacacacattgaagttctaaaatcaaacttatgtttattgtatggtcttaggagagaaaaacatgcacaaccaaaggttttcaaaagaactgtgctctggtttggagtgaaacatgttctcatagggagagatgtattggttcttctgtatgggaagtctgttgatgaggtaagtggatgaaacaaaggcatcccaccagaaagataagggtaatttggcttgagcaagcaatgtgagccccatatcagttatgtgcctaagttttctcttaacccgtccttgtcgttggtgtgtatgtggacaagggtgtctaaagatgatacctaaatcataaagaagaggttttaggggtctatactctcctccccagtcagtctgcacaaattttatcttagtattaaactgctttacaacatagttattgaagtgtttaaagacatttgaggtttctgattttgtagtaaggggaaaggtccatgaaaactttgtaaaatcatcaatgaaacaaatgtaataaaaccttcaggggaaggatggggagatagcccccaaagatctgtgtgaactatatcaaagggagcattagtactgttttgagaagaatgaaaggaatattgattaagttttccatattgacatgcatgacaaattgacatttcagaggtagtaatattgagaaagttgagaactttattgggaacatgttgattggggtggccaagtctactatgccacaatgatacaagctaagaatttttacaagaattaaaaatattattagcagaattgctattacattgggaagtagacataacattagcttgacacaaagaagtaatgtttgttccaacatgtgctttattgtactgaattggcatattgttgtgtgagtgaagttgggagctatctgataaagaccatctttaggggcaccctgaagaagagaaatcttcgattgattgtccttggcaaaacacaaatcaggagtaaattcaacagtggcattgttgtcttgagtaaattttgaggtactaatcaaattttttgttatggctggaacatgaagtatatttataaggtgaagagattttctagcagcaagagtactattaccaatgctatgtatagagagaggagaaccattacctacaacaatattttatttgcctttttaggagctttgctggtgcagattgttattgtcttgagtgaaatggtaagaagcaccactgtcaaggtaccaagcttcatctgtaatgtagcctgttgaagcaacaagggcttgaggttggttggggccagaggtggtatcattctcatctgcgccattgtatgatattgaaccttctgtaacacctctgaaccgtgtgaccagctcgaccacaaagttgacagatgggttgattgccattcgaataacctctgccaccaccattagttgatcaaccaccataggatcctcttccacgtcctggagagttgtttgaatttccacgaccattggcagtgggagggccaaattggttcttcttgaattaggcataattggttgtggctccatttagatcaatggtggcatgagcttgttttgcttcaattcgaatttcatgactctagagcataagctgaagctcagcaagagtgagattgtctcttgaggtcagattgacaacaacaacttcatactctgttcctagaccagtaagaacatagaagatcagttgttcatccgagattgggtttcctgcagcacgaagaccatctgtaagattcttcatcttgagtagatattcatcgatggccaatgattctttcttggtggattgaagctggttcatcagatgaatttgtcgagctcgagatgcagttccaaacagttgctcaagtgtgttccagatttcagaggaagtagcacaattgaccacatgcccgatcattgattaaaaaatagttgatattaaccaagaaagaagaaactgatcaagacgcatccatctattgatttcaggatttcttaccatggtttggattctggagcttagtgaatccttgcctaaggccgattttgattgaggagaattccttcacgatcatgtgctctaattgcaagaagaacttgagatctccaaaataaatagttgttttgatttagtcgcagtggtggaacgaacagtgtagttggaataacggactggagagctgcagcactagaataggtttccatggaagttcaccatcggctctgataccaagttgagctaagaaacagagtgatgaagttgagaaaaaaaagagaaaaatgaatctttatttcattgaattaattagttattagctacagatacaagtatttatatcgactcatatacaagagctgaccaactaattactctataacagaacaatcctaactgtatgtctaaccaacttcctaaccgttttctttttcaatatcaacaaatataataaaaataaagtatttttaatttaattttttaaaataatatatgaaattcttgtactcaactaaatattataattcaattaataagaatataattacatattatcttacaacgaaacataatttacatatttctttgcgattatatttttctattaaaaattattttaaaagtagtagtgctttattttttatcataactgaattatgttttcttgagtcattgtgaggataagcccacgggccagtgtagttcattgtaaccgaatattagtttgtagttaactgattgtaacttactagttcataaggtaatttacttatatataatttacatgcacataactacttaatacccatatgcagatatacaggcttttgtattcattggcaccaattaagtacaatgatattcatatgttctaactagctagtggaatttgagaataattattaaactcttttaaaagtactatataacatgaatatatatatatatatatttgtcaaatataatttaaattttaagtgatcgatcgtcctatataataattaatattaatgaactggcagcccatcaaaacgatcatccattgtttatgagtatgataaaagaaaagactgccaaaaaacaaaagggagagagaaggtttgattgccttccaagtttaacttcaaaataaaaagttctatatgtatacatattttttttttttttt

SEQ ID NO: 110831 - DNA, 4008 bp, Cannabis sativa
cacagtaaaattgttataagtaccgtgtgacagtaaaatagaaataaaatgagaaaaatcagtatagggtgtaaatttcccaactatttttgtgctccacaagtattctaaaatacagtctcaacatccatgaaaaatattaatatgtaaatttcattccaatattaatatattttattcaatagtataaattagtgaattgggattagatttgggctaacatattatattttgagataagttgaggaatacatcttttttgtatccattaatcaaaagtaccctcatattatatttcattaaaatctacctacttttataagtgggttgcttaatatagctttgccctccacttaagtgtagcacatgatttatattaatttaagatgtataatggagacatctttataaaagtgaatatattttaaagaatatgaaaaatgaaggtaaaaataaaaataaataaaataaagtgggtatttaatgcgcaatttctacttatatttttgtgaacgataagaaaaacatttgatagaaaatttattttaattttttggatttaatttgggtttttttttgtgtgttttacatattcgtgtttacgtgttgtgccctcgggctaatttgatcgtgttttcagacttgttttatcgtgttgtgctcaaacccacgtcatgtcatgccaatttacattatcgcatgtcgtgcttgacctatgccgggcttagaataaaaaggaaattatatatctatatcagggtcggatatggtgcatatagtattatcccagcccccgccccatccccgtttcgggtattgaaattgtcccccaccactgcccattaactaccaagacggggaatccccaccccattaggagcgagtccccgcgattacccatccccgcagtataaatttccatctctagatgagataaaaacaattaatatacaataactattttattaccgacccactgaaacaattataacttaataaaacacagacaaattaattagcttagaatatgcaaatgaaccattaacaactccgcatcatacgtatataatagttatttttataaagtttttggcattagttatgaaatgaacataataaaatacatttataacttgtttatttcatctgattgaaaaagccaatctattacactaaagctagtcacactcaaaagcaacttattattatttacagagctttcatggaggcggagactactactcctaccccaaaacccgtacacatcgtcattttccctttgccacttcaaggacatgtaatcccagctgtacacctggcaatcaagctagcatcaaaagggttcatcatcaccttcgtcaacactcaactcatccaccaccagatcaccaaatctctcaaccaaaacgacatcgatgacgttgtcgttgatatcttcgctggggctcgggaagctggtctagatattaggtacagaacagttagtgatggtttccccttgtccttcgatagagtactcaaccgtgaacaatacatattggagggtcccttgggtgttcatatgccggcccccatggaagaactcatgggagacctagtcaaatcggcggatccatcagtttctgtcttcattgctgatactttcttcagttggcagtcgagtatagcaaagaagtacgaccttgtttcagtgtcgttttggactgagcctgctctagtcttttctttatactatcacttagatctcctcaaaataaatggtcactttgggggtgcatctcacagtatgtcattttgtctatcttttcacattcataacatgtgttgttttttattgatgaggtataaacttttttctattgtacgaaaaaaaagtgttaattttatttaatgtcttttgttgttaatatatagataaggatattattgattacattcccggggtcaaggctattaaaccaaatgacttaccatcaaaccttcaagaactcgatgtctccactatcatgcacgaattcataaagaacgcattcgaaggtgtgaaaagggctgatatgattctctgtaatacagtttatgagctcgagtttgagaccattttggccatacaagagaaccaacccatgtatgcaattggcccactttttccatcacggttcaacagttctcttgtgcccaccagcatcaagcccgagtcagattgcatggagtggctcaactccaagctccctaactcggtcttgtacatctcattcggtagctttgttccatgtggaaagaaagaaattgatgaaattgctcatgggcttatgcttagcaaagtgaatttcttatgggttcttcgtcctgatgttatgtcttatgtgaagccttatgctctaccaatagggtttgaagatgagactaaagataggggtttgatagtgacatggaccaatcagatgaaagtgatctcacattatgcaataggaggctttttaacacattgtggttggaattcagtgttggaaagtttgtggcatggtgtaccaatgttgtgttttccgttgatgactgatcagttgaccaataggaagttgttagtcgatgattggaggactggggtgaacctttgtgatgagaagtcgctaactaggtttgaagttgtaggcaaaatcaattctttaatgtgtagaaaatcagtaactggattgaaggagaatgcaacaaaggtgaaggatataatgaaaaatggcctagttcttgatggatcatcggagaaaaatttgagtaagtttattactgacctaaagattaaaattgctaatgatcaatcaaatgtttagatttagttatcttttgccatgttttggaaatttttctagtaggcttgctaaagggttattttgatagattcgatatctatttggttatctaaaaaacctttttagtttagttttttttttataattgcctacgttaaagttacttaggaccacttgtaagtattcaaaaaattaagaatagttcaaaatgccgaaaataaaatttgaataattacttaccatgtgtataaaagaaacaatcatgcttttaataaaatatgtaaatcttgtttcgacattgtaaattattgataattttctaaaaatttgcataggtcctgaataattttaatatatatgattaagaaaaaaataatagactatgttttcttgaatgtcaaaacatgataaaaaataaaaaactcttttaaagaatgttttaaagaatgtactgtaggcttactccaaagtttttatttttagtaatatagtacattttttagctattctactatattcttgtgaatttgatcatgtaaaatgtaatggaactactcttgttacttgtaaagttgtattgtgtatttccaaaaaagaaattttacttatctgtttaaaagcacacactatagcaaaccaattttctaatataactccattactaaattatctcatgtttcacctttttaagaaatcacatgcatgccttttcctcaataaccttcgccccaaagagagaccctcgaccgccatcatctctgtccaaagatgatgttccatctctctcttgttccatctctctctctctctctctctctctctctagactagccaccatcatcacctccatccaaatacacccatgttgttcaaaaattaactgcaccgtccccattcaatgacaaacactttgcatgaaggttatttttttcttataaaaaatgaagttatataggttgtttttgaataaataatagaatagtgattgttgttgagattaatttaggatattaaagtttgatttatttctatttttgatcaatctagattcgactaatgtgggaagagaaatactaacaaatggccttatttttctctctagtgaaagttaatgtctcttttttagcataataaagcaaatattcctttttattttttgttatctaaaatactcttgactatatataaggtatatattatatgt

SEQ ID NO: 110832 - DNA, 1277 bp, Cannabis sativa
  modified_base (1045)..(1045): a, c, t, g, unknown or other
ttgatatttaatatctttttagttaggaattgaaatattgaattgtgttttttttttttacttatttttttggaatatttttatacatgaaaaaaaatttacacccatcctccaattaaattctgggtccgccattgaatatatatgcatgtgttttgggatagatgttaataaatgggcaccattcatgatattgggacttttaagaacttataaatttttttgggctaagatattacatatgtgttggtgttttgaccacttttaagaagtcaaccaactgtttttttctaacagctcaacaagttggttaagattggctcttaactgtcataacagcctataaatacacatacttttggctcaaataaaaacacggcttggagaacaaccacttagtacaaaactaagttagtatagggttgtgttagagggagaatatgaagagagaaattgatggatcaccattgttagagtgtatagtttcagcttgtgtttagtgtgtgtgtggagggttgtaaatagagattgttcactcttgaagtgacttctcttatggtgagttgagattgtattcttgtaacttgtatattggtgatccaaacttgaactattcttctccttattcatggtataatgttatgaaataaaaagtcattcaattcaattcaatttaattcattatttttggttctattttctattgctgaattactgtcattgtgttattgattgcttgagttatttgttatggtgttcttgatgaggttttgatctgcaacaaatggtattagagctggtgtagtattgtgatattttgcacacgcaaatttacgtatcgtgacaagtagtaaactcaccaggattgaggtcgatcacacagggattatagttaagtacgttaaaattaaacttatatttctattttgttgaataaaaattaagagaagattaaaactagaaaataaaaacagtgaaaaaggaaattaacagttaataaaaactatggcttcgatttcaattgtttctattgattatggcctantatgattatcttcctattatcaatatctatacaatagtaggtttactaaggtaatttatagtcttcttatatatataaatctcaattatatgcaaatcttttactctcgcgataaattaaacatgtcataggcattaaacaaagaaaccatataagctatctaaaccatataggtactctcgtcttatatcgaaattcagttctatttcactatagcataatcgacactcac

SEQ ID NO: 110833 - DNA, 995 bp, Cannabis sativa
tggtccacgtaatattagttttaaaaaataatttaaaatattaaaaatttagaaaataagaaaaaaattaattacaaaaaatatattttttctttctttcatttttttctttttttttttattacaaaaattattttttttcccttttttatcttttctgtaaccttcacttcctttttcttctctcttctactttgatcagtctccacctcttactaccaccaccactacactagaaacaccatcgccacaaccaccacctatattgaacccaaaatcaccatcacgacagcactcgatataaacccaccattacaaataaaacaagacaaagtcatttgacattcaataatggatcgatccacacctaatcccaagcaaaacccatttaaaagaaagaaaaaaaaacataaatgtattttcaactgcccacaaagctctgttaaaatacatttcaaacaaaataagcatttctgttcagtaccatttaaggatgataatccatgacaatgaaagcacgagactgagagagaatgtagtcaaactcgcctaagaacagattcgatgaaaatgttagaaaaacaagaactaaaaagggagcatgaacatggaagggggatgaacttcggtgccctcaagaatccccaaaccaaaaaaaattaaattcttcattctctctctacggtggacggagagcacccggtgaagccctcaccaccgtcgaccaagaacgagtgagaggagagggtttgagagcgagagagaagagaggagagggtctgagagcgagtgagagggggcaggcagctgatggaagaggggggcaggcggcttccatggaagaggggaggcttctagggtttgtttttggttcagttaagaagaagaagaaggaaagaaaagggaaaaggaaaaaaaaaataaaaaattttttttttttttataatttatatattttaattttttttttctgattttttatttttttttaaaat

SEQ ID NO: 110834 - DNA, 6493 bp, Cannabis sativa
aagatcctggtaaaataaatttcctacagtaactccccgcctggtgtgttacccataaatatataatgactatgatcctcgatgtcttctcttgtaaacatcttctccttgaatttaccgtaacttgtcgaagaagaaaatggatcgctaaatccagtctcattggtccctctagcaacactagcatcattggtccctctagcattactagttccgtttggacaactactactagtaccaggtgtttgaggattttctctacgaggcattcttttctgtgtcggttgcctgggtgacatttggtttgatagtggagtcaattttagagctacagcagctgggacctctgtatcttggtcgtctcttacgtaatcattatcctcaacatagcattcagggtacgaaccatcacaaaaaccatcaataaagggcatttgtgctacaatgtcaacactcgacatcatagtatttaattcaggtaacacttcggtaaccaactcctctagatttgtttctggaacaaaactcccaacctcgctacgagtgtcgttaacaatacttggtgtgggactaggatcgatacaaacatattcttctttaacaaagtcacaaacaagggagtaaattcatctaacttctttgcaagcatagacaaaaatgaccttacacacttattatttcaaataactttagggcgatacattaagtctttcatgtacttgtaattcatttctaatttcaaatcatactgcactttgtcaatattgagttcttcatacaaaagatcaaccaaacgtgattagcttacgttcgtatcaatctcaaatgtcaaagttttggcccaactataaatccaatctcttccctcaagctcctaaacaccattatacataacgaaagcaaaaatagttgaacttatcacagttaaaaaaatactattaataatttagaataaagatctaacagaaaagtgatataaactcctcaaaataccttaaatctgtcatgcatcggaccccatcaagccccattgggcacacaatcgtgccctcatctgtggacttaagtcctagttgcaaatcaagcaacattggacacacattggaacacaatcgggcccaattgggcccatcacaaaattagactactaatcgggccccatcgaacccatatcgggctatcatccctgtctgggtaccaaagaaaatatcagactaccatcgagtctccatcgggccccatcggaccagacaaaaaaaattacagattctaaaaaaaatgcagtattcacagacagcaaacatttcaacacataaaacaacaaaataatagcaacaacctacaaatcaagcatcaaaacaacattttaaactaaatataacaacaaccaacaagattacacaaaaataattacccatcagcttcgtgtataatgctccgtccaaaaatgagagaaaatatagtgtaactcgtagtgtagtgaagaaaagtgaagataatgagtgaagagaaagttatgtttctttgtggtggtggaggagtactcgggcaatagacagaaagaatgaaagagggaagagatgtaaatagggaaggcattttggggttaacataattgttagcctatcctataaatattgggtattaaaaattgagggaaaattttttaaggttttgtaagtataattaatcaaatgctccaacttgagtaagtgttagatatgtatgttagctgtataaataactaggaattagaactaattagcttccattattctcttatttttctagaatagcttcccttgaattgtgtataaatatattctattttctcaaaataccagtgtttacatgtaccataataaaatcatgtttaaaggagtttattattaaacaatacgagattatttgaacattttagtccaaaaaacacaacggggcaacaccaaaatgaaaaaaagatgaacataccaccaaaaatttagtaatggtgtgaaccaaaggcttcttttctttcaccttctcccatacattaaaactaaaacaacgaaaaccaatgtatatcttctagaaaaattggagtggatattcttctcatccatttcgaataagtatcatcacaaacaataataacatccaaaacaaataaacccctctaccatataattggatttttgagaaacataaagcaggctatcacaattataatcaggaggcaacaatataagcataataataggatcctctgctaagtacagaggaaacagaactcttccggtccaacaaaaaatgaacctattcgaaatctggcttttcagggtatgtgcatcctgacctctggatgataacatttgctgcataacacccagctttcacacaatcttcaattggcttctccttaactaactgtgacaaaaatccaccaacaaatgcatcccctgccaacaaaaaacaatagtattttagtcaacactggacttggatattcattctagtatatgataaatcatagcaatatctaataccttcttaattaagttactttcacacaatacttattatttacattcatagagaatgataaccatcataaaataaaagatagggtcagtggaaaaatcaatattattgttgaatgaaaagatgggaaaagatttaacacctgctccattggtgtcaacaagcttctccttgggtaacaaaataacagggaacaatttgaccttcccatcctcagcaactacaacaggatctgcaccttgggtaatgacagttgtcctcttgtgtgtacctgattgcttgggcaattgggaaatcttgacagcaatctcttcaacattttcagtctgagtacaagagaaaattcaattaagtgactaatggacaaaccaagcagttcaatatattatcaaaagcatagaaacatagtaaacattacctcccagccatgaacccttgcaaacgttcttgcttcagtctcatttccaaaaacgtaatccacgtacctagagtcataagacaatataccgttattgatgagtataataaaagaaaacaaccaaagaaagagggagacttacggcaaagccttctcctgtgcatctttgaagaattcacaaataaatggagcagacaggttcattgtgaagacctgcagaatgcaaggaatcaatatgaatttactaaattttaaaatttacaatacaatagtagacatccaagaatttacttcatagctgttaccttgttgtttgcagctgcatgcgcagcaacaagttgaatggattctggagacacagtgaggaaaaacccagcaatgtagtaatatttggccttttccactgatcaagttgcaaattgaagtaagatgacaattaggatgtgaggttaagaaaaaacaagaagatcaacatggcaagcatattacctagggcccagttttctggttgcttcagatgttcagttttgtaacaatttgcagctgacaagttcgcaataagtgacctgtataattgttcatttgaagaaattaaaaacaatgtcagccagcaacaagaatttaaaaaaaaaaaaaatagagatgcctatgagtgtgctcagtagacacatagaacttgaagacttaaaatttaagtaagaatgcagggaaggagcaacggaagagcacttgaccagacaaaattgatttatgccgacaaaaacacaatcagtatttcaaataatttacaatgtgcacaagaaaaggaaagacgcatagttaaatgatttaacacagaaaactgaagcccactattaacaactccaaatctaaattaaggaagattaaaatccgcaatgggaaaatttgcccagtaaaagagaagtattcaatgatatcaactttcttacaaaacaatgaaagttccgcatgtatgactaaaagtctaaaatcacaagatttttgttttttctttcagatgagatgaggagaaaaataacctcttaaaaccaatttacttctttttttctcgtttgcaaatataactgtccatgtattggtaaattcataggagctgaaatgcctcaacaaacaataaatttgaatgaaaaacatgtagcaagaaatattcattactaattacaacacaaaagagaaatttcttggtacacagaagatgttaaactgacctctcaccaccaagaacacagacagcacaagttccggtaggtgcagtttcatcttcataatagtgcacctgtttacatttttaaattagtagaaacacttccctcactcatccagcaatatgaaaaattggactgggcggaataaagtagtgcaagatgaagaggaacttacattaacaccagcttgtttgcaatttttcttcatctcctctccaaacttatcctttccaatacttcccatgtaactagttgcaccaggaatttggagcatccactggagaagcacaccataacaaatgagaaacaacaaatgatatgaaaaactcaaaataacaacatagttatatgaatcattgagcaaacctgggcaacttttattgaattttgtgtagcacctaaaaccaaaacaataagataaaccgagctatcaatatcttgaagacccacattaaaatcaataaaaacctaatatagttcaacatataaatgaaaaattacctccagcaataaactccacatcatattcgttggccagttcatcataccttcgcaattgatattgaaaaaaatgaaagtatttcagtatgaccaagttaactacacaaaataatacttgcataaacaatcacattgcataaagaaatttgtaaactctgattcatctcatttaatatctctccagagagctgtctcttaaatgatttaccagaaaaccagtattatttaaaatatatatacacatacaatctttgtatttgattccaggatatctatagctaaggataatttgtaaatgcaaaaaggaaaaatgataagtggcaaatgcagcagggaaaattataaatgaactgagaaataaacaactagaaaacttacatgggcaagtgcttatcctcagcaagaatagcattgtttggcttgacgtcatatctgtaaacaaaaatgaattaagtatcataaggcaagtgacaataaaccagtttgatatctgactaaatgaacaagaaaaaagaaatcttaaagtaaaaaagcattatgcaacaagcaatttctttagatctatcttattcaacatttcttcagcttctcaaaaagatccagagacctaacaaatgcaccatttcatccataaagcatttagatctactcaatattacaaacgcaaataataatttcatatattacacgtcagaaaacaatcttttcaataccagatcaaaacatttttaagatagcgagaccggatctcagatcagaactaacattaacagtagtttggttgctcaaagaaaatgaaggaaaaaaatctaacaatgcaatattatcccttactaaatcaaacaagattcatatcctgagctataaaatttccctaatctgtgcattttctcagcaactaaacagaagaaaaacctgaaacaagatttaggagatgctacttactttttcagaaattcctcagggacgacggcagaaatgtcgagaagaggatttcccataccaagaagaattccctcgttcgccattagagcttagcttaagagcttagagagagagatcgaagaagaagaagaagaagagattgaggttagaatagaagacaggcagcttaagagtggttctttgaagaggtatttatagtaactaataatttacctacaacaggaaatgggcacactgattaaagttacacgtcactaccgtcacctactcaaaaccaaaaaaacctcacccacgcgcactctttctcactcatactcactgctcttgtctttactctttagggttgttgagatttttcttttttgatgattaatatttttttattctttgatttcctttaaaagcccaagcggccaagcctataccgtcaccaaccaaaaacactctcccacgcgccctctcactaaccgctctcgtcattagggttgttgagatttatttattattaattgaaaatttttatttatactttaaaattttataaaaatgttttattttattgtaaatttttttttaaaataatgattaaatttcattaaactaaatcatccaaaactacggatgcaataacaaaagtaaagagtccctactaaaagtacggtcagcctcagaaagagaagatcgcgctaaggcatgtgcaaccttattagcagaccgcttagcaaaaataaaagaaacaacatcaaaattagcaaccaaagtcatacaatcgtaaagaatatggtcataacgaggagccatatttttgaacttttacaaatcattaatgacccttaaacaatccgactcaacaataacatgtgaccatccatttgctttactc

SEQ ID NO: 110835 - DNA, 9099 bp, Cannabis sativa
caacctaattatttgcatatctgttgtggttcgtaaggcattgctgttctggcaggacatcgtatatagtctttctttattttactttttgggaaactaagagttggttgttcaaaaatttgttttctttggaatataatttagtatttgttgttttcttttgcattgtctacttaattcctattgatcctgataaggcttgcttatattcttatgcagagatctttcagacacgacaggatcatggaaggtcttaatgttacagaagaaatgttgaaccccaactcagtggcaaggcagataagcgaccaaatttctcttgcaaaagcttttgttgtgatcgccaaagaaagtaacaatcttcagtttgcttgggagttaagtgcccagatccgcaattcacagtttctcctctcaaatgctgcaataaggagagctccgttgacagttggagaatcagaatccactatccatgacatggctattctactctatcaagcccagcaattccattatgatagtgctacaatgattatgagattaaaagccaaaatccaaggtcttgaagaacagatgagctctgtgaatgagaagagctcgaaatatggacagatagcagctgaagaagttccaaaaagtttatactgccttggtgtccgtttgactactgaatggtttagagactcaagtttacagaggaaattcaaggatagaaaacaaatggatatgaaacttaaagataacaatctataccatttctgtatcttctctgacaatatccttgccacttcagttgtggtcaattcaactgctttaaattctaaaagtccagaaaaggttgtcttccatctggttactgatgaaataaattatgcagcgatgaaagcctggttctccatgaacagtttccgtggagtgacggttgaggtccaaaaatttgaagactttacttggctaaatgcttcttatgtccctgttcttaaacagctccaagactctgaaactcagaactattacttttctggcagcagtgtcgatgctcgaactcctatcaagtttcggaatcccaaatatttgtccatgctgaaccacctcaggttctatattcctgaagttttccctgcactgaagaaagtagtttttcttgatgatgacattgttgttcagaaggatctgtctggtcttttctccctagatttaaataacaatgtcaatggagctgttgagacatgcatggagacatttcatagataccataaatacttaaattactctcaccctcttataaggtcacactttgatcctgatgcctgtggatgggcattcgggatgaatgtatttgatttggttgaatggagaaaaaggaatgtcaccggcatataccattattggcaagagaggaatgttgaccgaacattgtggaaactgggtacattgcctcctggtttattgacattctatgggttgacacagcctttggatccctcatggcacgtattgggcttgggatatacaaatgttgatcatcagttgatagagaagggtgcagtgctgcatttcaatgggaactcaaagccatggttgaagattggaatagaaaagtacaagcccctttgggagaaatatgttgattatactcatccattacttcaaggctgcaatttccactgattttggacaatggaaaattccattatgggatgttagatcagttccacgatgaggttggtgcatgttaacatcaaatttttggaggttggggggatgcttgtacgttttttgctatgtcgcatggctagcaatcgcaaaagggacttgtagttggttttctggtcctattgtgtagtgtaatagatcaatgatttcatctaaactattcaaaaattgttaatgctcttctctgctcctaaagctgtaaacgttcactttttagttgagaactgggatatatatctaataataaaaaactggactaatatttatattttattgttttcctgagaaatattactcttgacaaaaagaaaaagaaaaactgaaggttggagtagaaatcttaaatttcttattactgagactgacatttaacgagcgttgacaacttaatgcatgcataatttacatactgtaaagagaaaaaaaaaaaaaggtttagtgtgtatagtaattatggtttgtgtaatttaagtgtgtctctagcattaatgctaccttcattcgtacatctcattggtgcacctttggtatgtgccatacaactacaatgtgccttctcgtacttagaaccataacatgtacggcaacatcttcatgcacaacaacattattttatccttctcaaataactaaaacaatatcaaaataacttcgtaatcaaagagatgtaacatttccttgagtttatgtcaagtaatctttaacaccctatcaagtaacacaacctttcattataagaaattcccataaagtaaaatgttttaaaaggaattatagtagtctattgcacctttctacatagaattagaaaaccacttctttatgctgccatttattaccccagaccaaaactaatttaggccaatgaagtatggaaacttagaaaaatagtctttcgaattattcaaatctcattggatactttaacaaactagagaaactttgggtgatattgctatgaaatgtcacaactgataacacgataaccgcaatacttaaacttgaaattagcacttgcttttctgaatgtgccatgacatacctatcaaaattcaaatcttactttacaaacacaaacgtgacacgtggcagaaacccaacagtccattgaattctccaaaagccggcaaaatgagtattataaaaacagagagagtcctcttcaaatgagacctttcaagtttactttttcattgtaatcttctcctaccactacgtgtttctcagtgaactgacctccagctctaacttacaattctcaccctctttctcaaattcaatcaagcttaatcagtccaccaaggacattttcgtaatcttcatccccctgaacatctcagccggcttagaattattatttgccgcctgcgccactctaatgattttatttctttcttttttttttcatttaaaaatattattttcaaagaaaaatcctaaacaacaaaatcccacatttcgtatttttcattagttctctgaaaaaaaaaggtccaagttactaagatgaagaaatatggaaacgaatcactactgttttcggactctgttaagccgcgaaagccaaaatcccgagaagtaagctctcgttttctatcttcaatcgaaactggaatcccatctccgactcaaggcctctcaccggttcggagaaaaccaggcacgtcgacttttcccgaactgaagaaaaaccgggctcatcattatcatcagctcgaagaccccggttatctacgtggactctggccttcgtcaattaccgctactacttcttcttcttcaccatcatcttcagccaataagcttgacactttggctgatcatctgggaaatgacaggctcaatgatcttctggagagaaaaagctctgacattttcgaaagacagagaagttccagagagacaaataggttcgagaacgataaacaaagcagcaaagaaaatcacaggccaattcttggagggtcaatgagatattatacaggaagtagtagtagtagctcgggattttcagggaaagtttcttcgagtactaaggtatttaataacaacatcatcagtaattcaagctcagatatagtagttcccgggagattttctgtggatgaaaatgctttacatcaaaacccatcacgtcgaatgtcggataatttttcagaagtattggatttcagtgatgggttttcttcgagagttaaaaaaacaggggttgaagtttcttcaaagtacatgaacgacataacaacaacatcaacaagtacaaggtctagaagaggagctactgattcgaacatatcgaatccagtgtcgttggataggtctccgaggttgggaaaactttcgatcaaaaacgctatcaaaagggctaattcacttacgtctggtagtactggtggaaagtctcaatgggctttatcgcctgggagatcgagttcaccttctctgtctgttgaaagtaaaggaaaattgcaatctttttccagtttgaaacctcctcctactaccactactacttctactactaatagtccatcaaaaacaaataaaagggttgaaaagcttttcaacatgagtttaggcttgtttaaaagcaagaatctttcttcaccttcttcctcttcttcttcttcaactactactaccactattgttaattctaattcttcttcttcgaattctctgaccggaggagggtatagttttattgaggccagtcatcaacttcgggtgcttcataatcggttaatgcagtggcgttatgcaaatgccagagctgaggctgtggatttcaatatagctaatcatgtaaaggtacattaaatgcatgcctaaagatgttggtataattctaacagtatgaaatttgtcaagggtaatgttggcccttaacacaaggcatctcttcataattagactttgtgttcttatatgcattgtttggcgtgtctgatatgtctgacagagaaatttgtctagtgcttgggatggtttaacaaagttgcaacactcagtggcacaaaaaaggatacagcttcagaaggaaaagcttgaaatgaagctcaactttatacttcaatctgaggtcagtagatgatgtaatttaatcattcaattcaactaaaccacaaaacctcataattaatttttagttttaatatacagattttatagcataaaatgtcatgtgtctaaactctctctctctctgtctccagtttaagctattggaggcttggggagacatggaaaggcagcacttagcttcagtttccacaactaaagattgtttacattcagttgtttgcaaagtacccttgatagaaggggcaaaggtatagtatataaatttatatatatatatatatatatatatatcttctataaataaaattaagctgagttttgctaatgaaataaagcttgtaggtagatgttcaatcagcttcactcacattcagacacgcttcagatctcacttctgccattaaatcaatgctaacaacttttcatccttcggtatatattgctgcactatatacagttttatcttctatatacagctatgatgaagaaagacttgacatttacactgattttttcgaataggctgggaaaattggtccattaatatcagatttagcagaggtagttgcacaagagaggttgctcctagaggagtgtcttgaactttttagaaccatatcgatcctagaggtgagtgtttttgaataagctgcatttttgtttttggtatttttatattataagttgaaaaatgtattgatttttgtaattattgatatggattagcttaaagaaaggcatttgaagtctagtgttatccaaatggagttttggcaacaacaacaagagaagcagcagatgccacaacgagtaggatcggcactaagttgattatgaagtttggtctactcaagtgtgtgcctatacattaaattattattgtgcatagtatttacaacattttgaagtaatgtgattcatatcaaggtatttatattgggcaagagacttggtttccaatttatgagcatctcatatctgtttctgttggaagttttgagtgaattttacaaaataagataagtgaagtgtgtaatattgtaaagagtcttatatgggatagaaacacttatttgtaagtgtatataagaagcaaatatgagatttgagtttgggctctaaggatcacctagtttagtgcaaatggatgaagactcacacattagaccatcacatgtgcgtgttgccgtctaactatgttgtgacgagctcaatagccgggttagaatggtgtcattttaattttttactgaaaaattatttaataaaataaatgtttttatttattaattaattaattattttataacatttagggtgtaatagagctatttcgtttggtgcataaagaaatagtattgaggttgtttcaccctaggaatgcagtggttgatagactattgtttagagaatacatcttctctgcacagaaaaaattcttcattcataaacccttacaattttgaacaataaatttttggggtgtaataaagcgattctatttggtgcataacaaaatcgtattgaggctcacacaccagaccactacaatcgcgcgtcgctatctgattgtgtcatgctgagcttagttggtgggtttgtaacgccttaattaaaagaatgccacatgtcgtggttacatcgtgctaatatcgttaatcagggtctactaagccaagtggattaaaataaaacaaccaaagaataaaatcaaattaaagtaacttatactttaaactaaaataatattacatatccaagatctcgtaaaatattatttaaaatattacaagttgtttacacaaaagccagcctaagcagtaaaataaaatttctaaagcaaactccatgtaagagccaactctcgctgtctaacttggctagctaaaacatgtacaatccattgtcgaagccctcacgctcatggctggtttggcgctgccttactcttgcttgcacatctaaactcgtgatccaaagctcaacaagaaagcataatcaaacccaaaaacaaacacatagtataatgatcacattaaatacgccattgcattaataaatgtgccaatgcgctaatataacacgctacaatatttatgatgatgtcacaacattttaagtctattttgtatagactacacgtgctacactcacatatgtttactttataaggtcttattatgatttattttcgttttcgtgagtctaatctagtcatgccttgaacgcataacccttagcatttatccagacaactcatttaacagatgctcatatataaaaattttagagtattaaccctaacacatatttctatttagctatctgcatagcatataaagatgccacatcactaaactctaagtgcacgactctctttcttacctttagttccaaagtatgtggagaattccaatccatgagtgatctcgagcaagtgtcggtaatcctaaccacagtctcaggtttaaaaataattggattaattctcaatcacatactacatttataaataatcaagattcatagactagaccaaattatagagctctttcaagagcttttgaacggtataaaatatgtcctaaacggagttcgaaatcaaaaatcatggccaaaacaagtttcacgaaaaattcaacaaaaattgagggaattagcaatgcggtgcccaaagggagagaacgagtcttttatcaaacttgtaaggattgcggcgtctggattcaaaaaactcaaaaaatgccttgttttggtacccaaaatgctctaaacaaaaccaaacttttcacttttatatgcacttggtttgtaagcccagatcgatggtgttattcgtatttccgataaaggacacgttaaatccaaataataaatagaacccatatatccaaggcctaaaaatgggcccagataacgtcagtggactagatccataaaccatcagtcttttcggatgaacgaggaaaaacttgttcaggcaagatccgatccagcatggtcagtatctggaagacataataccatgtaaccaacacaaagccttcagcgtgtctccagaagaccaacacaatttccaacacagtttacatcgaagagttagaagaatcttttttcatcatccagatgtatggaatgaaattaaatccaaagaagtgtacttttagagttttttcaaggaaatttatgagttttattgtcagtttcagaggaattgaagccaatccagaaaaaattcaagttcttctagatatgccttctccacagaagcataaagacgtccaaagcttaactggaaaaatagcaacactttacatgtttatttctaagtcaacttataaatgtatcccatattttgtaaattctcttatattttaacattttgagtaattcagtgaaaattttaatagactaaaaaaaaattagagtgacaatttagtaatgaataattagcaattgtcccttgaactctcgacaccacctgatcttgtcccataaaatatatgacttgttaaaaattctctcaaaacttttacatttatagaattttagtctttgtgttaggtttcatccaattactccgtttaaatgctaacatgtctttgtaaattagtaatttctctcctaaactttgacaactatcaaatcgtaccttcttcaaaaaaaaaaaataagagaaagatttaacatttttttggtaaatcttaaaaaaataattttgaatgattaataaaattaaaaaagaaatcaaaatcttaaaactaattaaacgtttttaaaaataattatttttattaaaaaatctattaatatatataaaaaaagtatattaaaaattcttttaaaaactaaattttacgagaacaagtttgagtcattttttttcactaaaaatctagatttatttaagtaaacataatttttttttagtttactttaaaatttttaaataatttaagatatgagtttgtaaatataaataagcttaagtttctattcacaaaatcttagtttatttatattatttattgaattttcaataattttgatttgatctcttgatatatatgtttataaatgaaatataatttgaaaatatttttttaagaataatttaaatttttaagtaaatttaatattttttatatgttttttttaatatttttacaataaataaagaattataattttttaataaaaaggagcaaatttagggccagtttggcacaactgtgctgtgggaaaaaacagttgtagctgtgctgtgagaaaaaacagctgtagttgtgctgtgagaaa

SEQ ID NO: 110836 - DNA, 2990 bp, Cannabis sativa
  modified_base (2956)..(2956): a, c, t, g, unknown or other
atgtgggacagaacttgaaccatcccggagttgcttactgtacaaaattgacaacagatgagaatgccatcaccaacacagtggacatttaccgtaatcctaggtaagttactgctccataatctgacagtgagcatttggctttcatccatgacccataaatgtacctcctctttgcagtggctcaaggagggttatagctgcaaacaatgatgctcaagttagagtatttgatgccgagaattttacttgccttaatcgcttttccttcgattggtgtgtgaatgtgagtgctaactatcatctgaaacactcttttagtagcttggctttggttcttctccatagtttctcatgagatttgtttctttacagaacacttgtgtaagccctgatgggaagttgcttgctgtccttggtgacagtgctgactgcttgattgctgatgctcaaacggggaaggtaggtcttcgctattgcatactttatccttgattttgtttggtctccattcctctctgttcctgattctaatttcctgcctctcagatcactgggagcctcaaagggcacttggactactcttttgcctctgcttggcatccagatggacgtattttggctactgggaaccaagacaccacctgcagattgtgggacataaggaacctgtcagaatccttagccgtcctgaagggaagaatgggggcaataagagctgttaggttcactaacgatggccggtttctggccatggctgaacctgcagactttgttcacatcatcgatacacagtcagggtactctaaagggcaagagatagacatatttggcgagattgctggaatatcctttagccccgatgctgaggcactctttgttggtgtagcggatcgtacttatggtagtttattagagttcaacaggaggcattttaaccaatatccacaaacgatgttttaagatagaactcgtttaagatggaaaaagtgtataactgtacattcattcgttcagggtctgtataaaaaatatgacttaagtttgcttgttatgcatttgtttcaactttgtggagggacttaactatatttatgactcaagtcccttcttaatatccacgcctgctcagattttagctaagttggtcttggagctaaattttattttctgaagcaaaattgaaattttgtctttgtaaagctcgaaaaagttgatagataggtcatatgtgctacttttactcgttttcatatcattgtttgcttatgatgcgtgtaaagtgtaactagttgggcacacaaaaaactctatttgtaatttttccttttacatttgccctcttttgaatttacgctactctagtctcatccataccaacagttacatatgtctcgatcactaaatcttatataataatgcattaactgatagttgtaactcatatgatttaatattaccaatggttttttcaaaccttagttaaaaggaaataaagagccaactgtggtcgagaccttaaataatctatttgaaaaaaaaaacaatatcttctggttaattcgtgtaaacatataaatgattatttgactttgtgggaaggtgtagtatgttccattctgttcactgtggactttgtatgtttaaattgcaatgaaaacgacccataagtgttttatgggcagtagcgtgccgcccgttctttaaagtattattggtcatagaggtattattaattttgaaaacagagagcatcaaacccaagataagatcttctataaaatcaagacaagaatagttccacttaccttatctaactgtcaatactgtcaaaacaaattatctcaaatttattacgaagtttagtagttgggtttgaatgttagagacacgtagaaaggacatttttatggtggcatagatggagggctgtttatctcaggcaattgtttgcacctttcagtggatattggtacaagtcttatctgtctcactagaagattatataatctctgtcagttttcgaaggctaaacatatttaatatttagggataattccctcgatatcatgtcactattaagttgagaatgacttctttcggaaccatattcaggataattgtataatttttatgaaaacaatgcttcttaacaagagtggtttttcattaagtttatgaagatgtatgacttaagagaagacaccatgtcctgtgcttctaatatacatcaaaacataataacaattgagtcagcaccaaagattcagagttcatagttatatttataattatatagttacaatattatttctgtaaatttttaaaaaaattctaaatagtatacagtaccgaaaatatagttcctgattgctacgcgtgttcaaaaaatttcaaacctattttcgacattgtcaactattcaaaaaatttcaaaattttacatgattgatgttgtaactataacgaacacagtcatacaaatttcttcaaaaaaatttattacgacatgtagttttgagcacggaagttgattaaaaaattttaataggaagttaatagtaacactcctaaaaatatcaactcaaaagttttccatttaatgaacaaaaagaaatcaaagtagaaagaagaataaggatccattttaataatagcaagatcttgtagatcaattaaacaattttgttgggttgttttaataatttagacaataatatttaagctaatattatacatttggctaaagaagtaatctaattaaaatatgtgcctagtggtagccatttttgtcgattcaggttgagtaatcggtgttggctttcggttcaggccctcctttgggccctctttgcttgatctctcggattcatttttggagggttttctttcattcatcatcagatttggggattttccttcttgtggctgttgaattttatgccctaaataaaantccatttcaatgtaatctttatcttttaaatatc

SEQ ID NO: 110837 - DNA, 5148 bp, Cannabis sativa
ctcagctcagtttttttccacagttctgctacagctgctttttctcacagcacagctacagctgcttttccccacagcacagctgtgctaaactggccctaggtccttgttatttatttttccgggtgtatgtcttcaacatataatgtaaaatagtaataacgcagaacatggtaagattatgcactatgaaaaaaaaaaagcaccatgaaaaaaaaaagtttcttggttagaaaattttttctctttacttaataactaatgtattgtttgattttcaacaataaaatgtattgttattatattaaaaaaaaaaaaaaagaattctctttgtttctgcttcactctaggcgatccagccgttgtacttacgcaaagagacgcagcaaataaaataccgaaactacccctaccgaccaaatatatgtaatatattataataatggagcttgggcagtctcgtcttttaaaagtctgtaacttccgttggtttgaaaccaccgctatataagaacgtggagcgagatcctcactttctctctctaaccaaaaacaacgcttccactccaaccccaaacacacgcacaccctctctctctctcctcctcttttgacaggtaaattcgtttctaatctgacatttctttagatctctgctctgatttcaattcgcatctcttgatttttcgagtatgtttattattacaattctatttggttcccgggaaaacaaaatggagggaaacttcacgaatttgagattttgaatttttcttttgttcattgtttttgttttgccgccattttggcttgatctttatagtgattgtgcgtttgatatcgttcgggttgagttttatccgtgatctgagatttcgggtaaagagttatagataaggctgcagtttgagctccgcggatcgagattttatgtgattatatgtttttggagctttttttttttatttaatatttgttagatctgtggaaaaagatgggttcttgatgaacttgaactgttctgtgtttggtataattttgtggatctggttaaacttctgtagaactgtgaaaatttgatggtgcatgttagaaagtgcattatatgaggatttgatctgtcatgcaaagcccatgtttcatgtttgaatattttagttagtgtttcttagtaatatttatgtatttatttattttggtttggtttgtgcagatagcgtaagtgatcgtcatgggagcagttgttgatgctgtaaaccaggtatatatatgacctatatatacaaatatatacaaaatacttaagctgagatgtagaacgcgtgtaacattttaactgggcatttgatgtcaagtttcctcagagatggaatgcctgtggctgataaacttgatttattcatagatccattaagagttgtttcattttctattacaggatcttaatggaagtttagctgaaaagaatcctactgttgtttttgttttgggtaagattttgttcaagtgtaatattgtatggtttatgagcaccattttgagcttttaatctatttatctcttttttattaccttgatgctactactgattcaacatgcattattattatttattggattgtaaggtgtattatctagctatacgaaatatttctatctagttgattttgcaatattcattgtagtatcttctacatagacttttctgattccatgactttgtgactgccaggtggtccgggcagtggaaaaggtacccagtgtgcaaatattgttgaacattttggttacactcatcttagtgccggtgaccttctgcgagcagaaatcaaatctggctcagaaaatgggtaagatgtttacaataaagacgcaagcttgtgatggtcataaattctacactttaaagtgaaattttaagtatattgtgtcttctatgattgtaaagcatttgttcttattctgacttttatttggatgtaatgtgatcataaactttgtgtgaataatttaagatcggaccttaaaaggttacacaccattcaagtagaaggataggagggccagctaagaagggggaaatagaaaacctcactttcataatgtattataattgtctcacttaattaagtttatttccttaccttaatattcatcaagtcaagacactgtagaaagcttatcttgaataagttctctggcgtgtcatctattaagtaaaataaaccaactatgttttagagtttagctgttttcaagaaagggtattgataccattatacaacaatagtaaacagtgtcataagtgtgcagaaatgtcaatagattaattgaatactgttgattgatttaagattaattcaaccagaagaatttgtgggaacagcatctagcttcttggttaaaaaaagttccttttttcctctttaactctgtcgactacttgattggaattgcttgggtttattttcatggattcactaactagtcaaatgaaatttctcattattgttgcttggtgatgctgagttagtgatttctgaaacaataataataatttattaaataataataatgcatattgtatgtcttgcagttttattgatttgtcttgtttttagtgatcattatgccgggagtggttatttacatattttacttttattctatgaagaaccatgattcaggagatgattagagaaggaaagattgttccttcagaggtaaccattaagcttctccaaaaagcaatgcaggatagtggaaatgacaaatttcttattgacgggtttccccgtaatgaggaaaaccgagctgcattcgagaaagttgtaagccttctcaagaattatttactgtataagttttctagaaattgaatatgacaagttgaagatccttgtgttaagtgatgagtaatggcctgaaactggatactggttttgcagacaaaaattgagccagcgtttgtcttgttttttgattgcccagaagaagagatggagaggcgtattttgagtaggaaccaggttaggaaaatttgatttattaatatctctggttctgacttcttttatccatacttatgtttctccgttcatgtttacagttcttatcctttctatttacttttatatatccttttattatttatatcattatttaacaactattctctatctttcctttcatttttgggttgtttttagggaagagaagatgataatgtcgaaacaataaggaaacgtttcaatgttttcctagagtcgagtctccccgtgattaagcactatgaggccaggggaaaagttaaaaaggtaatactgctatattagatcctaatattgtttttgtattcttaaagaatcatttgtgttctaaaatgctattgcatatcgtgaccgtggcttttttcccaccctcagattgatgctgcaaggcctgttgcagaggtttttgagacggtgaaagggatttttgcccccaaaaatgagaaggtaaagggttttggccatattttgaggtaacattaattgctctaaattactgtaaaaaataagaatcgaaggtattgtttgaacaatgttcagtggtagttttctgtttaaaatgtatagtatagaaatactgcttctgggattgagcatcatccattggcaccaaatcaagattgaaaagtcattttacagtttaatgccatttgtcatgaggataaaggtttaccatagatctgtattctgtagtaagttatttattgtaaagaatgaattagtggttcaaataataagagaaaatttaagttcctgtccttttttatttatttcccattcagtctggaatgcaagtagacattttccccattgctgatgttgatttttatatgtgaaggatgacttcttttctcttcaacattcatttatggtatttgcaggttgagtgaatgctgcatttgtacctgagattcgaagacatactatctattgaggtaaaaaataatattatagtaaaaacttttgattataaactttatgaatgaatcatcagattttatctgctatgacctagttttttgtatgtgattattctacttatacacttgcatttttccatattgtgttagaaaccagtccttaataatattatttttgttgaaaatgagaatctattatttagtttagttaccacaaccacatgctcggcagatgatatgtgccagtctgccagagctttttggtggagtgttctttgggttcagattccccattctttgtttgatttgccaagaaactatttcatggtaaatgcatgtcaataattctttggcattgataaagggaaaactgtactttgaagaatgtgtatttgcaatagtgttactcatatatagaaaagacaatttaatgataaagttaatctatttggtttcatctcttgagtgtgctatggtttgatggcccggtcttccggcttgttcttgagctttgtttcttgatattggcagatgccttttaatgaattttcattttcattcaaaaaaaaaatgatgaagttaatgtctgtacatattaaaatttattgcttctggtgtttgacgatgactaacattatctttgttaattgttacaggtgatgatgctgctgttgattgcgtatactagtattcaatttgcaagtttttgtttttcggttttattggttatattgttttaggagaaggggtcttagttttacataaaaatgagatgtctcttatcattattattattgttattgtattattattctctacttacatgacagatcgtaatacttacatcaataatattcttctttcattgtgatatgaatttgatcttctctttttatacccattgagattgagagcttgttggtgtcacgtaaatctctatgctatggtcttttggtaatttttttgtttttaaattttttaatcggaaaaatataagtaaagttttgttttgaaaaaaaaaagtattttagaaccatttttgttttttaattttaaaaacaaaataaaagtattttttgtattgattttatttaagttgtatctggatcggggtctaggcttgaagtttggatcggggttagaaaaaaattatttaaaaaaaaattgaaagtgatttt

SEQ ID NO: 110838 - DNA, 2403 bp, Cannabis sativa
ttcctttttttttttttaatttttgtttaggatttttttttcttattttgatatcttatacagttctaatttgtacttatctctccaaccactaagggaggaaaagagagggaaaacataggagttttgaagttttattatttttttttagtagaatgaattagacaagtgtgttcataaattacaagttatcatgctactaatccttgaaggttactcctccaactttaattttttttttaattatatcatcactaaaatattaagagcatatgggtgccactcaagttggtaaagtatgcatgctttgtttatgtaattttaaaataaataaaacaacttaattagaaattaaattcttagattaaagcttagtacaacttaacccaagtggtgggtgactaaatttaagtttagtgagatataatttgagaaataggttaaacccatatgagtagagtagttagtaagtgtgtgaagaatattggtttaatcaataaataaataaaacaattaccccatgtgaatacttaacacatcacatgattattttaaagaaaagggtcttcaagaatgagttgaataataaaaagaattaattatcttcttatacttttgaaatctttgagacaatgtaatagaggaaggagtatgatttgaagtttgaaacctttaagtaaattttgtcatgagatcagccatatatattatcaaaaggggtggaattaaaagtagaaagtgatgacttgaagtagaagtattgccaataaaattgaggtttaatggttttttggggccaaaaaatgaggttcaaaaagggccaaattggattaggcaattattcttgatgaatgcttcgcatgtggttttaaaggctggcacatgttggaacctttttaacatattattaccagcgttcttcttatcttttgcaaattaaagtgttttattttacacagtggaatcagacactttttttaattaagcattagaatgaggttaaaatagttttttgtttttggctctgaaacactgacacatcacaaaaactatttggactttttaagtttgttctatgtttggacaaggacccatctttcaagaccaaaacagccttctactattataattattgatctaatcttaaatttccaagcaaaaatgttaaataaataaaaagaccctatttttgggctatttttttaaaacccttttacttaccttccccaagccctgtttattgcaattttacagctgtaaaaattcttattatttttgtaataaagatttctttttggtttttttttcccaaatatgctttaaattaattgatttgaaaatggaatacatattggaatgaaagtattcacatttcaaattaaatttaactttgagggaccacaacacaaacattgaccaagtaaatgcaattaaataataaatacaattacattattctcaagactaactaaaggcatcttgcataaattagggtttaaatatgtcaccaaaaaacaagaaaaattattaagaaattagggttagataagaacaatatcaatattcaatagttttatggatttttataaatatatggtggctagatcgatgtacattagcttccacaactttttctttttcaaaaataataattgagtaatgtaatattggcctgcaaatagggttttattctaattttttaatgcctaatgacctaattaagttgttacattgtaatttaaggacagcgaaagataaaaaagaaataaaaggaaaagaaaaaaagactaagctcaaccaattaaagttataaacaatataattaaattaaaataaagattagaaaactagaaataattaattttgggatgtaagtggtgcacttaatgcaagtccaaatcaaaagagacgaaaaataataatttttgatggaaaatgagatttattatttaatatattacctgttcatacatatactctttttttaaaaagaaaagaagctagatacataatgtattatcacaattaatttgatatataatatattttttttttagagtataatatggtcatgttttaaaaagtataatcatcatgttttgcataattaacctactttaataatttcttagtaattatattttcataccgttggatacttattcaatacttttttttaaaaaaaaaaatacttattataatttctcagaattcattaatcctatctttcaaaatatatgatcaaaatttgtcatttatatttcacaaaataaattttacacaatactattactatatactagtttaattattttctttcatattattaaactagacaatataacagataatttaatttttgtagtattttaataaataattacttcaaaatataattctaat

SEQ ID NO: 110839 - DNA, 4671 bp, Cannabis sativa
actaatcagattgtaaatcagattgtaaagagtagattgtaaagagtttattgtaaagagttttatgtaaagagttttattttgggcataaaacccaacataaagctcctagaataactgggaccttgtgggagatgatgtatacaaagcagttacctctttcatagaatcagggaagatcctcaaggagattaattccactattctgacaatggttcctaaagttaaatgcccttcttcggccaaggatttcagaccaattgcttgttgcaatgtaatatacaaagttgcaacaaagcttttgtgttctagaatcaaacttattctccctagattgatctctcaaaaccaaggaggattcatccaagagagattcattggccacaacataatgatttgtcaggatctggtgaagcactatggaatgaaaactaaaaaggctaattatttgatcaagctggatttacagaaagcttatgataccatagagtgggattttgtggaagaaatgttgaaggcactcaattttccacagtctttcattaagttgattatgaactgtgtgagaactccaagattttccctaatgttcaatggctcagtacatggtttctttgaatctaagaggggtctgaggcaaggggatccaatgtctcctctcctctttgtaattggaatggagtacctttttagaatcctgaaagttattggcaaaaaggaggattttcatttacatttgagatgctcggagcttaaaataaatcatcttgcttttgcagatgatgtccttctcttcagtaatggggatttcaagagtgtgtattatcttttgcaaggcttaaagctattcagccaaacatcgggtcttcaacctaacccgtaagaatcagctatatattgtagcaatatggctagctctgaagtaattaggattcttgatgcatcaggcttcagtcaaaaacagatgcctttccattatttgggagtacgtatttgtgccaaaaagatatcaaagaatgattgctctgcacttgtggagaaaatgacagcaagaatccaaacttggagaccgagaaacttgtcgtttgcagcccgagtcatcttgataaactcagttctcttatccatccatgcatattggtctcaggtaatgattttgcctcagaaaattgtccatgatattgaagctatatgtagaaattttctatggacaggtcaagataaagccatgggtccaggtttgatagcttgggagaaactatgctattctaaaacacgcggaggacttgggttcaaaagagttcatgaatggaatcttgcagcaatgggaaagtacatttgggccatatcaaacaaagaagatagtctttggatgaaatggatccattgcgtgtatatccaagatgagaattggtggcaatacaagcctcctatccaagggagcttgtattggaggaggcttgttttgctgaaagatacattcaaggaagcttgtgctggtcaggtatctattcatacaccttatagtgttgctaaaggttatcttttgttgaggccaaatcaagagaaagtgagttggagccaataggtttggggaagattgaatactcctaaacacagcttcataacatgggttgcaatccaggagagaatgaaaacaaaggacaggttagctcggatgggaatcactcaagatacaatgtgtgttctatgttgtcaggatgttgaaacatgtccccatctattttttgactctacagttgcagcaggatgcttgttagcagtgaaagcatggctgaactggcatgcttttgctactgatcttccccgattactcaggtggatagggagagcaaaaatgagcaagtttcgaaagcttacctttgcagcgtgcatttctggtctggtgtacatgatatggagtgcccgaaatgccaaaatctggtgtcaaagtcaggtgcattcagaccttctgatgcagcagctcaagcattcagtcaagcagcgcattactctttgttggccaaaacgggtaaaggaagaagacaaagcctagtttcacaagttgtagatgattgtaaataagaacagacaaatgatacatgtatagttattcttggcctttaaaaggtgcaattagtttgtaaaaaactttgtttgtgagcaatacaacttctttgattcataaaaaaaaataataataatactgcgacctttactagagtttttcttcctccaaaagcttgccattaacttttcaatttcattacatgtcccaatgggaaggaggaaaatgctcatgtcatatgtaggcaaagattggagaacatgtttgatgaggatttctttacctgcacgagaaagaaactttccttcccagctattaatacgagagatgaccttgttcttgataaaaccagctattttatttttattacgaccgataatattgggaaaatcaagataaaggctaccttcagtagcttcatgcatgccaaatattgtacagatatgagaacgagttgaggtgtcggtattagggctgaaaaatagaggatttggagctattaaccttctggcaagatgcagtttcaaacaaatgaagcaatgtgcgaataccatcagtagcgcccctagctgcttgataatagagataactgtcatcgataaaaaacatatgtgtaatcggtggactgcgttgagccacacgacaaccttgaataaccttgttggccttgaatttttgaattaaagaacacaaaccttcaacatagattttgaaaagatatgtggacagagggtcgccttgcagaatatcacaagaaggacaaataaggcccaacacatggcccccatgaacaaccttatatcgtatcgaagaaacacaagtcataataagcacaatccaagtacgatcacgaagactttagtttggttcaccatagatgcttgagagatgccatttaatccttccaggaattttgacttcaatatcaatatggttgtgggaataactaagaagatgggcctctgaagaaatttgctaaaataaagcaagaccaccttttctaccatgaacgtcaattgagaaacaaatttcgaagcccagacgagatttcacacgatccacagtatcttttttacacaaggttttacttaaaaataaaaatttgggtttcttttggacacacatgtcttcaaggaattgttgggcccctgagttcccaagcccacaacaattccaactaatagtactcataatacttgatgggcctagaatccaaaacccactttctccatgttttttggcacatcaacaactttctgtgaggaaagattaacaagagtaacatcggtatccatagattcacttgttgtaagtgaagggccattaagaggatcaaggcccaacctcttcctttttgaatcaattatttcaaaagtcacatccatagtaaaagccaagatattatccttgaccacaattgtatggtctttaataacatgaatttgttttccaattcacgtgattggttggccatgatatggggatttgataagctgggagactcgagattggttgctgataaggcaaaattttgtgggggagcattaacaccacgtaagtcaactgtctttccttctccctcagttcaaatctcaacctttccagaacgcagccatggagatgcagttagaaaagtttggcgtttggtcagagctttcatatcaatattgtaaggtttgacaatttgatcaataggagtatcatagatcttctcgcataacctttcagtatggctcgtgacccacaaatgaaatagaatgtgggtactcttttgcacttaaaatttgcatagaaaggatcgccacctcgacgtcggaacttccttctcgtcttaagaggtaattcattattcacccttactcgaacacatagatagtcgcgcctaactccttgaaagttatttggatctgaaacatcatactcatcgatataacgtgcgcctcacggatggcccattctattttaaatctcgcttggaagttatgaatctgaacccacatatccaatatattcatagtaatcgcgtttgaactattcccaagtttcagtctttcaagaatgagctgttttcgatcagaggtccatggactttcggtaataaccttttgaatatgtatctcatgataaaattgaaataaaaaacgattttgtcaagaatcttgacatacatacctttttcgggttttcataaatcaacaatgatattttgaaatatctggaaataagagacttttctaattgacaatctgccaataaggcactatctttcatcaaattctttctctatattataatcatcaaagaaagcttcctgatcttcttcttccaagcagatatcaacccactttttagtcagaagatcatttgcactacttctaaaagccatcgagaaccaaaaggaaagcaaagcagggacaaaaacaagaacaaacaaaaccaaaagagacaaagcaaacaaaacacaatgtaaagaccgcttattctaatttggaaattagcagttaattatgtttaattatgaaaattatttatagatatttaaataattattaatgctgttattattgaattctgaaatccattttatgtcatatagtgaattt

SEQ ID NO: 110840 - DNA, 3821 bp, Cannabis sativa
ttttttttttttttgcaaaaaatttttttttttttttttttttgaaaaagaactagagaactttcaataaagaagcagatacagagtttagatacaaagtaatcaggccaatatggaaggtaaagaaccattccagatatactcattgtctaatcctaagcttgttttagcatgataatgagctaacgtattgctatcccgtagtacatgaactataaacaagttaggattgaacaacaataagttgttaatacaattaataacatcactaagaacagaattattacaataagagctattaatcttatccaccacatttttgcaatctggagcaataatcgaaatcggcaacttgactgcttgaatccaagatatagctactaggatcgctttaccctctatcacttcaggaggaatcacacctgtacaaggagttacaaatcatgcctttagatgatcaccatcatccccagccataactccataactgtgcctcttgaaaacaaaattaatagttgcgtcagtatggactatccatcgcccgagaagaagccgagatacctggttactcatatttttcatgtgtgctgacaatttaaattgtccacaatgagcattaacattttcatacagataattggcagcataatcaaaaagttgcgtgagagaaaatcccattttattatgaaatatattattacgttgattctatattgcctagatgaagcagaatagtagagccaaattatatttctcatagaagtcaaaagcactagcaataaacatatgcatgtcactatctttatgtgtgttataataactgaaaaacatggagtgtttctaggcttttttagcatgactacattcaaggatagcatgtttcacagtctccgttttggcaaatggggaaaatcagagagggaatgatatgacgaaaagatagagaagaggcaacatgtattgaatgggagagagctcgccagatcaagtgtttaacctttgggggtgcaccagaagaccagattttagaccagaaacacttacaggcatcatgtgaggaaacaatgggcatatccttagatttaagagctaaatggtaagtagttttgacattgaaattccctgtagtgtcaggaccccaaatcaaatgatccttacaattctgtccagaaattgggacacaaaggatttcctcaatgagtgcgctatcaaaatagctatggagcttacccagatcccaatcaccagaaggggaaatgaaaaaatataagctaggatcaggaggggaagaagaggaatacgatttgaattgaaagccaggaagccaatgatcctctaaagtattaatatccataccatttcccactttccaaattactcctctaagagaaagagggcctatgaccagaaacagcctcaaggatggaggaattaagaaaataacgagctttaagggtaagactcaataaagaatcaaggtttttaagaactctccaagcttgcttagcaaacatggcctaattaaaatgagttaaagatcgaaagcccaatcctcccacaaacttagattgacaaacactttgccagtttttccaatggactttacaagattcattggaggatccccaccagaatttagaaatcagggattcaatttctttacaaatcttggtgggaatatgaaaataggccatagcatatgagggaatagcttgaaggacacctttaacaagtgtttccttacccgcccttgaaaactatttatgattccaggtttgaattatggtggcaattttatctttaagaaaggtgaaagcagggtatgtcacacgagaaagacattgaggcaaacccatatacttagtaatgaaatgcctattttcaagatgaaaggtatgaaataatagatctctaacttcagtatgagtattcagagagaaaaaaatagaagacgtggaaaaatttatcatttgtcctgaggcttttgagtaagtagtaagcgtatgatgcaaggcctcacaagaatgttgattagctaaacaaaacaaaaggctatcattggcaaagagaaggtgagatatgggtggagcaattctagagatagaaatgccccaaagaagtcccctcccctaataattcttaagaattgtagaaaggccctcagaacaaagaatgaaaagatagtgggacaatggatcaccttgcctaaggccataagtgggccggatggttccactgacatgaccattaacagagaaagagatagaagcagtggtcaggcatttaaaaataagggagacaaagtggacaggaaagttataatggaacataagatgccgtaggaaatcccattcaacccaaacctttagcaatgttgagcttaagggcaacccacccctgcttacctactttcctattagtgatagcatgcaccgactcattagctataagaatgttatcatgaatgacatgacccgaaacaaaagcactttgataatgggagataatctttcccttaagcctattggcaagaattttgaatatgactttgtaaagagtagtgcaaaggctaatgggcctaacatcttttaacatattggcatgctgctttttaggaattagaacaataaggatagaattaatatcagtaaaatctgcacccctattaaggcaatcaaggatagcattggtgaattcatcacctaaaacagaccaatttttttgatagagaaacacattaagaccatctaaacctacaaccttctcccctaaaagctggaaaacagcttttctcacctcatcggcagtgaaatcctgagcaagaaactcaatttcttggtcctcaagcacaggtcccaaagaagcaaaaattgaagcagcagcttcaatatcactgccttgggaggagaaaaggtcagaaaaatagaaagttatccaatcagcaataccatcttgggtgttgacaacagttccatcttcagtcttatggtacttaatatgattggactttttctgagaagtggcatactcatgaaaaaaaaaattacattcttatcccccacattaagccatctaactctagccctttgtttccaatatatttcctcctgataaagcattgcatctaacataaattgtaactgaatgagtctatagttatcatcctaagtgagaacatctttattttggatactattaatgtcatgaataagatgttggattctagtctgaaaaaggtggttactgtttttattccaaaccttaagagaggaaatgcagcaattttgcttagcaaggaaactatgaaaatggctacctgaagaggaatgggtattacactctttccaagtagtatccaccaaggtgtaaaaactagggtcctcaagccaattattttcaaatctaaaccttttattaataaagttgagaggattaggattggtattggttaaaacaagctttaaggcacgatgatctgaaccataaaaacctaagtgatggagactattatctgaatagaggtcacaccaggattcagaaaccacaacccagtctaactgttctctcaccgttttattagtccaaatatatttgttagcaacataaggaagagggcatagcaaaatttgcaaaaaaggtcatggaagccagggaggctaccccatattttatcgttattgaaaagataattattaaaatccccaataatcaaccacatgaatatatgtggaaacaatgttaatatatatatatatggaagaggtttcaatggttacattttaattgtaaccatgatggttacatttttttaaaccattgga

SEQ ID NO: 110841 - DNA, 3549 bp, Cannabis sativa
ccacgagaagcacctaagacaacctacgactaccaccacactacttccggtgaaacccactccgaagatgaaacgtaggacaaaatcgagaaggatatcgcgaaactacaaagagaaatcgtgaaacccaaagtcccaacatctatgagttctcaactcgcttgttttctgtatttttttttctggtttttgatgatgtagcgaaacatcgctaaatgtcgcgaaacatcgcaaaatcatgaaccatctctaaatgtctctgattcacaacactgcttgttttctgtatttttttctggtttttgacgatgtcgagaaacatcgcaaaaatcgtgaaaacatctctaaatgtctccaatttacaacatcgtgaaacacatcgcgaatatcatcgctaaatatcactaaatattgcaaataatcacttaacttcatccctgacctcagatttgttttatcattgcaaatgcatcgctaaatatcataaaatatcacaaaacaccagtaaaccagaagaaaaaatgcaaaaaatgagagaggccgtgagagaagatgacagcgaggccttgcgaccaaggttcttggtctgtgtgttcgacagtaggggttctaggtccgggttaacgccgaagagtgagagagaagtctttttgaaatgtaaaggtatttttgggtggaaaaaatattaaaagtatgtatatactatttttaatttggtggtatattaaaacaacatattttatttttaagcatactaaatcaaattttccaatataaattgtttaaatgaaggtatgcatgtttatagtgttctacaacaaactaattaatttttagtcagaaagagcttcataatgtccatagtggatttggaagtcaaaagcttctaaaggtaaatgaaatattctttttgtgaagaaatgaattcaaatgtgctggtgtgaattctgttatttttcagtggtccattcactggacaagtgtcatcaccatcctgcagctcagtattgataatttccacaatgactgagctgttagaatgtaatatggatctatgattgagccattagaatgtaatgatgggatcattgtaccctggatattctatttttttgttattactttattgacaactgtattcaagccttttggtgctcatgtgtgtaatgcttcacgatttcttgcttataaatggaaatcaaatccccaatattaattgagttaagatttatcaaatcattttttttttctaaaattcaacttggtcacagagcaaagatttccaaatgttgacagactcacaaaaccctgccaacactacccttgctaaaccctctgctacagctggagcatcaatagttgctggtgctagctcaagcaatcctcaactcaaaacttcagtacctcatcgtacccttaatcaatctttctctctaaacttgataggcacaactacatcctatggaagactatggtctcaaccatagtaagaggtcattgattggatggttttttaaatcgctctaatgtttgtccccctcaatttgttgatgcaggagctgtcatggagagcattgatactggagactcgcatatcatcaacctggccagcttatgaaagctagatcataaatgatctgttattgatggggtggttatatagttctatgacaaaaactataacaactgaagtcatgggagtcaacatagcagtaagactatgacaagctcttgaacaactctatggtgctcattccaagttaaaaatggattagacaagaaccttgatcgaagtgacaagaaaaggaaatacaccaatgacagaatacctaagacaaaaaaagaaaggatgggtagatttgttggctctagttggagaaacttaccctgaatctcagttggtaacaaatattctctttggtcttgatgttaattatctcactattgtgttataaactgaggcttgaccaaaaactacctggcatgagctccaagaaatgccttctcagttttgacagtaagatagagagactttagactctttcaacaaacaacaaactacctaacactttttcagaaccataaaccaatttttctcataaacctcaacttggaggccaaggcagaggtgcaaatcactactctcacaaccatggtggcagacactctatcagaggagaaagagcttaaggtaaggagagatttagtggcaaacttgacaattccaaacccacttgccaagtatgtggcgaatatggccactcaaatacggtttgttacaatcgttttgatgagtactatatgagatgagatccaaataacactgctcaagacaagaaaaacaacccatcaacttttgttgttgttgagatttatgccttaaaagtaagtaattaatggataatatattagagaatatataaaatacaattattagataaataatatattaattataagagtataattattaaatatctgaaaattttatatatagagaaggtataatcttataaggatgtacaaaaaaattaagattatacgatatgaataaaataaatcagtagtgtattaaagtaatgagaatctttaatatagaactactgagtacggttattatacaatgtacttctagtgtgtgattttgattaagatcacatatgtagatggacatgtagtaaatgtcctgtgtataattagattatgtatgactgaactaatatgtaataaacatctttcattaactgccatttacgatgaaagagttattcatatcataatgattattattcgtggatcagcctgaatcctaagtatacatgaactcctatttatattcattgaattctatgattatcattagtagattgacatggtgggatcgattttaacttcttctaattcttcctccgatccaatatttgtgtttggttctctaaggcagggtctatattttcctgcccgccttgggcagattcttattaggcaaatcttttacccttttctaaactttggccatagttgtcttcttttttggtcttagatagaacaaggttataacattcccgtgtaattctttgatttccttttagacagtgtaacaccctactagtttaggtacattatcttgattttaatttactgtgcacccctttactaaccaaagagttattgaaaaacgtaaataatttaaactttcataattaaattttaatttaaatatataaatactttatataattcgggattccgttaaaaagttacaactctttttacaaaatacttagtcacaaacccatcaactataaaaataaagcttgttatcccaaggatcaaacactctaggtctaatcgcttcgatatggacattctttattagctccagttcactattgttcaacctttgatttgcgtttacctacatgtaaataatatttgttagtcgaaagactcattaaaaaaatcataataaaaacataaacataaactagattacaattaggcgcccatacacccaattataattctagggatattggcggctaaacc

SEQ ID NO: 110842 - DNA, 8431 bp, Cannabis sativa
agagagagagagagagaggcgaaagagaagaaaaagccttagggttttttttgttaaattttatctgataagaagagagagaagcaaaaatgactagagtttttttactcttattaaataatcttttcaatatttttttttctgagattaatttttttaaattgggtttgatatattttttttttatttacttattaattatagctatactttttttttaaaataaaaaataaaattttgatatagtgacgcgctaagtggatggggacacatttatccattcatgtctggcgcgtaactataggccagcatttttcaaattaataaaaataaaaaaaaaaattggatttttattctttagtgatttttcatattttaatgacccacattatatgagagtaacataaatgtttagagtctaattgtacatgtcactaaaaatcactcctaactaatgcgggtcactaaatagtgtgaataaaatgtcaaattatagtaatgaatagtgtcaattttcagaagaaaaaaagttgacgttttaaccgacaggaataccattttttgtatagtgagtgctaactaactacaattttatgtattatattgttaacttgataagagccaatgcaaaaggggcttcaaaagcaaaggtttcatacaatgggctcaccaatcaattcaaaaaggaccatgaaaagcaaaggtttcaaacaatattcaacaaacgggtaatgcacactttgtagaactagaagtcgagatcatgatagacgtacatgtctcaaaagatcatcaatcccaccaacacataagctaagggcgttatcgtcaacaaatgatgatgcatgcaagctaattgctttagaatcaaactacttcaatttcaatgcaaattcaaaacaaacacaagacttgttctaattaatccgattcataagactacccatactctcttttcttatgtttggactatttttttaggctaaattatgctatgttggttattatgtttcaagacattctatttgtagcatgttgtttgggtcaatgagtggtggcctttcttactttactatgtcgaattccacacaactcacccgtatttatgcatttttaagatttatctccatgaatgatattatcctaatttgtttacaattaatcacgctttgaaaatactgcaattattttatgcagtttcctacaaatattttaaatgtacatattcatttagcaaccagaaaaacttatgttcatttgtaatatatatatattttttttttgagttcatttgtaaatttgaaacatataaattatattaaattgcgccattacttaaatacactattactcttgacaaattacgctttactttaggttatataaaatagtgtaacattatagttatattcctcacaaaaaatattattaaatatgtactatattatatttaactagactcacacaaccacattatatgtattattatttgttttttcgagtttgttttacacgcttacaaatacaattttttttgtatggttgtatatgttgtacttatttaaaatatttggcaaaattttaagaaaattaaaaaaatttagcacactaaaaatagagttcaaaaaatttgttacatgcatgattttttttttctattttatatatgtgtgaaataagcggtttgaacattaatttctatattaaaaattattttgaatttctcaaaattttataaatattttaaataactataacttaaaatttagactaaaaaattggcatagatgtgaaaaatattacaattttatcagtgtatagactcatttacataaggttgcatttaaggaaaattaccttacatactacttttttaatttttttttcaaatttacaatttgagtttttaaagtggtttctccagtgatttctattttggttgctatacgatttttggttacgatttaggttgctctattagttgcaataggagtttctatgtagaattctgtaacaatacaaaaaaaattattttaaaatataaaaataaaaaatctccaaattgaaaacatgtatatactacattattattattattattaatgattgcagtagtacgtaagtgtacatcgaatatttttgtcattcaaaaacccaaattattcaatgaagataacttttgatatacatatggaattgttttaattattttgtcttttattattcaataataatcataatttagtttgtggatgataaagatgatgatttcccctaacaagcatcactcccatgaataactttcccctttcggttatcatggcgatgataacgatcatcatcgtcatcgtcattgtcactagtgatagtactagtcatattgctagtactcttgtggttgttggtagtagaagatgggaagataaagtcaagattgtagagaaccggaaccaatgtagaggaacacaagaaaacgagaaccggaccaaatatccataacaggagaggtaaggcagcgtagaagagacggtttcctatagtgttaaggatgtaacctctctccaaaagctcagcaatgtaggaaggggtgactggtgaggtgtcctcttgtggagtgttgattaagatgttgacttggttgatgaacctgatggagagagaatggcataggaatgagaagagaaatatggtgagaagggtcacgtatttgagtgctaccatgaactccccgtgtgccccgtaaacggtgtcgtttagaggttttttcacgctgtatgtgctgcttataaccgccgctagaccagaacatagtagtattgatgttgttgccattaacgttgatcccatgattgtgttccttagtgtctgtaccgccagaatgttcttcttatcattatcctgaattcatttatattattaattaatcaatatttgaaatgaatatataacacttaatatatatatattatttgttttggtatttaaaaaaaataggattcaaagagtttgttattcgctaattttttgttttatacgtatatgaaatagaccgtttaacattaaattctatttcctaattgatatataatattttggaaatttttgtagtagacctactaaatagcgttctagtaaacttttttatctatttccatatgtagaaaatttttacagtccaatttttttttatgatcacatatgttgtagttatttaggatcacttaaaaattttcagaaaattttgaataatttacattattaaaattagattttaacagttatttcttacgcgtataacgaaaaatagtcgcgagcataacaaaatatataaattttattttcgatactgtaaattatttaaaattttctaaaaatttataagtggtcctacgaataacgaacaaaaaaaaactataaagcgcttccatataccgtaataaattgagagtgtaccaaaacaccccttacaaaatgtactgcatacttaccctaataacattttcattactttgtcctcatcatcgattatatcttatatatattactgttttcaggtgtaactaattattaatcaggaatttaaagattatattttatggaattccaacgtcacatatataatttggtgagacacgcaaggcaagtggtgtggtagaattagataatgcacccaggggatcagtggactgttaaaggtataggctgacgtgtgatgcaacatataaatagatagaacaaagtgggagaattaatagaccacaatacaacaattaaaacaatcgatatcacactcccatgcatgttagctttcatatattattattattattattattattattattggataatatataactaattaggacatgaacagtacttctgatcacactcacacccacatcacatgcatataaatatatataattaatcgatgcgttatatatagggtttacatgataaccggtgggaagagtacttacaaataatgtgacaaaacgaaacttaataataaaactgtacgcatatgtaataattagttcatgaaccatctactctcaaacgaaaaccatgtgatcacttactaattttataatattaatgaatatattttgtcaaaatttaataaaaacaaaaaaaaaaaacacatctatgtatgtgtgatttgtgatataaaattatatgttgtttacattttgtttgtgttgtgggtatatatagtattttatattggttgatgacgtacgatgtactgtgtatgccaccactattaattaactttataataataacttaactggggtcttttggttgttgcaaaaagacgatataaaacaaaatcagggtcatactctgtttcatatgcactcatcaatcaaaccaacttatattcttaattttgggatgacacatctaccacctggaattatttgggtcttttttttttttgcaatataatatactccttaacttacattagggtatgttcagaaaaaaaaattacattatagtaaaatgaaattttccaataaggcaaaatatatgtgtgtatgtgtgacaataactcaactaaatatgcccactagtgcctacataacccttatatatgaataggaaaaaaaagttgatttgactcttttatatatatatatatatatataaataaatatggtacttaaaataagttagatgctaaaatgcactaagtgtttaacatcctcctgaatatcatatggctcataaaatgccacctctaaatcaacaatactattaaaataatattggtatgtatagataattaaacacatgtatatatatatgcatctctatagaaatgagtatagattgaccgaaatcccaaataatatttttgcacctactcctagctaattccttaatcattatgtaaacatagtacaatcttgataagcacgaataaggattgtcatatatatgtttgagaaatgctaaaaacttaacagccttctacatgttaatatggataatcaatcgtaaaatgatacgtttagaaagtgttagctaggcagtatacccagtggtaatgctagccctatatatgtttgtgtgtttatatatatgtaataaggaattggtagaaggtgttaccttgacaatggaggaaacccagaaacgacgtcctctagcattgattccgatgattgtggtcaagggttgagtccggaccttgtgccacagccacatatgataaaaaatgatcatgaaaaatcctagtggaaccagaattacgtccaaataacacttcctccactccattatttttcttaattaacactttatatatatctcactcacacttctctttctttctatatctgcacctacctacctatagtttctctctcagctgatgaactgcttatatatttgtaaagttgtaatgatcaccaaataattgatcactgatattattattgctctctaaatattatacatttcattatttctttggggaatgaaactatgtgtgtgtatatatatacacacacaccaagggtaaagtagaatgaatttggacaggtttgaatgtgtagttcaattaagaattaaagttttctaagggagctgggggaagaagttattatataattataatgaagcagcaaaattaaagtagactaaatgccaaaaaaaaccctactagttttgtgggtgacttatcctccacttcccactacgtttctttttttttctttttctattttaattgcttttggtacgttaattttattttatttaaggattaaataatatgctctgggccatgatttcaggtacggtctttttcttttggatgattttttttttaattggatgaacactgttgttaattgaagtagtatatcctacctatttactaaggcactatatgcccttctattagcaaaaatcgtctaaccttctcattaattccaatatgtattcttcttttttctaaataatgttaattaatgatacgtaaataatttaaataggtctataaaacataacgtgttcgctctatattgtatgaacgtaaataaattaattaaatccagaatatatatgtttaataatcttatgtaaattcgacatatatttaggtgacaaatgtatgtaaatttatgttaatatatttttaaatctaattaagtaggactcacatacacttaggtagtgtttggttgacatgagtataagaatgaaattgatattcctaaaaaagatcattctggtttcttcattgtcattggaaaactcattccaataaaaattgtaattcatgtaaactaaagaaatgctttttttgaaataaaatgacttgaaaactcattccataccaattaaaaattattttttcctatctacatttttttgaataaataattaaagttaataattatatgggtaatatttttattttaaaatatatatatatacaacattaatattacaataatattatatatactatatttttatatatttttttgtacaggtttataggtttgagagtgatacataaagacattttggtcaagatttcatagtctttaccaaatgaaagaatagaaattctattccatactatttctattttatttttattttgtaaccaaacgccactttacatatctcttttgtattttgtcttcttccaaagtacttttagtttctattttaattgataaattatattttattttacaataaaggaaacatatatatcaagaatgtattgacaaagttataacgcttatatctttatttatttatatattattaattacttacactataactagtcatgtcacgcacaccaaaaaaggtaaaaaaaattgtgataaatttgaaaaattgtaaatttattaagaaaaccattttaggtcaagatcttgtattttatatgtatttgtttattctattgtaattagtcaccacgaattttgttatgactaaaatactattactaaatttataatttatgttattgtaattagtgatagagtaacacaatttatagagattttgatgtacgtttgtgtgtatataaatgaaatctgcatgcacgttaaactggcagctagaaatatgatacaataaatttattacgtacaaccaaaaaaaaaaaaattacgtgcaaacatggctcacatgcttttgaaaaatgagatagctctatattatatatacaattgtaacataactagactttttaactagctagctagcaacaactagaaagataggtataagatattaggaaatattatacctaatgctcctagaattaataattaaatagatatgtagtacttcatggatggttactattataattaactaccacgcatgcatgcataagtaaatggcctttagctagatccaactttaatttctgtacaaaacttaaagtaatgtattaataatcatgagctagttcactgtagtgtgcataaatgtattaattaatagcaatactctgatgtgtatagaatatataaattaattaactagacttgactctgagtagtgcatgtatggctttcgagtattgttatgagatactaaagtatctagcgttattatgaagtgatgttttatgactggtattaacagttttttatagtcaattatcaaagtaaaatatgtgaaactttatataaaattacactaatagtgatattacataccacaaaaatgttaggcaggaggcaccatctcatggctttttggttatattaaaaaaaaaataaaaaaaaatggtatgtggatttatagagtgggggggaagaatagagaatagagtgagaatctgacaaggagcagcaaataaaggaaatgcttagaaaataggatgcaatatctcaaagtaaccaaacataaattggcacgccacccctactctttcatttcatccatgactcatcaactactactaaatccatttttgaattcaaagcctttcaataaatattattattattattattgctaatattattaatgatataggcacttaaaataaaatataaatagttgattaatttttaaaaatattaaattattatttacgtgtcattttttattagtggtgtgtcattttttattagtagtatatatattttaaattattttttaaatataaagtttgacctaaaccaattagaagcatatcacgtgaccattaacttcacttaacggtcacatacttacgaaaacttttatgtattattatgtattataaaaaaaataaatttaaatatttatttacaattaaaaattaaatttatgtatttatgaaaagcatattatgttataattaaatgttatatacgtcatattaggtcgtgtgtattgtattgtattaaattagattatacatcatatttttatataatactatgttaaa

SEQ ID NO: 110843 - DNA, 7735 bp, Cannabis sativa
tatatatatatatagagagagagcgagagagagagagagagagtgcaagtgagatatgggatgtgcgagagaggtgaagggagaaaaggtggcgagaaggaggagattgaaggaaaaattatcctaattgttggagagaagaaggataagaaaggattcaaaggataaggtatgctcacggaagggtacgaaacagattacggccacgccttcagcatgacctggtggcaggagggtacaagtagtggaggtactttgtctatagcccctgacgtctcgacaataggtactttgtaaccaccacccctgcaactcaggaccacttgacacccgacaatggtacaaggcgcaagaccacatcctgtacctacaactcacattaatataaggccagcttgtcccttgagggccacaagtgtatctcaagacattagagcctataaatgccccattctctgatgtgagagggttgaaaaatcaatcttgtaatcacatactttgaagcaataccaaaccatttttctctctattctgaatacccattgtagtttgaatttacactttatctctaaatttttaattcaggctttgatttctggccaaaagttggttgacaagtttctaccgtcaacaacaaccataaataacttcccaaaactaaacttaaactactcaaatcctaacagaacagaatttttcgaatcaaaactcaaacccaaactttaagtcttaaaatcaaagaagtaaaagaactaggatttaccttaaatctttgctaacaacttgcttctaaatcattgaagaactacaattttaattgggtgaaattaggtctaaaatggtaggttgttcttagggtttccaaacctagaggaagtgaggagagagagaatgatattgattttatacagttatctccttaattttttgttttattctacttggttattcaacataacacttatcccaatctagaaattccactaaaacagctaatatcaatcttaggataaaaaagaccaattttttttttttttttacttccctcttaagtaaccttaatgtctagggtaaaatggtcaaaacttgcctcgctaattcttaaatactctaccgtaacactgtgacactaatagccatattgacgtattccactgttaccaggcataaaatatgaaaaatatcataatttatatataacatgcataacacacataaagctcaataaaatctccataattgagaaattatttctcaaagacctatttctgacaatagatctcatttttgtactaatatacatataatcataaatattaatttaatcactattaagccgttaattatatgctaacttttatgtgcaattatgcagttattaccgtgttatttaatacaaatgattcatattagctcatattataatatttacaaaggattcgacattgggggaccttgactcgaccccgtacccatgacctggatttgggacccagactcgaactcggaccccagatcccggacctaaccctgactccgaccccgaacccagtcccgactccaaccccaaatctcgacctcaacctcgacccctaaactcgatctcagacccgaatccagacctagacccaaactatagcctcgaacctgatcccaaacctagattcgacccttgaatcaggactcaaacccgagaccctaagctcggatcccatccctgacctagccccaaattccaacctcgtgtctttaaggaacgaggttggggtgatgatcgagttaatgataaagataatataattttacacaaataaaatattatattaaataacactaatataatataatacaatctaatacgatgtggtcacttatttacccaaatgtaaataaatacttaaacaaaaaatgaatgaaaaaagaagaagaacattaatcaatatttttttgctaagaaacattaatcaatattaataatgtgtttgtagatatcctgttcgtaaaaagaacaccacttttctcttccccaacagttatgtcatgtctacttcttccagaaaaaaaaaaaaaaaaaacagtcaatgactacaatctcgaagatggaggctatttttctttatgacagcgttactaacggtcgttaagaaaagctaagtggtaaaataaaggagagaaacggcgttatgttgtctataaatagaataaaagagaataattgtattctctctcgctcgaaggacagctccttttcttcttcgtttagagagagaaaatcaaggacctcagagaacgctctccattgccacaaacctctctcttttttctctcttctcaggtaagtactctctctctctcattcgatttgctaagatttcgattgttctcaactatcgatctctagaaattgaagttgctgtaagtgcgatctgattacaagagcatctgatggccttgcaattgctccgatctacatttagatcttcaatatttctgatttattagtcatttaggatttacataatactgattccgatgcaatatgtgcttatttggttgcttgattttagattcagcgatcgtttttttcttcatgattttgattcttcgtatatgtattggttctggttcatttcgatccattcctgttctaattcacatttgacgatagaatttacgaatcattgggaagaaaaggaaagtctttggtagatttgatgatcgtatagaatatagaccccatttgtgaccttcttggaaagtgagataattacagcattaaatgtgttggatatttggatttcagaatggggctgtctttcaccaagctcttcagccggctttttgccaagaaagagatgcgtatacttatggtgggtctcgatgcggctggtaagactactattttatacaagctcaagctcggggagattgtcaccaccattccaactattggtatattctttgtcttttatactaatctactgacttttgttaattctttattctgcatttatttctatgtctacgaattgggatagggtcttgttaatgatttttttccttttacaaaatagacttgccataggataattcagtcttcactatttcaatttgtggtgtcctaatttgagtaggcattaatccgtattctcctaaactattgccaattaaaattgcttgagaagtggaaacaaaatgctcttcaactcttatcatatttgttcttcacaaatctacgtttttattattttccttttggtaattgcaactgattctggtctatttggttaggatttaacgtggagaccgtggaatacaagaacattagctttaccgtctgggatgttgggggccaagataaggtttgtcactagatctaattaatacagacattagtttgattctgctatagtaaccttgataattgtaaatagatccttttgttgttattattttcttttcaattttgttatatccctgattcagaagttattttgcttaaatgttatgtggataatctatgtccgcccattagaatatcaaaggagagactggtgcctgttgctagttgaaaaaacataatttcattttctttgtgagcgtacttctaaacatacagaatgagtctgaataatttagaaaatatatgatattttcagatccgacccttgtggagacattatttccagaacacacagggtctaatctttgttgttgatagcaatgaccgagaccgtgtagttgaagccagggatgagttgcacagaatgttgaatgaggtattatgccacttctgaatattttaacctttttggttcctaaatgaaaacatagttacttacctgaagaaatattgataggatgagctcagggatgcagtgctgctagtatttgcaaacaaacaagatcttcctaatgctatgaatgcagctgagataactgataagctcggtctccattcacttcgtcaacgtcattggtaaaaaactgattatagctaactatatctttctccctctctctggtgggtatgactaaccacggaagaatatattataggtatatccagagcacatgtgcaacctcaggtgaagggttgtatgagggacttgactggctttcaaacaacattgccaacaaggttctcttcctacttaattttgttgttcttttctggttcctatttgttaaagttgttgctttatcgtttattttcctctaatttattgttgtttaaatgtatttgcaggcgtagatggtgggcggcttcattcgcaattttttgttggctgaagtacaagaaaagattatgatacattttgttgtgtttgttattgttctagatttggtatgttgttaaagtgccttcgttgtacggtgtttatgctttctcttgcaaacgctgactttttgttactaaatagtgttccataataattcatatttcctctttgaaagatttctttggatatattttacccggttggtgttgttatcatataatctagtttgaagaaactcaacccattcacatcgtggcctcctttgtaccagcaatgtttgcatatcagaattcaaagaaatgaggtcaatgtaaatgtaaaactgtggtcgagggttgagtaaaatatgaaccgcccaaatgtgctcagctctgactagttttgaaggttatttggcttgtttgctgtaaagcttcacaacggcaatggtgaaggtaagagcaagaagaaagttattgaaatgccaaaagaaagccaaaaactaaccaatcagttaactaacttataactactaactaatcggttaaggtggtttgtgttttagatattggaatttgtccgtagttagaggtttagtaagagcatttgcaacttgatccaatgaaggtatatatcgaacatatagttgtcttgttagaatttgttccttcaaagtgaagatcaatctcaatgtacttgctacatgcatggaacacaggattagcaactagagatgtaacacttcgattatcaacccaaaggacaataagttgaatgaagcgaacttaaagcttaaatcaaagagaagtgttctattttatttctgcagcagcattagccaaggctcgaatttcactctctgtgctggaacgagtaacaacctgtcgcttttttgcagactatgagataatattgcttcccataaacatgacatagctgccagttgatctttgatcatttatacaactggcccaatcaacatcactatagtcctataaataaagaaaatctgatggatgcaactacaaaccattagccaaagtacctttaagatattgaagtaattgtttgcaagccacccaatactttattgtgggaacatgaataaattgcctgaatttatttatgatgaaggcaacatctggttgcgttaagttaagatattgtaaagcacataaagtgcttcgatacaaggtaacatcttcgaagggttccccatctatgagacttagtttagctgtggagctagttggagtagagaaattctttgcttcttctatgtgtagtcttgtaagaagataagtacttgctttgacttaagtacatacctttggcatatttgaaagtttccacactgagaaaatagtaaaactgatcccagatctttcaaagaaaattcggtctaggttagatatgagttgagagatgagagaagaatttggtcacgtgatgagaatatcatcaacatagaccaataggtaagccagagagttacctatctcatgaatgaatagagaattgtcacatttagatgcttttgaaacctcaatgaaacaaattggttttacgcttttcattccaggctctagggagcttgttttaacccatacaaggccttgtgaagaagatatacatgattgagtttgttaggatcaacaaatccttgaggttgatgcttgtaaatagtccctttaaggtttccatgaagaaagacattgctggcatctatttgtttcacatgccattgagatgaaacaattatgtcgaggacaacccgaagtgtagttggtttgacaacatgactaaaagtgtcctcataatctattcctggggttcggagaaaacctttggctaccaatcatgacttgaacttgtctaatgtaccatcaacactcaattttactctgtgaactcatttattgtcaattacattcatagaacggtcataaggaacatgagtccaggtgccttgctttgttaaagtatcaaactcaactttcatagctgtaccattgagggctcttaagagtagctattattgatcttggttcaatgggaaaaagagattctagaagagggtgtttagtttctaagtaagccttgggtttagtaatgccactctaagacttagttctcatagaatgaaccttggaaggcagtgtagcaatactgttgagtgaattaggcaaatttgatgaagatacttccttctcaagtataggtaagggtggtgggagagagggttctgtgtgaaattggatgatatagcatcaaggttaggtgaggtgtttgtagggttaagataatcgatttggttaatttttggttgcttggtttgagatgatggagtaagggttgtttcaggtataatatatgttgggagttgtggttgattgtctggagttatgatgacaggtaagtttggctcagttgggattgtattaggtattattggtggttgctgtaaaggctctggtgagggattagtagggaccatgaagtgttggtgggaacacaatagtctcagattttacactagaagagacaacaacagatattgcagtactacagttggacaaggttcaatgtggaaagtagttacaggaaagaaggaagaggggaaggaatgtacctgaggtgcatcttgagatgtagaagttgtaggtagcttagctgggaagtgctcttcattgaagataacattcataacaatgtaaaacttacaaatagagacattgttgtgacctgaagtcaagtttatgcttgttgtatggccttaagttgggaaaatatgcacacccaaatgattttagaatagtataatcttgtttcttgtgaaataagacttaataaggggatagaaagtttagcactttggtaggtaatctattgattataaacactacacaactgaaggcatgccaccgatattgaagatttaagccagcttgagcgaagagagttcattgatgtgtctatgttttctctctatccttccattttgttcatggatatgagtaggggtgttcatccaatccaatccgcactattttactcagagtgcacccgatctgcactaagtgcggattttattttttggatccaatctaatccgcactatagctcaaatccaatcaaatccaatccgcaaaaagtgcggattggatcagttattttggattggttactttttaatattaaattatttaaaatttatgaaaaaaatattttttttcacataactagcaacaaaattaaataaattattattattttatatctccaacaacaaattaaaattaataaaataataaattcaaaggaagaaaaattgtatgtataagaaaatgtttaattttgtttacattgtatgtagaaaaaaaaattatatataagaatagaatatacaagtgatttattaagttttgaaatataattgtattatatgtattatgttgggttttgtgtcctaa

SEQ ID NO: 110844 - DNA, 14035 bp, Cannabis sativa
  modified_base (27)..(32): a, c, t, g, unknown or other
  modified_base (8356)..(8381): a, c, t, g, unknown or other
  modified_base (13086)..(13088): a, c, t, g, unknown or other
aaaatagattacattgaaatggagttnnnnnnagggcataaaacccaacattgtccccctgccaactgccagccagctcccagccagctccctctccccctttctgtgtgtaagtctcactgatcatcgtggtccacacgtatggcccacttccctagccagcaagtgggccttctcaacccgtggggaccaagttggtccccaaaagtcaaaagtgctccattttagctaatcaaacgttgacacgtgtccaccgactcaccaaacggaccaatccaagcgcgccacgtgttcactctgagttgttattttaattgcaaatttaccatatgtaatttgtaataagtttatttgcacatgagtctttttactatcctataaatagaagattaggtcgtttagaattcaggacagttttagatagagaaatctagagaaaacactttaagtgctcattgttttttcttttttcttttttgaaaaattgtgtcaatagataagggaacttaggcctcatggtcattacaaataatatctaccggtatagtagatatctctactatactagttaagttatgagcaaacacccaattagccacattatggatcacaaaattacacagtctcaaaacaaaagaaaaattacaacccacaaacaaagcagagagcatattacaatggtgaacgtaattatcaattctccagttagaagacttccccttcaggaaattaatcacaatctcaaaatcgctttcgatcatcacaaaatgatacttcaaaaggtctgccatcttcagggcaagtaagcaagctataacttcaccaataaggggatcaacgaagtccagaatatcagtagcaatccacaaaacttttcccagaaaatctctagccaaagccaccacacacattgcctcactccctactttaacattacagttaatctttatctagtcttcagggggtggagaccaagcgaccgtaaccgtagcaggcagggaagggaataagcaagagccataatctacgtagcagtgagtaatagaggcaatataatgtgtgatgctattcagattgttgttgtgtaccttatcattaagggcccaccagatcgtgtccaccactagcgaggcatagaggaaaacctcatccatattgtccaccactcgatcccaaacacgaccaccagatccaggtatcggccaaatcccccatggggaagatctccacaaatgaaaaggctaagttacaattgagaaaaaggtgttctatggattcttccccatcccacaaatcggtcaggaggagtcatcgatgtgcaacctctttgctaaaagagcatgaataggtagtgcatcagagaggatactccaccacaaaaacttatggtgctccagcaccttactattccacatatattccaaacggaaggtgccacaaccaaaagagaagcatgatctagggcttggaccaagtacgcatacttacttgagaaactatcggattgctctttggtccatatccactgatctttcccctgcccacatggtttaccccctttaagatattacaaatcgtttcagagtgaaaaagggaataaagtttattaatgtcccaatcaccatcacctaacaacagatcagaaacctttcgcacatcattagggtgattggcagttggtcttggaacgaaatctttaccatgggttacccacgggtcttcccatatctttgtatctttcccatcgtttattagcttgtaggcccccttctttaaaacatcttgagttttgacaacattcttcaagaagcaagagtctgaattcttataggagcaattcaaaaagtgattacctctcatatatttggctctaagaaccctgcaacaaagcaattgattctcattgatcagtagtcaactaagcgctcagtgttagtttatcgcttttcattatttaattttcttgtaggtttctaagttccctaattattaaggtggacgatgaaatctagtatatttgattaagtatttatttttatattgattaatattatcagtataaatgcttatgatttttgcttctttaaataattttgttcatctttaatatcacgtatttttgatagttataaactagctatcaaggcttcatactcagcctcgctgttttaagtgtcaaattggaatcttagggcatagtgaaacttaaagttttctggcgagatcagtatcacccctgcacccgagccattttcattagatgctttatccatgtacaacttccaagtgtttgcgtctcgttggataagtggattttcatcttgaattgtcacttctattaagaaacctgccaaagcttggcccttgatggatgttctagggtgataagttatgtcgaactgccctagttcaatagaccattttatcaatcttccagaagtatctggttttgataaaacttgtcttagtggttgatcggttaatacctttattggatgtgcctggaagtaaggccttaatttgcaagatgcatggattagccatagggcaagtttttcaagagggggatacctcgattctgcccccagtaaccttttactaacatagtaaacaggttgttgatgctttccctcttctcgcaccaatgctacactgattgcattgttcgagacatccaagtagaggaataaagtctctccagttactggtttagccaaaactggaggtgttgataagtgcttcattatgctcttgaaggcctcctcacacttgtttgtccattcgaactttttgttgcctcgcaagacattgaagaatggtaggcacttgtcagttgatttcgagatgaatctgtttagagttgtcattcttcctgtcaaggcctggacttccattggcttggtaggcgatggcatttctatcaaagccttaatattttctcaggatttgcttcaatgcccctcgtgttgactatgaatcccaaaaacttcctcgaggagactccgaaggaacacttttttgtgttgagtttcatgttgtactctctgagtgtttcaaagcactccacgaggtcctgtgtatgatcttcactttttaatgactttaccaacaaatcatcgatatataattccatattccttcttattttcttttcaaatatttcatttactagtcgttgatacgttgcccaagcattcttcaaaccaaaaggcatgactttataacaataaagtcctatgtcggttacgaaacttgtatgctcttgatcagggacatgcattttgatctcgttatatccagaatatgcatccatgaatgtcattagcttgtgtccagctgttgcatccatcaactggtcgatccttggtagtgagaagcaatcctttagacatgctttgtttaaatctgaaaagtcgatacaagttctccaagtaccatttggttttgggacaaggacaggattagatatccacgaggggtagaatgcctcgcgtataaaatcattggtcagcaacttgtccacttcttctttgagttcccctagtcttttagagtccaggggtcaccttttttgccttttcgctgggtaattaggatcgatattcaagtggtggcaaataaatttagggtcaatccctatcatatctaaatggctccaggcaaactgatcctggtttgccttcagaaaacttattagctgttattttagtttctcatccaaatttttcccaatgaatacacactttgtgggattttttggatctaaaataacctcctccaattccttaattggtttcaattgattcttttcatcttgaactcggggatttagatcttcatcctatttctcgccttccttcattatgactgccattaatagatggtcggccttcttattttgtagctctatgcgataacattcacgagccagtagttggtcaccttgcactacacctacacatgttggtgtctgaaacttcaaagataggtgtttaattgaactaactgccgctaggccaattagtgcaggtcgacccaacaatatgttataggccgatggtaagtcaacaactaagaaatcttgcatcacagttgtggataatggtggtgcgcccacagtcaacgggagttcaataactccttgactggtgacactatcttcgataaatccacatagattcaccatgcaaggttttaacttagcattttccaatcccattttctttaatgtttccttgtaaaggatattcactgagcttccattatccaccaacaccctttttattcttttgttggcgagttggattgcaattacaagtgggtcgacgtgtggatacctcacgtgctttgtgtcttctcctgaaaacacaattggaggttcttcattcttagctttctttgatggttctggaacgaaaactgaccgctctttttttatctcgttgacatatctcttttgggcattgctactttctccagcgagatgtggccctcctgagataaccaaaatgtcatctccttcaactggaggaggttgtaatctttggttgctcgggttattgggcggatttggctggttttgtccattaccttgtcattttacatactgttgaaagtaaccacacgagataaggttctctatctcatctttcaactgacaacattcatctgttgtatgccctatgtccttgtgaaatctacaaaatttcgttgcatcctgtttgtgcctcgcatgtctcatgggcttaggcttgcgaaatgcaaccctatgctcatgtgcaaggaaaatattttcccgagtttcattaagctcgatataaatagtgtaaattggcatgtacgtatcgtgcttctcctattttttcttatctttggctgattccttagttatattttatctttgtgctagagcctcttggattgtcagcctttgtcgagtgcttgttgagacagtgctaggtttacctcctgagccagtctttagcaattttatctcattccttgcctccttttttcgtacaaacacttgagctctttcattgaactcactaattttttcactgggtgaccctgtaagtcaccccacagcttgcctccagttgttgagaggtcagtcgtaatccctgcttgaagagcaataagttgtatactgtcgttcaagtttctaactctagcagcagttgtactgaaatgacttaaataggccttaagtgactcgcccggctactacttcacgttagtaagggaagacgcttcaggtcgcctgtctcttgctgcttgaaattgctttttgaaatccttagacaattgttctcgagaggtaattgagtgatgggtgaatttgttgaatcagttgctcgttgccccagtcagggaagtggggaataaaatacaatgtaagttatttgtgacattgctagctcgcataatggtattgaaattgttgaggtgagtgaccgaatctgtagtcccatcatacggcaagacgtgagggtttttaaatccttggggaaattcacaattcataatgattggatggaagggttcaagctcttcatctgagtcgtaagcggacagtttcccatatttctcatcttggtatttcttgaatttattttctagctcactgattcgcaattggattggatcatcttgcttttgattagaattgagttgttggcgtaaatcaggctttttccgattcaattactcacgaagatctggccgtcttcgatcatagttgcttgttgaccttgtacctgagtaactctcagattggtgactcttggttgtgctcatactttctcgatcattactgcgacggacctatcatctcctcgcatagatcgactgtgatcttgagaatgtgaacgtcctgagctagaactttccttgtcatgcataattctcgtttgggaaaggttagatacacccccctgctggggtgtgtatacacctcctccctatcagtgcgagaagggcattaacagtgtctcggtggtaacccacttgtcctaggttgagtcccaggatttctctcgttaccacaagggatttctatttccctagtcctaggttgccttctgttctcgttcctacgagaagactctggtaactcattattttcattcccttgggttgtgaatcccccgggtctccgaggcacttcttgacgaggtgcctgattatttggtcattcatcttctggaacatcctcagtttccccaggttgctcctcctgagtgttttgggggttttcctgagctgtctcctgcctcctggttcttgaaccttgaggtctaccttgggaccttctcgctctaggatcaggtcgattttgtgtagcgttttcttgagtcgccctggctgcggttgcctctatctctaactcagcgtttgttggttagcctctgtcagttgttgccggagttggcgattttccagttcaaccaatggtacgtacctagtgggatcatggcatcctcactcttaggaacataaacaccaacttcagtattggtttcctcatttccagtttctaggttttgatcattatcacattgacttcttcttgaacgtgttgatcgtgttgaacgcgtagttcttgaagtgggtggcctccgcgagcccattggctctttaccaggacaacgattagtctcttcaggacgactgttgttgttttcctcatgaccagccatggagaaaaattatttcttctttgattaggaaggatttttctgagcttttatcacgtaggctctcaatgaaagcaccaaactgttaacacaaatttttgttaatgattatgagccaattttgtcataaatcaaacatgaatataaaggaatcaacaagtaaaatactagcaattacaccaaaatttttacgtggttttacagttaactctgcatagtccacgagtctatcttattcatatatttttggatacaaaattagggttttacaatcaataaacttctatcctctcaaatatttttccgccctttttttgcataatctgcctctatttatagtaatataagtttggcagttaattacgtttgaatttaaattacataaccatattcctcgaaattatgggctttaattacgtcccatttaaatacgtataactaatattagaaaatcacataactgtgatttgaactatctttaaggcagtcaacgctgacataaataggaacacgttgccaaaggtatctcgctagaggcgtctcgcctagtacatagatgagtgacttagtttatatgtattccagcaatggcatgagcaccagtgtactaagcaaacttaagaattgctctttaaacataggccttgcagactggacaatcatgttctccaaactatttcacttagtcattataacgtgaattatacgctaagtgtttcaacagccaattcgccttgtcaatactttcttagcgagatagatgtctgtaactccttcgtgtcgcgaggtggatgtctcactatacttggtccgtaattacctcgagattgtgctttccaagacaaaatggtttcttgccaatacataaattgatagtttgtatatccttatctcgcttaagattatacagccagcgagttatgaacgtactctatttattctatatttaatgagttattctattttgcatttaatgacataattatcattaaatctgttggttcatattccacgagattgacacatgtcactttctaaagtacagccgaatttcaggtataacaatatttattttaaataatatttaattagtttttactttattatatacaatggtgatatataattttgttatcagggtatatatatatattttttaattgtgatatataatttgattagtatagtatacacatatatattagtaatatatattttttttattattattagtatatatgttttgatgaatgatatatgtattttttgttatacggtatatcattttttaaaataatatttaagttctattttctattatacttttgttgacatgatatatagttttattagcattttatatatttttatttgttgttattatatatattttgattgtgaagtatatgttttttgttgtatggtatataaattttattgtataatatatcatattattttagatcatttaattttttaatttattatatataaaggtgatatataatttggtaattatagtataattattttatcgttgtatataattttattaatatggtatatacaatttttttttaataatattatattttttttttattgtaggtatatatgttttgttgtatggtatatggtttttgttgtctatagtatannnnnnnnnnnnnnnnnnnnnnnnnntttattttattatatataattttgttagcatcatatatatatattttttgagtattaatttagtattgttatatttttttgtggtatataattttatcactacaatatattaatatttagtgatacgatatattaaatattattgtatatattttattaaaaaaaaaatattgttgtatatattaaatcatctaatatacttattcatttttattacaatataataatatgcaatattaaaaaaattatataacttaatttaattattatatgtatatatatattttttaaaaaataatatgaagtaaatgaatttttataattcttattacttaatttattatatttggccattttttttatttttattttttttaaaaaaaatatttactaacttaatttttaaagttagagtcattttagttgtgccaaatgggccaaattatcaagtgtcgacaagttgcctctatatttgaatgtccttcttataattattattatttgttaacactgtcaaaaatttgtacaaaatttaaattacatgttatataataagtttatattttgtgcaatctttgactcagtatgatggtctgtaagtggcacattaaaacttcaacaaataacgtgcattagtagttgcacctagtataatatatacacacatatatcaaaatgtgaagctaaaaatttattttacaacaaagcaattaatataaaatcataaatgtgtccccttttgtattcctttaccatttttcccatcccccttcattagccaaaattcatacagagactacaaaaaaaataatataattacacttttaaagggaaaaaaacaaatcctaaatgcgaaattataaatactggctgctctacaaaattcagtaccctgtcctgtccattaatttggctttgggcacttcctatatttggaggtcggagggtctcataataaccgtcctaatgagactaaaaatgtttgtttcatcttaattttattctgtattactacatgcaaaatgtcatcctccaagtattcaaattgctgatgaacgcgtttgttgtagcaagccacttgttgcactacgggtccttgttaaaaatgaggcacttatggctggcattctcagcctaaaccgcccaccactagaagctccggcattcatgtcttctacagcaccaatcccatcgataaccccacggtcgtttgatgactcgacagcttctgaaattccaccaacatcctaaaagacagagggaatcgaaagttaatttcagatcaaaaaatatttgcaatgcaggaattatcttattataacctcaggtgttcaataagataatatctaatgtaagcaatcctcccaaaaatcctgagctcatgataagttcaacaaacctggtctgaaccactggaaccaggagaagacattggatcggacatcaaaagaggcggcaaagactcagtctgccaagcaaaagcacatgacatacattcatgaattcagtgaagcacttctcaggtataacaagttgccatatataactagctaaacatacatctattctgaatggtctgaataccaagcaaataaatgtgcttaatacagttaacctgacagtttgtggctattcagccaataactgaagattaattaagagcactgtgaaaataatgtttgagagcctgggaactgaaattacccttgtcggagatattggcggtgcctcaagtgctggccttgcggagctggatgatattgtctgtgtattacaaggaagaattttagcttgaaaagtgtgcggaaataaaccatacaaaaagtacaatccaaggacaaagcaatccacccattagtttaaaaaaataccattgttcaactcttaaagaattggtcaataataataacccaagaatatgagagtactgcacataaatcataaatcaggaatcacgtagaactgaattatgaaagctaaagtaattagaaaagttcagtttatacatggcagagtgatataaacaagttgaaaagcatataacattgttcaactcttaaagaattgggtaataataattacccaagaatgatagtactgcacataaatcaggaatcgcctacctagaactgaattatgaaagctaaagtatttagaaaagttcagcttatacaggagagaatgatataaacaagttgaaaagcatatttaaatgcttcagcattattaatgtacgaacgtttatgaaaccagaagttgccaataaataaaatcctatagcatcaataaagaatagcaacacatcaagcacattcacgtgaataaagtaaaaatcccaccttaacttcagtggttctggcatgttcaatactctgggcaacatcacacaaccttctaactccttcattagtaagattctatgtaaatgaacaaaaacccatggttacaacaccataatgaaataatttagattgtaatgtcttttttccttttaaaattagaattgtaaatcaagatcatcattgaacatacctgcttccattctatgctattgattttagtttcctatgacgcaagggggaaaaagtatcagtattgaaatccacattcataaatccagtcaccggagtgaaaaaattaaatagaacatccaaaagaaaatagattaccatagctcggactgcattatgaacagatttaacatcctcaccaattgtattcgttcttccccgtagtccagaaacctaaaagcataaataaatgtccatgaaaaaaccccgtaaagaaaatgggccaggggatagggttgttgaaaggatgggagtctaaattgctgctcatatcttcaccatgctcacctcctcttttgtcctactagaagtttcaagacactcctccaaaccacgatctaggccatctatttgggaagataactttcgtttagtagcctgaaaaagaaaaacaaaataatcataccgttgaaacataaaaggcaagacacagcattcgagtgatgctcatttttgttttcttattattttcaaagaaataacaaaaggaataacttgccgaaactgacgagtaaacattctcaagctttttctcaacagatgagcaagcatcggataagctacgccgtgttgcaaccatcaaaccagataatccccctcctccctgtaataatacaagaaatacacaaaatactttatcaattaaattcgaagatatgtagcattaaatggagtggcgagaaagctagtatacacattgccactatttaaaagataattattcaaaaaaaaaagattattaaagattcaaatggacatctactggtataaagatcctaaggatacatagcaaacagtgttaactagacaagaacaatggacaacccacatatgcccgcatataagtttcatgtagagcattgtcagctagcagaaagagttcttagagatgacactcttaccttccaccaaatatagccacatcctgccacagctacaataataattacaccatactttttgccacctaaatcatacaaagagaaaaacaaaaaattagtaaatgcaagagaagttcggaattgatagaaatcatttctgagcagaagacttggtgtaactaaaggaagagggaataaaaaaaaatgactgctggtaatctttatttctaagggaacaaattaaagaaacgattacaggctagatatgaaaatttgaaaaaaaaaaaaaaaaaaaaattgcaagaatttaaatacatatattcaggtataagaaatagaaaccgatgcagccaattaaatcaaaataaactgttggagctaaatagttgtatcagccattacaaaaataaatagcttaaatagaaagacaaatcatcagtaccatttcgacttgcatttataattgtgactgatctgttggaagccaagatttggagctcctgccttaagctgttgacctgcaaagcttaagttttaatgataataataggcaagtaaactataaggaaacagctcatcacaggtgaaatccctatgagctagcagaagactaataaacattttaagcccagtccagttaaaaacctgagccaacagcaagtcattgcgaggcttttttactggtgtgctagaatcatcctgtttaagttgcctccaagcaatctgtggtaagatcaaagtactatcacttagcaggtttcacatactagcatacacaaaatattccaatatgttaagataattagccaagactatgtggtagctcatagacctgagagaaataattacaaagaaactagtaggactcaagagctcagggctaattcaattgtgctcaacaatttaaccacttattttattatatcaaaacaaaagatcagaaaaataaattttaaagtagagatgttcaaagcacaatgaaaaactttaaactgcatgaaatagaaaacaatttcaacagtgctaagtttatagatataaaagtaccttgaaagcaccagatattaaatccgatacccctccctcttttgcaagaactgacccaacgatacctgaaagggccagaaacccgaatcatcttagtaactgaaaaataatacctcaactgagtttgggtatgcacaatgcacagaaacatatagaagttcaacaacaaaatttagaagtcctcgtttcataaattttctgaatgannnagctcgggcaaccaaacgcagctctaattgataacccaattcccattccaaacaaaattcaaactaacccaaaaacaaattccaatgctaatcacagctccacaatataatcagtaccaatgcataacaattccatgaccaactattaatcagagagagattgcaagcaatagggtttatctaaaaccctaaacttcgatcaaaaacctccaaaatgttaaccaattgaacaaaagacaaaccagatcaaggcgtataataatactttcggacgaattaatcaaaaaacacaaaaagtcaaaaaaacaagaacaatagaataaggggactgacggtttgtacgaacctgcaccaaccagaatggtgagcttcccaagggagagagccatataatagagagatatatggttagccaatatcgtgtcgccggtgagtattaggcagtggcgtacggcatcggaagctgttgagagaatcggaattgttagagaagaatgggtgtgggtcagtcgttaccgatgggttattgtaaacagccctattcgagagagagagagagagagagaggttagagagctgtttgcagaacaaacttctttggtatttactaaatcacaacagagccctagtgctacttacaccccggaggaatatgccccctccaattacgtaaatacttaggggtatttacctaaatattgaaaaaaataaacctaatttagatcaattactaaaaatttaataaatatggtatttaaaataaaaacttaacatagatgaaattgaattaccataaaaaatattaaaattctcttcatattttttttttttaaaactacagtgatcgtcgtagttaggggtgttcacaaagtattcgatccaatccaatccgcacaattcaatccagtccaatccgcaaaatgcggatatccgcacttgtgcagatt

SEQ ID NO: 110845 - DNA, 4234 bp, Cannabis sativa
  modified_base (47)..(75): a, c, t, g, unknown or other
aaccatgcaacataaaatgttacttctgatctttattaataagtaannnnnnnnnnnnnnnnnnnnnnnnnnnnngggcataaaacccaacagagcatagaggcaggctaggatcttggcataagctagccgaccaaaaagtgacttccggataaagggagcttttgttcgaccaagggaacatgaccactacaaggaaatagtgcacaaagttttcctcaacttgcaaaaggctggcctctacatccaaaggttggtctcctcttggtaaagcgatagtgccagtaggatcctgacaggcacatgaccagccaggtcctagtaggaccatggccggccaggattgacatagtaggaccatgcccgaccatgattgacctgacaagaccatggctggccagacctcccctgtaggtctacgggcgtcaggattaacgtggcaggactctatgtacagcttaaaatgtggacaacaagctacctacaaattaggccctttaaatgcccaacaaactgatggaagatatgtacttttgaggggcaatttagtcttttttatttaatcaattcaataggtaaatatctaagggtttgattgtaagttagatttttaggcttcctatataaaggtcttacctctaacctagaaaacatatgccactaagcctaatctttagcctccaaattactctaagtcaaaaactctagtctctctttttctctctctgctacacgcccgaagggctctctctctcttcttctctcgcacgcctctaagctattcttgtttctcattagggatatgcctacttgatacatactttgtatctttaagggtgctatattagttcccacctatagtgatccgattagtattaaccctatgtatgaatacaaccaaaagtgaagtaggtcttacctactatcacaaggggaccgaacatctataacaaatctgtgtgttttacaatttttcattttgtttgtgtaacacgtggcaagcatcagatctatacaacctcgctatcggtggatcactttatgaggtcaattattattattattattataggaatttttaatgtgtcgtagttttagactattctattggtgcttatgtgccatgtttttgggcttgttgtgctgtgtcgtgcttaaactcattttttttgcagtgttgtgtcaatctgcagtatcgtatcgtgtcctgcctaagcctatattttctcgtgtcaggctatgctcattgttgaaaaatttaacccgcatttataacaaataaaatgtgatttgtgtctcctcatgtaaatatttctaaataataataattaatatagcccctcttatagggtgttggcagctttaaaggccctttgtattcctcaatggcttaatggttggaaaatttccaatggcaaaagaattataagtaagctaaatgttgcgcgtacttgaaactacaaaattctccgtagtgtcagtaaatgttcccgtttcatttcataatcttctagttaaatatttgactcccctattaaataataattgaagtagtactgtttctaatgttaattacttaatattattttttcattacgtatttcttcttgtttttttgtgtgaaattagcttaattaaaccaactaactagtcatgttaatccttgttaatgctgtcatccttcacccggaacatcctccaaagcctaattcacatttattttcttttagtttcttcttttaaataatcattgaattgataaaagagtgagagacaattgccatggcactaaatggtaaactaagactgagtttagcaagtttgggaccattatatgtttgaacactataagtttcttttcatgggtcttgtctgtctgtttttacagcacaaggggaaatctcagtctagaaagacctatacattattattgtttaccattgaccttgttgtttaaagtgaaaccgtattttacaaaattaataatatacaaaatggtaaacagtatatatttatatgaatattatatatgctattgctagctagaaagtaattgtatacataatcagatgtttggttacatgttaagtaataaacaatagatggagttgagaaagataaaaaaacagagacacgtacgaaagaaaaggtgaaatcttttgagctacagttcgatcgatattagtattacatggtcgcctggtcatttgtatacatttaatatgtactgtagctttcgcatagatttgtcgaacaataaattattggcattgaacactgttgctgttattattaattgaatatgtcgtcgtgtatgctagctagtgcagaagtacagtggtgtgagatatcgagaggtggtataataaattattaataggtatatcatgacgtatactaaatgatgaataaatatatatacatttattatgtatgtaatatatatacattttgcaaattaaatatggccatttttaatttggaaagaggatttggcagtttgagaaattacagagtgggagagtgagagtgttttggtttttggaaatataaatcgaggcaccaagacaaaagaccagctctagtagggttgtagaaaaaactttgcttttcgctagcttggcccttttaaaatcctttctctttctctctctctttctcttttgctacacgtaaaacttgatatacaatacaatatatgaattcaagattgagataattgagattgggactgaggttggggtttgggattttgaaactgaaattgatggaaagggataaatgggtgaaattgtgatgggaaagggcttcgtccaaatgcacgatagctgttggtgggttaggtagcaaaccctgccccctcagcccaagttggacccatcaccctagattcctgcttctctctttattaacttctttctttcttttaacttctttctttctttctttcttcttcttcttcttcttccaaatacaatcccccctttcttaatttcaagactactctctctctccctctgattagatggacaatttgtttggcccgccctttacactccaaaaaaaccaagtagacagccaactcatttctcttctattcataagtaatcctaagctaagacaagcatgtccatatatgatggtactactcatctagtcatctcatctctggctagtagtcctttaccaaaacctacctatattgctttgtttcgtttagttatctatatacccaattcccaacatatatttcagctcattttagctttttgcttcaactttctaatttttgaatcaattataattttaacattatatataattcatttatttaaaaaaaccacttgcttttcaaatttaaataaataaaatatgaaataatcacttccatttttttctcctttaactaaggaatcaaaggtaactacctgaaaagtgtttgcttctacccctgaaataaatatcaaaggctaaaaaaaaaagaagaaaaaaatacaactgtctctataataagaaaaacacttcttactttgtctttttaagagtgaaaagcacctttgttcactgtaaatgattgtacacatattatattgatttcatgataatctaaacgatactaatatatacactcatttaatttcatatctcatggttcatctctcctctcccttaatatacattaaaataaattatatttctaatctaattaatgttagttacctttaacaaaagaagctagacatgacatcactgttacatcaaatttagcagtggcacattacatgtgtatgtcccttgggataaaacttttcaatttcaaatttaaaaaaaaaaaattattatatatcgtagcatgaaagatgtctaaaaaatatattagataaggtttaattaatcatttttctatcctcatttggaaatcaaataaaataaaaaaatatataattatgttcacaaaaaaaaaatgttataaaataaaatcatagaagtagaccctcatagaacccctcgtcttgcttctcctaagaacatttttttccctttcttttagaaccaataattataaaagaaaagtaaaatcttcctgcaagctggtaaggtatatataagccatagaagagtcagccaattttgctgcacttgcttcaactagaagagtttaaatctcctgttgttttttttttttttaccaaagggtttctttcttttcttacttttttttttattaaaaaaa

SEQ ID NO: 110846 - DNA, 4816 bp, Cannabis sativa
  modified_base (37)..(51): a, c, t, g, unknown or other
  modified_base (2082)..(2083): a, c, t, g, unknown or other
attgtattatttctttaaaaaaaaaagagagagagannnnnnnnnnnnnnnagagagagagagagagaaaatattattatctggacagatggatagaaaagtaaactcccctaaaatgccattttctcccacttctatttgattaaatatagagaattttttagtctaacttttttttttttcatgatcccattattttttaggattgcatgtaaactttcaaaatttcaagtagtttacattatcaaaaataaagtttaaataaattttttacacacatataaaaataatagtcacgagtgcaacaaaatatttgaattaattttttattgtaaactatttagaattttatgaaaatttataagtaattctaggtaactacaacatacaaggtcattgaaaattgactacaaaactcccatgaatgtccaaacaaatagagggtgtactgaaacgcgccctttgagggggtgtgttatataattacactaaaaggttataagaggtgttgacctcgcttctagccaacaacactgagtctaaataaagcgataatataatactatgataatgattaacactccaataatataaacggcacacgaaatttatagaggttcggccccttattgcgataatagtctacttctcttttttgtattgctttaatagaagtatatcaagatcatgaggtccgtcaaggtgattttctcaatattttttgaaaaatgttacaaatattttgagagtgttttcctctccaagtgcgtaaaaaaggtccttgaatagtgaactgacctcactatttaaagggaagaatgaatacatagtttaaattacccacaaaataggagataaatcgagaatggtttaaatgtgaatcctacaattttctccatctattaaatcaaatctcatgaatatagggatactaattggcctattattatggagatagttaaagaatgtatcaggacctatctgcagtgaatgcctctggtcggccattcgtcatcatttgggctggtcagtataatactcgtgtcatactctgcccacggtcaacttcctttgccacatgtcaacttgtcaagtgccatatcattaatgcaaatttttagataacatttgcctccaagtttagtgagaacttctggtcgtacggggactgtctataccttacatgttgcactcctaggtgacacgcgtttgcacccacgtgcctacacggatatgacatcgttctacctaaagcgtgcaaatcttttcatgccctttcaaagctctctgcctctagaattagtctggtcaccctgcctagaggcatgatttcctttcatttccttttgagattggctgttagatttggatttcttttgttgttcagcctaagtagccttcttttaagtttcccctaatttttctttccatttatccttatgacgatcgtaagttccaagatttttaggaacaatttttttggtggtgttgtctttttggaaccgtttgtttagttttgtttccaacagtcaatgatgtcattacatcttccattctcgacatattttcaagcattaggatagaaaatttctcttacctcatgtttagtttcttggccataatgaccaaaggatctgactcatttagatcatcctcatttttggcatcaccgtcagtgggcatgtcttagtgatcatcttcaacatcatcaaaattattctctcctaattcatcatctttaaccataggatctttagggataattttcttgctagtatgatctttcttgaggcgattggtcacctcagtcgaatcttctgtacctcccattttagaattaggatcagcatcacccttctcagggtgagtatagtggagactagattgggtttgggtgagtaccataattacagaatgtaatcttggatggtatcattactttcttcaactctcaatgaaagcaacaaaatatttatcgagatttttagaaaatgaattatttaataatagagctaaaggaaatataattaaaagaatcaaataagaagagaacactcagagtttttacgtggttggggcgtnnatgagccttagtccacgagtcattattattatctaataggatagaaaagcctaaaggattacaatgaatatgagttaagaattttcaaccctttgcatgaaggattcagtgcatattcatagagtataagggtcatacttagttaccatttccctctaatggggtgtttacagatgatacattactttgggcttatcaagtgaagcccaacccatgaggcagtgactgtatgctgacttggcatgttgatcatggtcacaactgttgttactgtgtcccctgattgtggataattaatgcaatattaattacttaatcttcaattatatagtttcctattctagcttgatatttattctctatccaagatcttatgaaagtgatttctttattctatacgaaatcactaaataggaaactacagctggcttctaggtacactctggagggttctttcgacttcatagagctaggatccttctagatacggactaaccttagtgaaagcttgcctgagtgagaactatgattgctttcccggaaggccaaatcggttttgggctcggccctgttcgtttgggcccactcatggacctttacttctatttgaaatccatgtgtcccttgcccaagacacagataacgaaaacaattttctgaggacgtcgtaccaacatataatgttcttcataatgaagtctaagacttttttggaggttattataccaatagtttggcctctgcccacttggtaaagtagtcaactgccactacagcatattggaccccacctttttcttttggcagttgtctgatcaggttgattccccatattgcatacaaccaggggatttgcattcagatcaactcgttgggcaaagttctagggatctttgcaaatctttgacacttgtcgcatttcttcacatgagtatttgagtcctcaatcatgttcgaccaaaagtatccttgtcgaagtatctttttggacagactttgcccccaagcgtgatttttataaaaccctttgtggactttagcaagaagtcgagcagtttcctctacttcacacatctcaagagtagtaaagaaaatccacgcatgtacattaatttgtctaatattaaatatcatgcatcttttctcatcatcttctgagcttcatttttgtcactcggcagtgttctagtttcaaggtaagttgaaattgtggtcatccaggtaggagtagtgtctagcatttcaatttcttccaaataggtgatgctagggtccttaaggtattaaatagggaccaagttttcattgtcagataccgaggtgcttgctagtcatgccaaggtaccagctattgcattttcttctcttagaattttctctttggtgtatcctttgaattgtgccaagaggtcttgaatcttacatagataggccatcatcttttcccctcgaatcatgtattccccttgaacacatttaacgacaagttatcaatcactataaatgtacaagtactcaatgtgtatctcccgagcaagtttaagtctagcagtgagagcttcatattcaacttcattatttgaggctgggaacccaaactttatagcttactgcaattgttggcccccatgtgtgataagggaaattcctgcaccgaaaagttgatcagtgacaatccatccacatgtactttccaaattggtccttctttggtcttttgctctggcatgtgctctttttcttgctcttgcttcttctttggctgaacattgtctttagtaatagcttcttcattgtttgtacattcagccacgaagtccactaaagcttggccttttatcgctccccttggctagtagatgatttcataaatgcccatttgagtagccgaccagaagcatctggtttctacaatacttgacaaagtggctagttagtatgtaccatgatgggatgagcttggaagtatggtcttagcttttttgatgcaagtagcaggcaatatatcagtttctcaattggaggataacgactttcaacatcaattaacctcttgatgacatagtagactcgagttgagagccactttcctctctaatcaatacaatgcttactacaaactcggttattgttaggtatatccccaattcttctctgtctagaggcttcaataagagaggaagttgtacgagttatttctttagttcttgaaaagtttgtttgcactcctcgatccattcaaatttttttcctaaacacacttgtcgatagattttgacttgaatctgctttagatggatatcccactaatgagactttgcacttccttaaatttggttgttgatttcatattcagaagggcttgaattttctctagtttggcttcaatttaccaggccttgactataaagtgtaggaacttgcttgagcctaccccgaatggaaacttaaaagggttgagattcatattgtattttctaagtattgaagcattcgtccaagtcctctatatgcacccaactctttcggatttgatgagcatggcatccacatatacttccatatattctttaatttattcttgaacattcgattaaccaaccgctagtaggtggctccaactagggctgaacattttgagcgggtttgacccgaacccgagcaacccgcccgaacccgaattggtgaacccgccaaaaaaaaaattttaaaaaatttcgggtgggttgggtt

SEQ ID NO: 110847 - DNA, 4453 bp, Cannabis sativa
tactaatttttattaatttgttatggcacaatcattaaaaaaaaaacttatgctattagcataccaattgttgaatactcagctacaagcctacaacatacgtacatgtacatgtagaaagaaaaaaaaaaattgctaagaacatatatatatatatatgtaattaatgagatatttgcaaccaaaatactgctaaaattgtactaaaattcaaattcaattactacatagctttattttttaccgtaaaaatatctaacattagagtatggcccaacaatttctttaaaatagaaaaatttcaaaaaatttaaagaatcgtactaaaaatacactatagtagatgctctaaaattcttcttcattttaaagtttttttaaaatttactattcatgctctacatttataaaatattattcattgcatctaaatatcttttattaattgttttaagttatagtaattatttttgcatggagatgtgtatatatattaatattatatatttgaaatgaataaaatataataaaattttaaaaggttgagattttgataatgtattttaaagaagttgatgtataatgtaatataaaagtgtgctgtaaaataaagaaattaaaattttgatgatgtattttaaaagatagagcactctcaacagtttctctactctatcttttaaaatacctcaccaaaattttatttttttcaatttacctgaaacttttacttttcacaatacaataatttttttatatttttctctacatcattaaaatactatatctttaaatattttaatttataaaataataataaaaaaataacaaaaacaaaaataaataaataaacaaatatatatttgaagagagagaaataaataaatgattaaaatatgtttagttcacattgttagaaagggtatagtccatcacacatgattattcttaccttgatgagctgtccatagattattctagaattctaattccatgggattccctcatcctaaggagccaatcatattaaaaggaaatattttattgttatagatttttttacctttttgtactttaaatatacacgtgtaatgattgatacaatcattgagaaattaattcaaatcatatcccaatattctctctgtcccttttccttcttttagcatttttcctattttgatttggtatcagagctgatgacatctcctgcttcccaaggcgattcctcagtcaacaatcccaggaaccaagtcgtcgatgctcctcctctagctctagcagccccacttccagtcgttgctccaacactaccaactctgctgcatcagcccctctctcctatcatcattcgcttggatcgagataactatttgtactgacgatcacaggttatccctattgtacgttctcatgaccctgacgaatttctattttacacaagaccatgtctgccccagtttcttgacgttccagtcgatcccaatcctgaaataagacatgtaaaccctcaatacaccatttagatttgtactgaccaagccattttaagatggttgcttaactccatttctgaagctacgttaggccatgtgctctactgtcaattttctcatgagctatggtcatttcttgaaactctctttgccactcaatctagagctcgcatactctacctgagattccaactccggtctcttaaaaaaaggatccatgtcgatacacgactacattctcaaaataaaatctcttgcaaatggtctcaaccgtgcaggtcagatcttcaattatgatgaactcattatgcatattcttgggagcctttgaccagagtacgattcagtggtcataaatctcacttccagagaagatcaacttactctctctaacattcaatacatgttatgaagccaagaaatgcgtatagatcaagctaatttttcccctactactgatcttgctaatccctttactaattttgctactagaaataagaaaaaaaaaacactttgttccctctaattctagtaggtcctctaacttccacggttgaggacgcgatcaaggtcgaggaatcaaggacgcattgtttgtcaactctacaacaaacctgggcaccctgtaatcaaatgttactatcgatttaatgccaattttgtccctccaaataattctcccaacacatctcaggggtcttcctctgcctccccacatggtaatacccaacaagccttcctagccaactctggacaacatcctcgactaatgacagcaaccgtgatgtggatagtggagcatcaaaccatataacagataatgtcaacaatcttcacacccatgatgagtacaatggtaagacacgactcacggtaggtaatggacagtctatccctatattccacaatcgaagctctatgattaaaactagtgatgcttccaaacctattaaactaaatactatcttatgtgtgcctcatatttctcataaacttttaagtgtttcccaactcacaaaagataataatgcgtatgataaattctatgctgactcttgtgttttgaaggacatggattcgaagaaggtgcttcataaagtgaaggttagcaatgggctgtatcaactcacaccaccagcaacatgctttgcaagtcacaagttctctggtcttctagctcacgagtcaaccaacaaaagctctagtgttagtccacacttagagtctgtcgagtcttgtttttaagtttctgtcaatgaatcaagtttgtggcatcttaggctaggccatcctttcttaaatgtactcaaacatattttacttaatgaaaagaagcttttaccttctcatctgtacttttgctctagctgtcaactaggcaaggcacatcacaaagcatacccttcaacactaaaagaaaccaaacaatcccttgaataaatacactcagacatttggggaccaattaccaacaataactaggcatggttattatcgttattacatttatttcatagacaattacagccgctacacatggatctttccccttttaaccaaagatgaagccttttccaccttcaagtcctttcaaactcaaactcaaatcaaaaaacaacttaatgccaccattaaaactgttcaaatagattggggaggataacatcgcacctttgagccttatctcaaaaccataggtaccaagtttagacacccatgcccacacactcagcgaaaaaatggcaaggtggaaaggaaacatcgtcacattgtcgaaacaggcttgaccctcttagcccattctagcatgccacaaaaatttcggtgggaagcttttcaaacagaaaccttcctaattaaccaccttgctggaccaattttgtactacgtacaagtgtcctatacaaaaactctttggtctcacagccaactataagtttctcaaagcctttggatgtgattgctacccctaccttcggccatataactctaataaacttcaatttcgatctgctaagtgtgtcttcataggctatagtccaagtcgcaaaggttatctctgtctacatacctttggtcgtctgcacatatagacacaccacttagcccaagtcaatacccccaatggctaccatacctctgaacagggacttcaaaacatgcaaatggtgctttaattgatgatacagctccttcatcatcatcccagcaagagtcacaatcttcaagtcatattgtctgtcataaacatgagacacagtatccaccactccacaaaaattcaacctctacagcctcatattctaatgttccaagacatattaacttgcctttttccctaatacttcttccctcaccctcatcaaaccagcaatctccatccaccactgcaaaattacctaccccatttcctaaaccatctcatcctatgatcaccagagccaaggctgggatacacaagcctcacatatttcacgccttttcctcatcgcctttagccttactgactgatcttgaaccagtaagcgttgcagaagctctttgcttaccaaaatgaaatgcagtcatagacaacgaattctatgccttgccgaaaataagacttggatccttgtcccacgacttcctgacatgagcactgttgagaacaaatggctctttcgtcgcaaaatgaaatttgatggtaccgtacaacatctcaaggcacgccttgtggcaaaaggtttccaacaaaaccaagagttgatttctttgaaactttcaaccccgtagtcaaaagctccaccatccgtgtcaaggtccagtaagatagaacaataaaatagtatatgaacaattataataatcacatttcatacattacacatctgcgtatataattgtgccaccccactgtatatcactgttacgaattttatgtttattacgcaagtgtacgcaatcaagtagtatctcac

SEQ ID NO: 110848 - DNA, 2069 bp, Cannabis sativa
ttattattattttaatatgtaagagataaaaaaaataatttaaatgttttatttatttaatgtgatagttaaatatactaataaaataataaaaatgcataaatgtaaacaaaaagttattgcatttattgtggtgtaaattttacatcatagcaaatgttgtgctaaatttggcacaaaatttgctatgtgtcaaatttatatcactttttggcacactattggagtacactttttgttaaaggagctatattttaactttttaccacttatttacacttatattgaagatgctctaagtaagagcctcatcaatggtaaggtaggtcaggcccacctggatatgtctctccgggaacccttctagttccgtactcacagagccttccgccttcgtctaacctagcccaaaagacacctccagtatcacgagcctaaaggggagagatattgtgttctcagaagaccctttcgttttccctatttatcctcgcctataaataaggaaatttcaaatgtcagatctggccaaaatatcatatcctgatataaggggaaacttcccataacaagtgcgatgtggttatttcagaataattgcccaccattagtggacacggttttgactcgatcaaccaaactccaattcgcctagtcagcagattgtattgttcatgggctaaacttcatgaaaaagcccaaagatattgtttaattgtaaactcctcagtagagggaaaaggggaaaccctaatgtaattctctaactactataaatacccccactaatctcatggattaggggttgaattttcttgcatactttgctcaggcaaatttacgaacattcatcgtatgtatttcttaaagtgtttacaagtaaatagattattcaataaaaccgactcgtggactaaggctgattaacaccccaaccacgtaaaacattacttatctcttgctatattttctctttcgattattattactgcagttcttattattttcattccgtttttgaaaatctcaggaaatattttggtgctttcactgagagttgaaggaagcagtaagaccaccagcaaattacttttaagtaatcatggctctcactagaaacaaatttggtctgcgtttcaccgatccatatgccaaagcaggagatacgagcgatccccaagaggtgactagccgctaggaaaacggtcgagacgaggaccagaaaaatataaaaaaaacctatgtgcatagtgaagcatgtttcgcattcaattttgagacttttatcgacattttagcgacgacatcgcaataaaaacacatttctttaaattaagtataaaataacattatagacattcaaacatatatagcgatattgttttcgacatttatcgatatctgtgtgaatacttacaaaaaaccagtaaaatataaaaaacctaatttactctgtactttaatcaccaagttaggttttggtaaaacaggtccacaccccaccgttctctgtacaccaacatttgatcatcgttaattttctctaaagatcggttcatcatcaagtgttcaatgtattcaatggcgtacattccacaatcaccactacaaaaataaaaataacaattttagcgaaataggctacaacaatacattagtatgggaaattaagatagttgtatggttgttacctattcttgctttgatgaacaacctcacttgtcatgcgttaacatgcattaatctcacttggctactatccccaagtgtgtgagtgagaatatcattgttggtcgtgaaataaccaattgaacacaagagatgtgtaaatagctccttccaaggtgtcataaaagtaccaaaaaggttgtcgtcccaataagagatgtcattgtcctaaactcgaatctgccacaggtcaatgtctacctcaacatccacccaatgttctttagcagttacgttcaaggcaaagtatatgtaaccttggtccttccaacatggtaagaatcgctcaagatgaccgacgtagtattctgtaactgcttgtgtaacaccctaactagcat

SEQ ID NO: 110849 - DNA, 5017 bp, Cannabis sativa
  modified_base (2864)..(2882): a, c, t, g, unknown or other
aattattgaaaaagcactgtagcgtgccttagcattagggcgttacaatgaataactctgaatactgggccctcatatggaattctaactctcaagtgatttttcccaccttcttacttctcaagagtaccttaaccaaagttgtggtcttgtttctgagaaccttatccttcccatcgagaatttgaactaataactactccttataggataagtctggctccagtgctagggtttcataattttaacatggattggatctgactaaccttttcaataatcttgaatggtcttgtaaacttagggcttaactttcccttcttaccgaagtgcttcactcctttcataggtgaaactcgtactaatacgtgatctcatacttgaaactctatgtctctaccattttgatatgtataacttttctgcttgttgtgagaagcaagcatccgggccatgttcttttctataccatcactggtcctatgaggtgttggacctaaatactttctttctcctgtgtcatcctaataatttggagaatgacatttcctactatagaatatctcgtaggtagacatccctattatagcctgataactgttattgaagaagaattctatcaacgacaaagacatactccatgtacccgcaaaatccatcacactggctcgtaacataccctccagtatcttatttgtcctcttggactgtccatctgtcgaaggatggaaagttgtaatgaactttagctttgtacccatggatttttggagactctctcaaaacctagaagtgaactttagatctccatctgatacaatggactctagagccccgttgagatgaactatctccttcacatacaactttgcatattgatccaccgtgttagtagttttcactagtagaaagtgcgctggcttcgtgcaacgatctactataatccatattgagttatacaaacttgtgattctagataatccaaccacaaaatcgatagtgatgtgacactcctacacagccaaaagggttacacttactatatatatggaaatcgctaaagggcaccttattggacaccttaaaagcacttaagaggtggcaacactactacaaaaatagttttcctgatgtttttaaacaatcgtttaaaatattcccattggtttctataaatgtcgcctatacgaccgtcgcaaaacgagcagaataggcgacggttcaaaactgtcaccaatgtggacttcccgacggtttaaaactatcgcctataatagggtataggcgacggtttcaaactgtgccctatagtataggacatgatttaaaaccgtcgctaatagtatagggcccaattttgaatcgccgcgtataccctgttataggcgatggttttaaaccgtgctttatagtattagttacacggtttgaaattgtcgctaatgtggacttcctgactgtttaaaactgtcgcctataaagggtataggcgacggttttaaactgtgtcctatagtataggccacgattttaaatcgtcgcctataccctgttacaggcgacggttttaaaccgtgctttatagtactggttacgtttttaaattataaaaaagattcagcaacaatttttttttcagtcgttagattagaaaaataggaaaaaaatagattttctacaatttttcccctgcattaatttttaaattttttacaaatcggcatagtcacaataattaaactaacggtaatatcatttaaatatatttaaaattctgtatagtcacaataattaaactaacactaatgtcatctaaatatatttaaaaatctataattaagttaacgctaattataatcatgctccaattcaagtaacttttttcgtcactccctttccccagttttgtctgtagttgttgtactcaatctctaattttttccctcattaaccatttttgttatatcgctctgtttgcttctcccacgagtatttttctatgttggttgttcaggatcaacactaccttcttcttccatggatggttgttcaggatcaacactagatccttctggtacggatggaccatcatcaccatcataatctaaccaaggactccactcatcgtccccaccttgttccatgatagaaaatcctacaaaaatttaaaatcatacattagaatatacaaaaatatgcaaattgttacaacatttatttcaaaggatcgacatttaattcaaattgtgcatcgcctatcattttcggaatgtgatcatccttaaagtccaaattaatacccttaaccttgtttgacttagacattctctcgctcggaactctattcttttccccatgatgaacctaaactttataactcttatctattccgttcctaaataaatgctcatttatcctagtaatgtccatacgctccataccacatttaagacaaggacaaagaaccaatttacgatttttggcatacttctgacaaagtccaagaaatggtcaacaccttcactatacttcgctgataatctattcgcactcatctaatttctatccatttcgaaacttcttaaaaaataaaactttattaaattatttgtttgaatatgtgtggtaaataattaattaaattaattaccacacatatattttagtgaattatatgcattttattaaaatttatccttatctagcaaaatttcgacagcataatggctgtaataaaaaattctcgaaaatttaaaacatgaaaaaaataattaataaacacatataacaataataacaaaataacattgacaatacaaatttatccacccatccaaccacagtacatgtattcgcagaacctnnnnnnnnnnnnnnnnnnntttaagatattcaaactcttctaaaatgcatattctacccatccgactgatgtacaattaatcacagaacctacttcactacgaatgaatatctaacatattgaaactccgttaaataaagaattttaaagttttaaagatgatacctttctctaataaagatagctacaattccctactctttaatcaacacaaaaaatgtgaaacctataaaatatttcaaatattaaattaaaagcttactcgaacaacatcacactaatacctaaaaataattaaaattaacaatgcgaaacacttcaattttttctaatattttcaaatattgaataaaaaagtttaaatagattaccaagtccaggaccatgcatgcatgcttcggcctatggaagtaaaaagctcaacacaactttgaaatttaatgtctaggtgacgcacaacacaatcaagtcaaaattatagagctataataatcaagttggatagaatgcccttagggggactcgaccatgcttgaaaattaataaacatgtacaactccaaaagtttcaagatcaagggttggtatttcattatcaaattcaatatttcaagtcaagcattcaagaatttatctcaagcatcaataagtgatcaataaaagcttaaaatcaccaagttttcttacataggtcaaatatcaaataccttgtaaattttgttctcaacataaagtctaaaccccaaatacattgtcaaaaaatcctaccatattaaataaacactattcaaagtccaaataccatataccataagcctaaactattcctacaacaattttaaatccaaacaaagcctaagttcgcaataaaaaactacataagattaaaaaaaatccaaaaaattcttcctatacttttcaaccacaatagaaaatattcaagctcaattaagtttcaataaagttttaatatagttacaaaaaattaaaaaatttcatgctcaatggatgtgcactaatgcaaagaaaatataataagaaatttttaagaaggtttgaagagaatatataaatatataaataaattaataaattaaaatataaataaataaataaatatataatatatagatatataccttgagacggagcccagccgatgaaccccagtcgtcgactgagtgcgacggtggtgattatggagggaggaactccggttgagttggattttgtgggtgtagaggataggtggagctagagacgagatagaggttaggtacaaaatctgtcaatgtgggtttgtcggtgtgggtacgtcaatcggtgtgggttcgtcaaggtttggcaatgggtgtgggttaacgattttatctaagttttgtaaatattagaggttagagatgagagaggcggtctaaaatgactatgctaggtcaactgaaatatggtatatatgtgagaaaaatgattttttaatgggcccctatacccgacagtttaaaaccgttgcctatactatacccaacggttttaaactgtcaggtataagggcctaataaattcatgaattctaattaaaattgttgcctattcctgtaattattgttataaaccgttaggaatactaatttttctcgacggttgtaaacaattattaatttttttagcgacggtcctccaaaaaaaagtatttttaggaccatcgcgaattctggcttttgtagtagtgcaattgtcaaggtcgtctcaagataatgagagacataggtgtaaaaccctaccagtttagccgtgttaacgtaattttttacttaaatgtacagctcgttgctaatcaacgagtttattagaaattgtgaatatttataaactttatttaactatttataattatcaaaataacatacttatattaaattgggatcccgttttacaaaatatttacaaaagctttacagtgcattacacaaaagtttgtcgcccaatgactatacaaaatatgcccaactgtcccaaagatcgtacgctccaagcctaactgccccgacatgtacaatctttatcaactcgctctcacctttgctcatccttagctttgcccttacctacacatgcaaacaatatctatgagtcgacagactcagtaagaaaagca

SEQ ID NO: 110850 - DNA, 2258 bp, Cannabis sativa
tccacgcaagttgatccctaagttgatccctaagttatttgatccctaagttataggatccctaagttatagggaccctaagttatagggattgagctggtgactcacgaagtgcttggttgaattcgctaagtgttgctcattctgcacgcctggtttgcatgtccatcatggacatgctagtgaggcatcctgctcggcacgttcatccgactaggtgctctaagttgatgccaagtgtcaccattctgatgatgccatgtcagagtgccaattttgggataatactttgtaaacagcaacggacaaatagtaaggtccgatgttattggggcattgaagatgagaatgtatttgatgtgagttggcattgtgttgggatagatttttcttttgctggtaaatgctacggtgatttttttaacctttaaggcatcagtttatgttgtctgtgtgggctctttgggtataaggaaattgttgtacaagatcgacaagatccatcctctcattttgtcgatttctcacgatgtgaactcgagactcaatttgaaaaattttgaattactccataaaaaaagaaatctcttgagaaaagaaacgaaacttataattactcttgcgattgcaatttaaaaattaaatctcgttattgcaattctttcaaaatctcccgagtgcaattcttccaaaagctctcgatgccataagccatcgcataaaaacagttaaggcaagtcgacattggaggtttaaaattttcaagctctctctaagttatgatgcatgtaatactatttctatgttcttgatcttctcagacataattttgagttattcggaggaattaagaatattgattatgttttcttttgtaggtctcaattgctcatacttgtaattgtatatatgctttaattcagcagaggcatcatgatgatgaattcaagaaatccgctactaatacactgtaagaagatgatttagaaaggtccctctatgaatagccatgaacgaatgtatggtaggaaaaaataatggcaattcctcgtcaataactactcttgtgggtggaatttgattcttcttaacttggtttctcgaagtaagtgcaacacatcttttgattctagaagatagttgtatttatggtttcccaaaaggctctgtttcgagttctccaaacaagtgatcacgactttcttcatgagccctatagatcaagcactctttcactattataacatcaaagagatataatcgatctctggtatgcagcctccacacaactaaccacactataaactcttttttggaaggctatacatgtttcatattctatcatgccacttctcctcatgctaagtaaaaagtaatttgaagctcacatattttatattgtaggacatatgaatcaaatctatttccctataatgattcttgagattttatttttatttgtagacagtgatttgtagaagagattgctccacacgcatttgagaagctaatgaaatatatgtcagtaactagtaactaaatatgattaattgtagctggtcatggttattaagctagactgaggttgactttatgttggtagttatactattcatatattttttggtgttgttgatttcaatgttgttttttgggtcggcacaacacttaattttatattctcttaattaattaaacacttactttttgaatatatttttcagtatcaatagaataaaattcctcaactttcacataaacttgtcctctcttatttaaattagctaatagcatatcaacatgttgaagaaacattatatttgataataatagtatattaattgttatgtttataattaattatagtatgcttcaacttttaaagctaatagttatcaaagaaattgaaacacattctattttttatttatgaggttagtaatctccttattgtgccataacattgttatgaattttaatggctttgaaaaccaattattcatatgagactctctaaatggttaagtgattgcacaatcctcaatgttctttcctttcaatgaatcaaagaataaatgttcccaaaccattctatcatttatctcaataactttatttatttaaataactttatgcggtaaatttttttcaaattgcatatattatagtatatatatatataaggatatgattttgttccgttattgtactttcacagattgtaatccgtgatgtacggcagccgtcagatgagggag

SEQ ID NO: 110851 - DNA, 15077 bp, Cannabis sativa
ctccgccgttgagggaccgggacagggatagggactataagcggcgccggagccctagctctcctccgtaccgtgagcggcgatattctccccagtcttttaagcggtccaggcgcgttagtcctcgcgggggttatggacctgatgataggttagagacattcattcattctcgctctactgatttcattatttttgtttggttcattgattttgaaattgatttattttgttaagaaactgtaattttgagaaataatattattcatgtgaattaagattttaagagtacgaaagatatgtcagaggtttgttatcgtcttagaattacaagtattgccaattcgtaagtaaaagatattaagtatcaaacacccatcgagccaccacctccaatacttgactctgttccataagcactctgctaaactatcctccaaatcattgaaaactcgatggttattttccatttacggaaaccaccatagccaaaaccaaggcgaaccaaactccttacggaacctggaccaaacctatattgctttagtgcaattcaggaggcgactgactcaaagactcatgggtcaaaaaaagattcgaattggattgagagaagtttatgaatagagtgaaaatgaaaaagaaatattgtaaatactctccaaaatcaacagctagctgaaaatcttaacaattggttgaattagaattcaacaatcttgaaaacgcaaactacacttagacacagttaattctctatgtaaagatcgttaagctcagaagtttccagatttgaagactcctatcgttttgtgccttccaaaagtctcaacatcataattcattttgagacctgctccattcacccaaatttctaatgaaacttgaatttcatgagtaggagccgccactgcttacaaagctctttgttgatgtcaaagaatgaatactcatactgtgagaattagacaaattttgcgacactggaaaacttaatgctaaggatactttttgtaatcacaaatgctccaaaaatctgttcttattcccttccttgcctttagcttttaaaagtttgaagaatcctcataatgccctgcaatgaactttcaaggatatttttatgttacttgtccagcctctaaatcctacccattagacttcatgccacgtttacttttaatgattttagaccagagtgcttgttctcttattccaaagggaatcttgaacctatgtgcaaatttgatagatggttttagtaggatctttaaatgagtaatcatatgtgcattttcaatgattttggacaagtggccttagttcttatcgaattggactctctttcagttatattgtggatgatgctattttaagtgctttccatttgtttaaaatctatgaaacttaagacatgtttgatagttctattttacaacagctggatgtactggatagttttgataacacttacagctagaaggcaaagtttgggctcacaagctcttctctcttcttttcctttgcatctcatgctttagacttcttggtttaagtacttgcttttgcttgagtggtgacaattgccaaatctttctataagaggcaatatctgaaattgaggttttcctattttgttcgtatcattacatttttaaatgttggaattagatttcttttgttcccacccttatcatgtactttgatgcaatgctcttcttgtataatttgaatgttgagaatcttgattgatcttgttacgttcatgctacaaattattgggatgatgttttatttgttaatatgaaaagtatcttatggatgagttttttgactgaatatggactttcaaatctacactgttttgtgagttatttttttgttttctttttacggggttcaggtttggatatgataacaacggtggatatgagcgtggggtgggaggaagatcaggttatgctgatgagaagtctcatggtcgatttaatcgttcaatgggtggctatcatcatgggccgactggtatgttatactggtgtgtttatccacgagattttctgacttttaattagggcttagtggtgactgtgatgtagttttgcttatcaaggcaggaataagctttgtgaaatcacatttgcttctattttataataagtagttagccaacagacatgatattttggtatatagtgttcactaagttcagtattgtttgtcttttattcaacattgtgagatgcaaaagctctgattctatatacctacttgtaacttgttgtcacttgtcacctctctcatatacatacatagacagacatacatgcactagtttgtgtacatgcacctgtgctttgtcttgatctttcaaatttatgctatcatgaacataacaactggactgcgttgacattacattttctggcataccttctatttggcgtcaaatgtttctttcttattactgcttttacttctatgctatgaaattgatcaatatgcgcgtataatccttgggattatatgttgacagatgctggatttaatcgagggggttatgctgattcatcaaacagagggaatacacaaaggttagcttagctagtcttgtatttttgttcaaagttcaagtacactatggttaccttgatttaagaaggattcttgaaattgaaagcgttcaattcttttggaatatacttagttatatttattcttaattgaaatatcatagactaagttaattgttactctgccatgtatggaattaatgcctgaattctaatgtgaccctaatgtttatatcttggtggggaaattgcacgtttgtctaggcatgcaattgcttgatgaatttgaaaaaaaaaaattgctcatcttttgttgttatgccactagcatgtattcttatgtttttcttcttcttttttgaaagaaagtgtattgtatgcttaatatttgaaatggagtcaatattttcaggaggctgctcgatgtcctggaactttgtcgacattattattattgttattgttgttattattattaccatctctgcgtgctgtgtgttcactgggcatttttttttttttgctaagatgttcactgtcctatataaatgtcattacattacttgttcatagattgaaaatagaaatgttctattttgtcattacattggggtgaggaacgggagatatataaaggtcgtggtcatttggttatagccaatgactaaagctcagcaatgatgttcaattttcttattatttctgggctaccttacttaaatcatacaacacaaattttcagagaggggttgatgtcgtataaacagttcattcaggaacttgaagatgatgtattaccatctgaagctgagcgcaggtatgtccctttacttgaaatcttgatagaatggatgtttattttcactgtgaaatgatgtattcaaataatcatacagatatcaggaatatagatctgagtacatttccactcagaagcggactttctttactgctcataagggcgaggagtggtgcgtaatctatattttcattggttcacattgtttctttttgcattgagatggtgtacacgtgttctttttagttgccctttcattttccttttgttaattgttcttttacttatcttctaaactgacttgtgtgttgataaaggttgaaaaacaagtatcatcctactaatttagttggagtcatcgaaaggttagtctcaaacaaaaaagtgaaataattagtaaaaatctagctatcattactctttaagttgctccttttgttacttgtgtataaaacaggagaaatgaacatgcacggcaggtggcaaaggatcttttgcttgatttgcagagtggaacattggacttgtatgctctctcgcaaattctctctgtctccccctattttgtttagcatagactgtaatgtaatgatcacatttgttatataggaatcctggcgtaacggcctcatcatcaagcaaattaggacaagcaagcgaaccaaattctgacgatgaagcagcagacgctggtgggaaacgaaagcaacatggtaggggtagagctgatgacattgatttttcagctgctcccaaggcccacgcaatcagttctgaacctagacgaatagatgcagatattaatcaagcccttgctctcctacgtaagcttgatgatgaaaaaggcatcaaagaccatattttaaaaaatgttgactatgatagtgagaaacctcacggtggttcaggtcaaatagttattatacgtggtttaacatccgttaaaggactagaaggaactgagctactcgacacactaattacatatctctggcgtgttcatgggttagattattatggcatggttgaaagtaatgaaccaaaaggttttaggcatgtgagacctgatggcaagaatcatggagaaacaaatgaatccggggctgagtgggaaaagaaacttgactcattttgggaagaaaggttacaaggtcaggatttcttggaagtgatgtctgccaaggagaagatagaagcggctgcaaatgaagttttagatccatatgtaagaaaaataagggatgaaaagtatggatggaagtatggctgtggagctaagagctgtacaaaacttttccatgctgctgagtttgttcataaacatctgaagctgaaacatccagaggtcgtgatggagcttacttccaaaatgcgtgatgatctatattttcagaactacatgaagtaagtattattttttgcttctttgatcattacttttgtttttgtggaattcatttgtgatttagttgctaccttcatatatttgcagtgatccggatgctcctggtggaaaacctgtcatgcagcaaacttttcaggtaatttgtattcttttatgctatctgttctaagctgggaataaataaaggataataaatttatactctgaaattcatttttgaagctgataataacataatctctgcagctctttatttctcgtcataagttgaaaatgatttctgtctccagtgtcttactttatcccacagagtttcatgagaatcctcaacatcttcaaaaagccttctgctttgccctgaccaaatcatcttacaaacaaatggatatctatctcttgtgcttcaatacacacacatacatatatatatatatctgtattttctttttttgaacaatggcgatttcattactgcttgggttgtgctacaagtatttactaaagcattttgtcaaaaaaaagttatttccttaaacctaattacttactgagtactgaccctcgtttgtgtactttttaccattacagaaggacagacctcagaagcgtaggcttggtatagaaagccgattaaaagatgatcgtcacctgagaacggttgatggtgttaatgatggagagcggtttaataattctgagagttctccaagccaacagtcgaaagctggtggcgtagaaatggggaatcaagacgaatccatgtatgatgcatatgctggacaagggatgggtgctccttttgcctcagatatgccttctgtattgatgcctgtacctggtgctgggttggttaccatccatcaattttatttttttcaaatcttgttcatgttacatagtgaatggcaatgtctaatttttctttttaattattataggcctttgggaccctttgttcctgccccacctgaagttgcaatgcagatgctaagggaccagccttctgtgtatgatgccagtggtagacaaatgagatctggtgctcaaattggaggaccgacaccgattcttactgttcctcctttcaggcaggatcctcgacaaatgcgaaggtacgctttttgttaaataggaaaaaaaaaaggtccaattgtattgttactgatctcaacaagtattattatgcaatataatcattttctggtgcagttatcaagatcttgatgcccctgatgatgaggtcactgtaatcgactaccgaagcttgtaagattgtgattaatcaattgcaaattctatttagtaggcttctttccccaaaggaagtttgatctgcataaaatgaaccgtagacccttaatcagatttcggtattcggtttcgcattctttttcgatttttcctatcaaggggacataagtggatggcacatgtaccatattgtaggatggtagttgtcttaacgattccttataggggtctctgatgtcatgatcttctgattctaggattgtcttaaccgaagtctcatgatttttaattgtaattgtaaactttctaaattgtaagtataaactatggatgaaactatgctggttattctttcattgaaaatgtctagaatgtgattgtatgctactcaagtctttttacttttcaattttattcatttggaattaaacattttacatggggcattttcacaatattttccaacgcaaaagttgagagtataattcgagagaaaaataagccactttgaattgagtaatgatattcgcacaccttaacaccaaaatactatacactttagctatttttaaatagtccaaattttacaattgtactacaaggtacaaaggataaaattaaatttattttaataaaaaagtgtaaaagaatcaacaaaaatatattctgtaataaatttaacacgagttttattatatgtcaaatttattatattatacactaccaatttagagttaaattttataaacaatttaattagttgaaaatatttgtcacccaagaagttcagtgtaaaaaaaatgtgcacatatcattcctcttttagatttcctcgagtaacatcctaactactaatacttataaatgaactctttttattcatttcataaaaacatttgttgtttattgcagaagtggtataataaaaggttaaagttgttgattgatgaaagcctataacgggtttttcaccaaaaaaaaaaaagtgtatttccatgttaattttagttggataccatcaaacaatttcacatgaatatttctcactagttgatatatcaaagcctcacagtcacagctgatttaacattgctggagagcttgaaacattaaatagcaagtggaaataattctgtcacaaagatatataataatatcattaataaataaataaaaacatttgcatcaccaaacaagagtacaaagacctctaatctcggaagctttagatacaaattatcagccaaagagctcataaagaaattttcacaattcacaggttttacatttacaaataagtttccagcacatagttacatggaaacgctgtatattaggtgagttagagaaatgaagtgctaaccctaataagcttaaacctaacgaaacgtgatccaaggaaatgacaaaaatatctaattaaggctaaattgttgcaacttgttaaataaatattacaattacacatatttggttataaactgggaccaaccttgaataattctactgctagaatcttttcagacaacgagaattggcagccatgagtcagtaatttgtgttattagcttggcaaggagcgaagcatcgaggcacaattatctctataaagtttgttcacagaataaaactctgcaatggacatcaatttattaataaattacagcataaaaccatttaatagaaagccaaaagaaaaggttcaattaaacttggattttctagcatcgttaacgaaaaatatgatgcataaggatcagaaagtacatgaaatatatgctcacaggtttcatagctgctcacggatgtaagccattgatctcaacatggaacctagtgtatctctggatacttgaaattttacctctgtttcccctgttgttgtctttgtgtcttggagctaagataagatcaaagcaaaaatatgattgctcagttcaatttaattcaaaattgaaaattgggtacataatcatatgctactagataatttttggaatagataaaaaaatgttcatgtatgtttgaaacatcagttaaaatattctatagagaggtaaagagaaatgtcttggtagcattatggcttttcggtgttaatgagtttaaaggaaatttattttctgcttgctttgatgagtaggatttgttgttgtaattaagaagacaccctggcctccattttgtactgtactcttaattacaaaccatataaagagtacagtacaaaatggaggcacagcatgataacaaaaggcctttttatactttaattccagattttccatggatgcttctgcatactcaacttgattctagctataagatctgtcatattgcctattgaaccccatcaaaatagcccaccacctggtaatcttctcactaaatgacaactcacaaatcaacgttttatcaaagccaatcttgtaaacctttttgtatttttatccacaatatctaatataactttgtttcttatctaaaaaaaactaaacttccgctatctctattttcttatatgtgataagataaataatatacgaaagataccttcagattgatgacagcaactctgttggcaggcgttgagagttgctgactgatataggccattgatctcaacataggctccagtgtgactcgtgttagcctaaattgcacttctgtctctcctgaaggagtcttgccataatcttgaagctacatcaaaggtaacaaaataaactacaacaacatgatggaaataagaataatagatgtaggacagggtgagaaagtaacaaagaacagaacagcatatagaaagagagaaatttagcaagactatgcctgtagatatgcaaacaaaaatcctaatcaactagaaactaattctaaaactttggagcataataaaaatctaattaaatctttctaaactatcacagttaatgataaatatgaattttaattatcttgttctgcattagtaaccaattccagctgttacatatgatacccaacataattcgaacagtaggagtaaattccaaatggtacaatagataaatattaaagaaagaaatgggttaacaaagatgaagactcttaccttcaagtttatcacggcaactttgctatcttgagttgaattactgttctctataacccaagtcatcgacttaaaacaggtaagaacaacctaaatcaattaaaacaaaagtaaaatcaaacacataaattattaaatactcgtggaaaattcattttgatggagcttctacaaatcttcaagtcgtgaagtgaaaatgcaaaataatcaaacaaattttgcgttgtcttacagtgttatcagaagtgccaccgtcccggtgaattgacacagggcccatggagctgaaatcagaaatgggaataccagcatcattaagattaaatcgatgtggcattgcttcttgccagggccacaatgttgaaaccatgtcggcagccggcaaatgcactttcctattactgtcttcctgactaattccacttccctgagaagcagttgtaatttcagcaacatttttcttcacagcagaaactttttttgaaccttctcgtaaagcactcattgctgcaatgtaagtctctacagcaactgctccttcctgtgcatatttaattgcttcccgacatagattgttaaaacgcaaggtaagagactcaattccttgcatatcttcagttgattcgtcctgtccaagtgcagctttggcatttcttgtccaacgcttcaatatataatgtgatggcagggtaagaacattagtaacagtgaagacagttaatatatgtctacacaaaatgccagaatactcaaacatctgacaactacaatttgctttcatttctgagatatttaaactgactatatatgccttgtcatcatgttcatattttgcaacacggaatttactgaccactccatcaccctcaatcttatttgcagtgtacacaaaagtttcaactaattcctcttgaaacttagcaaaaactttttttgtataaaggttggctgcctgttgctccattggtgatggtgttttcagcactggtgtagtgcaaattgtatcataatctgcttctatttctttttctaatgaatgctcgagagcaatttcatactgcttaaagaataatgggatagtgatctgttgattgacataaccatcaaaaaaagaactaacaccttggcttgaggaaagtgcagcaaaaaaagtgcctcggaaataaactggtgcccattgctttctagcattgtacactgcctgcagccattcatttctctgaagttcatacctttccaggagagatgcccacgaagattcaaaatcctcaatagtttctgaaaagttgatgcagctgtacagctctccatagaaggaaggctgggcaagatatatatgagccaatctttcctgaccttctctcaagatgtgccatttgcaaatacagtgacgtgtttctgaaaatacctgagaaacagcaacctgtatagccctatcttggtctgttgttatagagacagggggtcggttattcatggcagaaagccatgtcttaaataaccaagtaaacgacgactccgactcatctagaagtaatgcacaaccaaacaataccatttgaccatggttgttaacgccagtgaaaggagcaaacgggacctggtattgatttggccggtacattgtgtcgaatataacagagtcgccaaagtaattataagctgcccttgatcgtgcatcagcccaaaacacattagtcatgcggttgtcatcatctagctgtattgcatagaagaagcctgggttttcagcttgcatttttttaaagtaatttaaaaggttctgagcatctcttccgagagttctctttcggctagaaggcctaatatagtttatagggccagcatttcttgatgggcgatttatttccacaggtgaaacactccgaactacacgattggattcatgagaaacattattaccatctgctgaaacaaaaatatcactaggaagatctaatgtatcagccacattctttgttgcaccagcaaaatgcctacggggtcgaaggtaatggaccttaccaggactagccatagaatggttgtggtcctcaataaactttgtgactacccaactgtcctggtcctttctttccaaccttagcatcgcattgcaactttcaacattcttccttttaaatacctctctggaacatgcaaactcccaagttacaattggtccatccggcttactacgactgaattgaccaacatggatgctaaaacctacacgtctgccatatgcatcataaaatgttttggcagcatcttctgaatcaaactccatgccaacatgaggtttagcattgtcatcatcaacgtgaacactttgttccctcccggtcaaacactcatttgtattttgcttttcgcccttattcaattcagtgctttccccagcatgatgctccctacgttccctctcagcttcagcatccatgccagattagttaactttccactgtatggtctccctattggttgactacaaggaattccgcacagttatcccagctgtaacagaggccatcgacctctataaacaagaatgtcaggtaagcaaaattaaattccaagaatgaaatatccatacatcgtgataactgattcaccaaaaccacacgagtatgcacttaattgtcattataattctattcatgaaaaggaaaaaaatactagcaaacaactttatcgtgctataatatgcaccataagaaagactgaatgccttaacagatttcaaaatatctcatacctccaaacttcaaaaggcaaatgtgaatggcattacatacgagcaaacttaacagaataataatgaggtgcccaaatgctttaaaacttcaaatattacttattccataaaaacccaaagagtttagataattaatgtatcaattttggaaagaattcaaacacctcctctgtaatgctcccatcaaactaggaaacgccatttgttgtataaatttatcaaagcatccattgcagtaagtttccagttaggatccaacaaagaaaacaacaataaccgttccattattggatttcaaagggaaacaatcgctgtattaaaatatggagcttaatataacaaaattttaaaaagaaaatgttatcacctgattccacaaaccaaattcactggtcgaaaatgtaaaagtgttggccagcttttttctaatcgtcttctccggcaaagctcttgagctttattagggttttcagttccgttggaagagctgccttcaatttcatttcagtttgtttaagtttttgtttttatttttatttaagggaaattctaccgtgtggccacagaaaatatggcccaccgtaacagagtttatttatgattgttcgattaaaatccaacgatccacaacagatgaactctttttttttttctttctaaaatattaaataaaaaaatctatacataattagctcatattatatatttatttgaaataaaatataaaattaattaaataattatttgaaaaaaatgaggataaaatattaaaattatgctaatctatttgcgtgaatgttagagcactcattgttttaaaataaatttgttttaaatatttaaaaaaaatcaaattaaaaacactacatcaaatgctttagatttttttcaatttaaaaattctttaacatttgtgctctatatttatagaatattattcattgctttaaatgtattttattaattgtttttaattttaataatttttttatataaagatatatttatattatatatttgaaataaataaaatatattaaaatttgaagaaaaaaatgggtaatatattttaaaaaattttatatatggtgtaatgtaaaagtttgatttagaataaagaaaatgagattttaataatattttttaaataaagaatagagaaactaatgagaatgaaaaatttaaaacatgagaaaagctttcccttattttctcaaagtatgccactacatttcatcataaattaaaagaggattctaccattaaataaataataaatattttctatgaaatgtaatttagtctaatatttaaaacagtctaattacataatctaattatataaacaaaataaaataatgttgattatgttttccgtctattcaataaacaacgtaacataatcatgattttgattatttaatattttatttatttttaaaacacttatttatttattttgatttgactacattttagtaaatgtgacataatagtggtgttgatattaatagttcggagactaacgagaatactagtgagggtcggggtaagaagtctcgatctcaagtgagctcctaaaatggaggagtgaggattttgcctactcaggatgagggggtaactctggtttgacttacccttctctgccttgttctgagaatagaggtcaaggtccaaggattttgctaatggtgttaatgggttgactacagaattgactcatgttatttgtgcttctcaaggtggtgatgtgaattcgtttatctctgatgcttgagtccaacgactttccagtgttgataatgttattttaaagaatggaattgttgtgcacagtttttctttgaccgacgacgcagaccttatcatttcccccaacgccccatgaagctcctctcttagaattgtcaggaattggggaatcacgtgcaaagaaagctctttggagtcttgtttttgtgcaggatctggatgtattcttccttatgaaagcaaagttggactgaaggcgtatgaccaatgtgtggagacagttgggttttgttagtgcttcagtcataagttatgtgggtttggttggtggtattttcttatgttggaaggtagatcttcaagttgacgttctattgacttctctttcaactattaaagtgtggttcctgagctcttgaattatcttgattggatctgttattgtgtttatgcacctcatgtgcatggagagagtactgagcttctggagaatctttttattaaggtgggtgcatttaatgatctttggatgatttttggtaatcttaattcgttgttagatcaacaagaaaagttcgagagtaattttttttcttctagtgatagtaaagatctttaggattttttggcagttactggaggcgtcaaccttgggtgtattggaatttttttaaacctggtccaatagttaggatatggttttattaagataagactaaatcgatcttgtaattggggatcctaaatggattcctaacttcaataagacttgggttgaatctttagctataaaggacttttcgctttttggatgcttagacacacgatttgggttgcaggaaagtggttcaacaagtgtaggctatttatgttaagggtgtcaatagtttccaattagttaagaggttgggtaatacgagaagaagtcttgccaaatggaataaagcttgcttgaaattttgtagagaaacaattggtcttcgtaatcaacttttggtggatgtccaaaatagaacccgtctaaagataatttgaagattgaggcagacattcttcttaaattataagaggtggagaagaggaaatcatagatttggcgtcagaaatcttgtgaattatggcttcgagatggggataaaaatacaaagttctttcatgcctcaactatcattcgtagaaagacacaattttattggctcggtgtcggataatggattgaactgggtaagtggtagggatgagatggggctttatttatggaatcgatccatggatgtcttctcttctacatcaccttgtctttatcaggagatgttggatcttatgagccctgatgtgttggaagctgagaacactactagaaaaagtacaattctcgtcggttttaaagtgtcatttaaagaatttgcgtcggtttaaaaaaaccgacgtatataccgtag

SEQ ID NO: 110852 - DNA, 2251 bp, Cannabis sativa
  modified_base (50)..(50): a, c, t, g, unknown or other
  modified_base (124)..(133): a, c, t, g, unknown or other
atatgttctggacttaatagaattcatacattaaacataatcatgaaatnaatcatgtgaaccatggaacataaaggcaatttctaactttatattaactagtaaatctaattatattgaaatnnnnnnnnnntagggcacaaaatccaacacttttctcgtacgcgcgcattaccttagaagctcatcgagtttcctcggcctcacatagatgcttcctgcacgcgactctctttcttgggctgctagccacgcgtgcgtcccttgcttgtcttctgggagcttcagacaaggtgaccagtcaccagtaagttcaaattctagtttttatgtgatttattaattaaaattttgttttttaatctaattattacctaaaaatttttaaaattagttgatttttaattttcaacctaaatatcagttatgaactaataatattttattttttaatagattgttattaattttagaaattttagaagtttaaaattaaatgttattatttctaattggttttaagttatgatttgaatttataatttgttaatttattagttttatttatcatttaatttataaaattagatattttcataattttttttttttttttttgaaaatagatattttcataattgatatatgttttaattagaataatatattataactatcctatatatgctaattaaatattcataaaatttgcaattaatctagatattttatagatattataaccatagctattcaaatttaaaatttaaatttttaattattattttattattttaataataagttaagaaaaataatagtggaaatatcttagtttggatattttatcatttttgacatattagacatttaaaatttaaaaatacatctaaaaatacctagatattcagtagaaatttgaagatgcttaaaattaagaaatgtagggttttaaaacactaaattttatggtcccactattttatcaaattttagttaaaatgataatatctaaatctaaactatctaattttttaaatttaatttattttattattttaatttattaaattataatgggaaatattttaatttttaaaatttacgtattttattattttatcttattgattatttcatttattaaaaattattaaaataacctgggcatttgaaagttagttgaacatcagttttgaattgagatattttaggatgtggttagattcaacattttaatattatctagacaacctaatttgaaattaaaattataatatttattttttttaaaaaaaaaatatttcaaccatcattaatacacgtgttttgttatatttttgtttattttattttaaataaattgatttattggtaaaatataaattaattatggttaacttgttaatgggtcaaagatctaaattaaccatagttaacttgttaatagattttgccaattaaattaataatttcgataaaatctattatttaattgattcaaatggctataattaacttattaatggatgcgataattagaattaattgttaataaatcaattaaataatttataataaaggtataattttaatatttgtttcatctttgtcataaacttagaaatatgatagggcccatcgaaatcaacttgttatatgaactatatgtttgcttttggcatagatgcatatagtggccaatttattttagatatttaaattgctaggttgctagataaaataatcaaattaatgatagattttattttggccaaattaatattggacacattcaatgaataacaattatttaaataaaggttaaattcatcttccactacaagaaagaagacttttgagggcgtaaaattctaccgacataactagggacaacacactggaaaactttttctgacgcataaatgtgcccaaaaaacttacccacataactcagttggtaaaacaatttttatcggcgtaataaccaaatgcgctggaaaattagattgtacacgaagtttatgtgccagcaaaaattcaaacacaggtgttaatagatggctaaattcgcccactggcaggtaaaatgacttttaccagtgcataatattttttaaattggtgggtataaattacttacctgccatattttattgatggttaattgtaggggtgtgtagaaagtcatccaatccaatctcaaccgaccgatccaatcccaatcgatccaatagaatcaaatatccaa

SEQ ID NO: 110853 - DNA, 2542 bp, Cannabis sativa
tgtttatttcattgttttaaaaattcatattaggatgttaatgaaacatacttgttagtatatctagattctggtaaaataattccaacacatgcatcaaccattctagacatacacatacatgtttaatttttttgtacagccgtaaaattgtacttacttttgcctggtctacgaggttttttgtgatacttgtttctaggaacatcttttagcatagcaatatatttaggctttgacatttgcaatgtatagttgcttgttaagggttttttttgaagtgtgtggttccaacggccatcactccaactttttgacatttatggactttctatccctctactagcttaggaggtactcaagaagtacctacttccttttgttaggagagataatcttgatcctttttaaaaatttctcgagacaactaatgctattgaaaacatgaatggtttcccatggagctccaagataaccttattttcacaagactttgatattttttcaggcgctagggccttttttttatctaagaaggtcggtttcacacgctatggattttggatggtattttggtaacgataataccaaaatctattggagctcaagtgaagccttaatagttttaatctttttatatgaacattcttataaaagtttctgagaaggaattcaagcaagtatctcccaattgagtgtatatattaagcttcaagaaggaattcaagcagttgttcctttgcttaaggaactttgttgaaaacggatcctattttaagcaaagaatcatcaaaaaataaattgaacataatgcgacacaccgtacgttttttggggcacaatcaacttggcacaatcaactaggtatgataccctcaaagtgagctaagaagtgtggatgtctccaccttactggtcacttgtttaaaacacaacttgtggcctaaaaacataatgtaaaatgttagcataaaatacttttgttctcattggatgatgcatggaggcaatttgtccagaagttaattacataaactgtttacaaaaacactccaaattaaatcactgcccggtgtgtatcgcctattggtaatatcggcataaatgatccgcattctaggggttggggaccctcgatccatccatcaattttagacaaaagtaccttgtcccaccttctcaagtatcccttaggggccttcctagtttgggctaagcacccccactcctcgttcctaggaagctaggaagactcttcgcagtacaagattgccaatatcgaaggtacgacttttcacctttgagttgaaatgccaggcgatctttccttggtacattttgagctagacctgggagttatcccagacctcgtctattaagtctagtgactcctgaagcagagagtgtcaacgggaagggtcgtaggtgtcttactgattggatgggattgtagtctctacttggattactgcttcgcatccataggccattgcatatggcgtatgccccgtcatagttcttttggtcattctataggcccatagaacttgagggagttcctccgaccaatgggctttacaagcttgcagcttcttcttcaacgtggtcttcagaattttgttgacagcttccacttgtccattagcttgtggtcgagctatagtagagaagcctttcataatttcgtgctggacacagaagttggtgaaatgctcactattaaactgcttcccattctctgacagaatcttataggggagtgcgtatcagtaaatgatatttttgataacaaaatccagcgccttcttgaaggtaaccgtattcataggttcagccgcaacccacatggtgaagtagtcaacaacgacaatggcgtatttgagtccacctttactggtggggagggattctactaatcaatgcccccaattgtaaaaggccaagggattctcattagggtgatttctgttggtggtgcgcgcaagacattagtgaatcgatcacacttcctcacgtattccatgcaatccttcttcatggtgggccagaagtacccttgccttaggattttcttggaaatgctaggtccagaagtgtgatctccgtagaaaacttcatggacctcatgccttactacgctaatttttgtcttagtgatgcacctctaatatggcatagaaaaccccctgcgatatagcttctcgtccattatcacatagcgaggagcttggtattggactctaacaccctaacaacagctcgttgctaatcaacgaggttattgaaactcgtgaataattaaaatttgcttagctaattagaaacataaaggaatacatccattaaattccgagatcccgttacaaattaaatttacaaaattttactagtttaatacaaaagttttgtcgcctagcgattgtcagcaaaagccttgatgtcccctaagattgtacactcaggccgaaccgccctaacatgtacaatcttcatatgctcgttctcacggctccacagctttagccttgcctttacctacaca

SEQ ID NO: 110854 - DNA, 5147 bp, Cannabis sativa
attaaaaacaacattttgatgttttctattttctagttttttaaaattcaatttttaaaaaatagtttttaaaattttttgccaaacgactccttatagtttttaaactgtaaagccaaacagcctcttgaattttcccaaattgcaagctgatttctctcctgtagatgtcgatcacattctgtcaatttctctttctcttcacgcttctcaggacgattgggtttggcatcacacaactgctgaatacactatgaaatctggttaccatctagcttgttcgattgctaaggagtcaaatgaatcttcttctcactcacatgaacaatggtggagatcatattggagtttgaattttccttcaaaggatttttggttggagagtgattcgaaattcaataccagttgctgcagcattattcaaatgaaagaccatcacttcgatagaccatcacttctgcagcatgtagtttatgtcaaaatgcctgggatgtttagctgcaaacatgctagatcaatttggcttcaaacgaatttaaccattgattttcgatctactgctgtctctaatccaactgatttcttgtttcatctctcaaagttcataccaaatctaagttggaaacgattatttgcattatgtggtccatttggtatgataagaacaatgttattcatgggtaaaaagatcagaatccaacataaatctactcaaaagcagtggcttacctgcataatttccaaaacctgactggttcaactctgcataaaagcgattcaaatgttgctggtgtgaggggtaaacatggcactggtgtgacacataacaatcaaacatctgaagttaattgctcccccattgctactggctttattcttccacatgaatatgctacacttcaaccaagatctacaactagtactttccttactggtgcaacatccactacttctacatcgacaatgaggtaaatgatttggcagcctcctccacataattaccttaaattaaatattgatgcgacttttgattcttcaaacaataaaattggattaggttctattgttcgagattcttcagcaaatgtaattgttgcaatgtcaaaatcagctctttgttgttatagtcctcaagaaatggagactaaggcaatgttctatccgtccaaagagaaactcattctcaatctcaatctgtatttattcaaagtggttttgtattcgtatatgggcttttacctttagctgggtcattaatatattaatagaatcaacttaatattcaatttttttagttaatggtcggcaaatggcgcatgatctaaactttaattttattgaaacaaattcattattactggctaattgcggttaatagtccatcatcttttaggtcatattttaatgatttagtcatagatattgaacaacatttaaacaaatcttcctcaagtttgtgttgtcatattaaacaaaccgctaatcaagcagctcatgaattaacaaaacaagcttttattgcaaaacaagctcttattgcaggttaatatttgaatctagataaaattccctctactattctctcgaatgttgtaaatgactcctaatttataataaccaacttttctaaacaaaagaaaaatcacctaattatgtgggtatgacatcatcagacaacattactacaataacccatttacaattcttatcatttcattttctaatatctgcaattttttattaaaaaaaaacctcaattctaaaaatattagtccgccactatcaattcaattcgatgctaagtactttctgatttagctaattatgtgagtatcacatttactataacctaaaattataagtttgtaaacggcattcttctttaattttgtcaatataaaatccgttttaagaaaataaaacgaaattaaaaaaaaaattataattttacaaaacatcgttaaaaattagcattaacattacaccacttacactatttagcatttttattttattatatctgaaatttttcagaataaaaaaaaaaactctctttcattatcaattaaattgacgagggaattggctatcgtttaattctcactttctaaagttgggttcaccacatattcacaattttgtgatcttgacaaactaataggtaaaataacttaaactcaaccatattaatttttaattatgataaacctcacataaaactcttccattttcagtaatgttatcaacaaaaaataagtgtaagaaaagacataaaaatataaggaagcttcagttctccaaggtgaaaaaacttcaaagattattatctcagttaaaaataactcatttattagatgagaatcatcacaagcttcacttgtattaaaatataaacaattttttttaaaaaaaaaaaatagattattagtcgtcagataggagcgaaagactaaaaagtaacattgtaatcacagaatttcatctgaactatgcataaaaaatcatcatccgaccaatttacaaaataatcaaatttaaaaacaaggtctcataagattgattatcaacatgtaaaattcggacatatgcttgtcaaaatttagtatttaatcatcgaccatcaaaatacaattggactcagaatatgggtggtgatataacagaatggtcggcaaggacttgttaaagcccattacgacgaacgagacctaatcacaatcgtcactgtccaataaaacattcaaaatcaaaattaaacaacaaagagatttaagtaagaggcatcagttctccaaggtgttagcatcaagcttaaatcagacgcaaattacccatttacaaatcaattttcatcacatgacctcaaacaaatcaattgaaaagcatttttaaagagaaaagaggaatttgaagaagaagagagaaagcgatcagagcctgtcgagattcataataacatcaagactgttaccagtatcagcggattgacagattaatgaatttgaatcatcacctcgccttcaatatctccgtaaataataataataattaaaaaaaagaatggaaaaatttcaaaagagaaagatgaatccaagtatgatacagctcagaacttcttagaggtttgtgtagccgtcatagacatgttaatgcctcaagcacaggtgtttcttcctcacggctgctactagaccaaatagaactgcaactagggtttagaaaagagaggtttagagagagagtggatgatatgatacgatatgaatatgtgaaaagagcgtatttataagagaaaagatcaacctgaggatgatgatgatacaaaaccctaattaagagggcctgggttgggttgggctaaaattgggataaataagcccaatatacaaataaagtcggtacttttctaaaatgtgttttgaaaatgggatatgttttagggattatttaaaaaaatacacaaaaacaataacaaaaaatatatgcttgtatggaatttttaatatttttatgatttttaagaatttatttatagaaaataagatattttggtgttttcatgttattatatattatgttgtactcttattattttgttgttgaattttgttatttttctattttttttatgtaattttttttattttcgtattatttttataaaacaccgtaaatatatatacgaatgtaatagtgtaaaaaattaacaaaaaatactattttttgtaaatttctcattgttttactattgacctttcatttttgtagtttttttcttttttaatgttgtatatggttattgaatttagggttgttcatcaaactgtccccaccataccacactacagaaaaatacaatttgaaatcttttgcaatgcgattttagtttgtgtttttgccaaatcccgcaatgcgatttgtaattttaaataggtggcctcaagtgtccaaagtaaacacttagaaatatttctaagtgttggaaaatttttccttgtaaggctttatttttttttatctactttgtatttttataacattattggacaagagagctcccaaacataacatgagattagttggagtgtatctcttgtgagatggagcagtgaggtttgggcccctcccttgtgtggagtgagatggagaaaggcgtggcacaaggggcgactgagtgagagagtgcaatcgaggggatgtgattcgagtgaggaagtgcgagcaaaagagtgaggtgagtgtgtgaatgagtgcgagcaggggaggtccgctcatgtggggcctaggtggagcgaggttaaggaactcttggtgtgttttgttgatctagtattcttgcatcgtaaagtcattgaatgattcacaacaaagtggtattagaacaacgttcctaatcatggttgcactaaatatgatgtggaaaaatttaccctcccctcaactataggacaatccacattagtattagtatgatattgtcaattttgggactaaatactcataattttattcttaaacactttcccaaaaagtttcatactaatagagatattatctatccttatatatttattatctttcccatttcttgcaaatgggagactttagttgcactattaataataatgttcttgggcggggaaagtttgaggcaaacctcactctcgggaagggataaggccttagaaatttcattgtgaacacatgtgtgatcgatcattggggcttatgtgtgcttttaacttaagactaatatttacaaacattaagttaaaaaaaataaaaataaaataaaattagattgtgttctttgcaaattggggctacaaattttaatatatctttatatattaaaaatgtctatttaacgacaattcttggtttaacggagaactttttttgtttctgttaacttttaatcatttactagattttttttttgtttcctttaacttttaactattatgttaagtttgacatatatatcaaaatatactaataaaaaatttaaaaaaacaaattataaaataataaatattaattaaaaaattaataacaaaatataatctatcactaaaataggtaattctaactgtatctttaaatttaatcgtaaacataattgcacgtaactaatcagtttaaaa

SEQ ID NO: 110855 - DNA, 8425 bp, Cannabis sativa
  modified_base (201)..(224): a, c, t, g, unknown or other
  modified_base (6137)..(6137): a, c, t, g, unknown or other
atcttaattaataattaataataaaacaataattattaattaataataaattaataattaataattattactaaaaccataaaaaataaaacaataattaatttctaataataattaatattaataattaataataaaacaattattaataaaaataataaaaaataaaacaataattcataattcataataaaacaatannnnnnnnnnnnnnnnnnnnnnnnaattaataataaaacaataattataaattgttttattaataaaaaaattaaaaaaattaacaattaataaaacaataattaataaaacaatacttcataaatcaataataaataaaataattcttaaaactttaactagaataataattaataattaataattattataaaagaataattaattacacaaatattaataaatcaatacaaaataaattaatcaaaaaataataaataataattaataattaattacaaaaataattaattaaaacattaactaaaataataaataataattaattacaaaattcaaaaaaaattaaaaaaagccgcggagcatcggaccccttggaggagcatcgcacccacttttaaaaaattaaaaaaaaaaatatattccaaaaaaccatcggaccatcgaactcacatggaggagcatcaaacccaggttcaaaaaattaaaaaaattaaaaaaaaatagctatcgggtccgactatcggacccacttgaaggagcatcggaccatcggaccttcacccatgccaacaaatttttcccctacatcgggcccccattgggccagcatcggaccccatcgggcccgacgaaaaaaatgcagaaaactagaaaaaaaaatccagttttttacgggcagcaaatattttaacagaaaaaacagcaaaataacagtaacaatccacagatcaagcatcaaaacaacattctaaactaaatataacaacaacaaacaagattacacaaataaaaaaaattacccacgagttagtgtatgatgctcgtccaaaaatgagagaaattatgtggtgagccttgaagtgcagtagctgctagtttagtgagctgaaaagaatgagaatagagaagagcaaaaatttgagcttcccttgtggtgtagcttcgggcagcaagaggttagagaaaaaaagagagagggaaagagagaagaagtgagagggggtgaagtaaataaagagggtattttaggtataatagaagagtgattatgtattttaaatattggatattataaattttgaggaaaatttctaactaaatgaaagtatagaaattcaaattttctaaatagatatatttaaaaaaaaaatataaaaataaggtaaaaattaaaacaagtaaaaggaagtggttttctcacgttcaaattgagagcatatatcacatatttgtcatcttttcctaagaggctatgataagcgcgccaaaaagggacgaaacctctcagtttctcttaaaaggcactcttgatttctaactctgtagccattgctgccaccatgggaaagcagaagcaacaagtcatatctcgtttctttgctcccaaatccaataccccaatcccaaaatcatcaaacccttcacttccttcttcttcttcttcttcaagttttctcgcagacccaccaaccccacctcccaaaatttcagccacggtcactttctcaccatccaaacgccttcgtacttccccagcttccaattccaaacctcttaaagcccccaaactctctccccacactcataaccccataccccaacttcccacttcctcgcttcatcagaagtttcttgataaacttctagaacccacctccgacatcaacacttcaagtactccatcatcaaaatcggctgttaagtatacgccattggagcaacaagtggtggacctaaagaagaaacacccagatgtgcttttgatggtggaagtcggttacaagtatcgattctttggcgaggatgcggaaatggctgcgagggttttggggatttatgcccacatggatcataattttctgaatgctagtgtgcccacttttagattgaatgttcatgtgaggagactggtcagtgctggctttaaggtcggtgtggttaagcagaccgagacggcggccattaaggctcatggctccaaccgcataggtccattttgtagagggctatcggcattgtacacgaaggccacgctggaggcagctgaggatgttggaggaaaggaagaagggtgtggtgctgatagtaattatttagtttgtgttgtggaaaaaaacgttttggttgagaaaatgaactctagttttgaaatggaaagtgggattgaggtcaaagttgggattgttggggtggagatatcaactggggatgttgtttatggtgaattcaatgataattttatgagaagtggacttgaggctgttattcttagcttgtctcctgctgaattgattcttgggcagccactctcaaaacaaacggaaaaggtaactaacttatagccttatggtagttatggaacatttcatgaactatatgttatgtctagacatttctaattgtgtttatgtgatcctttatcaactaacgttgagtcaaagaataattatgtgtttgtgtagttattgcttggttatgctggaccttcctcaaatgttcgtgtagagcgtgtctcacgagattgcttcatggatggtggtgcactagctgaagttatgactttatatgaaaaaatggatgactgtaacccactagatgattcaaagcaaaaaacagaggtgaccgaaaagggagaccgtaatttggcgattgaggcaagaaattctttacgttttatgttttttaagtctattattttccctgtactttcccttttgaagatcttttactagttaactatatctcttcaacgtttaatccttatgaattagtatgaaactacattatagcctttgtcatgtaagaatttacaaaatcttgattattttcctctaaaatctgtttgctggtcttttttttctgttcaaatatattagctactgttaaaccttattttcatttcatttgctattttttgttataatgtttaaaggggatcatgaacatgccagatttggttgtccaagcgttagccctgactattcgttatctgaaacaatttggttttgaaaggatattttgtcaaggagcttcttttaggcccttatccagcaacttcgagatgaccctatctgccaatgcaattcaacagttggaggtatatgctcttttattagttatgttagaaatattgttttctattttggaagtttccacatgttgatggtttgaaccgtgatttgctaacatcatttttgccatatctacctgcctataactgcagcagagatgtggtatgctttaaaattgtctttatggttaacagtaaattggttcaaataaccatgtatattatcttctctcattcacaagttatacaatcataagatctgaaacaaattctgttaatcaattatttaacattcaactttatgtcttatacctggctttcatcctttaattctgtttccctttcagattttgcagaacaacagtgatgggtccgaatctggctctttgttgcagtccatgaatcactctcttactatatttggttcaaggcttcttaggcactgggtaaggcttgcatcttattgtaaatatattgtgttattatataggtagttactaatgtttaatctactaaattggacaggtaactcaccctttatgtgacagaaacatgattattgctcgccttgacgctgtttcagaaattggagaatccatgggatcatctcaagcctttcaggaggatgcgaaagatgtacaaacaagaaacccagagctttatcatgtgctctctttggttttgacaaatttaggaagagcgcctgatattcaacggggaataacaagaattttccatcggactgccacgccaactgaggtagtgaatgctaccttcactggtctattacttggtctattaatttgtaagaattgctgagttattgagttttgtagttcattgcagttattcaagcaactttacatgctggaaaacaacttcagcaactttacagtgaagtagacgaagagagtaatgaaaatttcagcacaacaaatgtgtgctctgagcttttaaggaagttgatactagctgcatcatcatctactgtgattagagtgtctgcaaaattgttgtcttccctagacaaagatgcagctgataaaagggatctgcaaaacttaatcatctctggtggtcaatttcttgaggtttgtacagagttttgccttattttttgtctttttattcatttcatacatgctgttcatttttgtaggttgctagagcccggaaagaggttcaatcagcaaatgagaaattggattctttgattgctttgtttcgcaagcagcttagaatgagcaagctggaattcatgagtgtgtctggaacgacacatttgatagaggtattattcataatcatattcaaaatatgtattatctattattttattaataattgcatgctaacacactattcaacttttgattgtgtatgggtacatgtatgaatttgacgtgttcttttctttctttgctatggtaaattttacttttagagactgcagtttaaatggagagagggagggagagattgccactgcaattgatgatattttatgtagcaaacttttccatatatgtaataaataacaatcctgttagctagaatgttgaacctgctcgttattttatttgtgtcggctgcagttatctgttgatgtaaaggtacccttgaattgggtgaagatcaatagtaccaaaaaaacaatccggtatcacccacctgaagtgctaaatgccttagataagctgtcactggcaaatgaggagcttaatattgcttgtcaatctgcttggaatagctttctagaggaatttggtcaatattattctgaattcagagctgctgttcaagcactggctgctttagattgtctgcattcacttgccattctttcgagaaataaggtatactatgagtatggcgtaatttttatttccaattctattcaatttcttcagaggttataaggttgaataattctgtgagttcttctgttgcagaattatgtccgtcctctacttgtaaatgataatgaacctgttcagatacatatctctgatggtcgccatccggtataggtctaatgctattatttatgccactacatctatttctactaaagcccgaacctttaattcatttcacatgtgttatttatttattttttacttttttgataagtttcatgtgttatgtttgctacttgattatgttcaacaattattgttcattgtaaattgtttgtaaaaaatgatatgaacagttatatgatagtagcaatttgatatgaacagtagcaaatataggaaaataaagccaaagagtagcaaatatagaaaatagtagctgatatattgttaatagaaaaaagggtgaacaaggttgttgggtattcaagagaccgagcactctccttagagctaatgcttacttaaccaaacaattctctccctttcccttcgctactcactcatatttgtagcaccaatccctcctattacaattacccaattaccctctttatttatcttcaggcctatcaatatacttggtttgaaaaatataaattgttgctaaaattgttagaggtacttttccaaatgttttgtgcttctgtttaaatgtttagatctttccaggtgttggagactatattacaagacagttttgtcccaaacaacacagacttgcatgcagagagagagtattgtcaaattgttactggacctaacatgggtggaaagagttgctacattcgccaagttgctcttatttctattatggcccaggtaaaaccagaaatacacagatgggcaatggataaatctacaagtatgtttaagcttttggtagtgtatcatagattcatgggctttggacaaagcagtttcatatatatatatataaatanatatatatatatatattttaaacatgtcatccttgtattggattacaaacatgaacatatatatagtgagatatttggttatagttttagtaattattgacttttactgctctaaatcaaatatctacgtctatatttcttcgctgtgtttctcaaagtcctgtttgaactgttcaaagctggagtatagatgaatctcttatattttattgcttcataagaatgtgttctgatttctctaggttggttcctttgtaccagcatcatcagcaaaactgcatgttcttgatggcatctacacccgaatgggtgcctccgatagtatccaacaagggagaagcaccttcctagaagaactgtctgaggcgtcacatatactccgaacttgcactgcacgttctctggttatcatcgatgagcttggaagaggcacaagcacacacgatggtgtggccattgcttatgctacattgcatcatcttctggagcacaaaagatgcatggtcctcttcgtcactcattaccctaaaatcgccgagatcataactaaattccccgtttctgttggggcgtaccatgtctcataccttgcttcacatagaactgagggttcagtggattctgaatctgatcatgatgtcacctacctatataagcttgtgcctggtgtttcagataagagttttgggtttaaggttgctgagctagcacaggtatctcttctctcttaatttcaccaaaaaactcagtcgtgttttatttatttaattttacattttcattttcacttatactttagtttgtcatttgaataagctagctaagcacactgttttgcagctgccgtcttcatgtatcagtcgagcttctaccatggctacgaaattagaaatggtggtaaacaacagaacaggaagtaaacatagaaagttgcagttgttagagtcaacatcactatatcagaaagaagaaaaagaaaagaagctggaaatggaatctagagaatggttaggtagatacaagcaattcatgatggagttggaagctgtactatctgtagaagatcaagtaaagagcttccaacatttaaaggaggctagagatattgcacagaaattgttaagcagtaatgaaaacgattatcccaagtaagaaatagcacacaaaggcaccatagatgctttttctttgtaaattattaaaaagaaatacaattgagctctggctttctacaatgttgttaaacttgattatatgcttcgggtaatattttggaccaaattactcttccaataagcatctcatatacagccactgacattgcaaaacaattgttggacgagagagagttgaattgactgaaggtaattatcaaaccatcagtggcctttattaatttgcatgttaaaatgttcacttttttttttttcttttaaaaaaagtgtttgctatttagtatttttagatgtacagcacggattgatgatgaaaaaaatgttactagatttaaggtttctattttgataggctatgagctcgtttgatatgttatgttgtattatattatattgtattagtatttttttagtataatattgtgtttgatattgatttgtataaataagttgtgtaaaattatactatttacactgtaaacttgactacaactctaacctcgacttcagcccaaacttagacccagtcctggactcggtcggtcctagaccccatacccagaccccgaccccaacctcagggtgcaggtgcgagtgtagggtttgggtcgaggtctgcgtccttgtccttgtacggggtctatccctgagtccgggtttgaggttcgggtcttgggtggggccagatctggattcggggatcaggttggggttggggccgaggatggggtctaggtccaggtctggggctggagttcggttctagggactggatccaagattgggttcaggtcaagggtctaagttcgagttgggagtcgagaccgtccagactctttgtaaatattataatacaagttaatacggatcatgttatgaataaaataatacgattcacattggtttaaaattatgatcgtaataattaatagaatacaatagaatacaatattttattcaaatatagtgttacttgttatttaatacaatatgattattatgcgggctaccgaacgaactctatgtaatttaggtggtgtttagtaacacttttttaatcagttttttgtttttaaaagtggaaaagttaaaatatttttcaaaagcatgttc

SEQ ID NO: 110856 - DNA, 3983 bp, Cannabis sativa
  modified_base (465)..(465): a, c, t, g, unknown or other
  modified_base (2426)..(2442): a, c, t, g, unknown or other
  modified_base (3349)..(3351): a, c, t, g, unknown or other
aaaaaaaaaaaaaaaagatttactataacatataatatattgcagctactataacataatagaaaatgtgggaaactagctcataaaatatactctcatcattataatttttcagtatttgcaagatttagaccgagatataattatttatgaatactttacagataaatacactaattactaaataattaaaaagataacttaaaaacatagtattaaaaatatatattcttaagtaaaaaaaatatatgtatcttccttttacacactacaagaaaattgtacaattttctcaatccgatcttagtgagcccgtgtatatttgtcaagattagtaccattaaaaaaaaaaaaaaacttactgagattattcaacttagtcgattacaaactttcccttatcacaagagacatgaatgaaaataaacaaagacttcaactctttttttttatttaagcgtttanatattacaatcatgttttacttgaaactcgaactcaagacctccaacacacccacccacctatggtcacttgagctagcctcaagtggttaacagttaacaaagacttcaactcttagtcaaacacatttttgacaattctttcaattttgttagggtaaataatatttgcaaacccttgggagagttttaatatcttcgtggatgcagttgttagaggagttatggttgtcatggatggtcatcaaccagtagggtgaagttgttaaagctttgattgttcagtacatggtttctagtaatatgtaggtcaagacttatgcagttcttcatgcgatttctttgtctgttagtaggggttagtggaatgttgcgtcataaaacttaagttcgtgtttcaagcagtgttgagctcagaagtgacattctaatgaaaatttgtaccactccttaattgttattttttagtactattaaagtgtacaaatacttgaaattctacgtatgctgtagaatgcaaaaggatgtagtggataatgtattcagatgcttaatttgttagtgaattaggattaatcatcagatgctggtaaggttattatgatatgttaatttcttgagtaaaatgagaagaagttgctaggaatcttgtagttggattacctagaaccatgagtagctgttagtgggggcgttacagaagtaatggtcagccgacatggattcaaaaatgaattccgtgaagaaaaataaagtctaggaatatgtagatacacctgatgattatcatccaattggatgtaaatgggtctagaagaagaaaagaggtgatgatggataagtcaaaacttttaaagctagacttgtagcaaagggttatacccaaagagaaggattggataatgaggatacttttagtccagtttccatgctcaaatccatcagaatacctctctccatagaaatctgttatgttgatgacattttagtcattggcaataatgtcaagaagatgattgacataaaggaatggtttaacacccaattctaaatgaaagacttgggtgaagctaattatgttcttaaaatccaaattattagatgctagaagaacaaatcacttgctctctcataagcatcttacattgataaggtgcaaagcgtttctcaatgaccaatgccaaaggggcaatcatgccttctagacatgctggcttgcgactatctaaggaacaatgtctcacttatccccaagagataaaagatattagaaagtttccttatgcttcagcagttggaagtctgctgtatgctatgctatgcatattagaccagaaatttactatgcagtaggaattgtgagcaggtatcagtcaaacccaagaaaggaacattggacaacaattaagcatattttgaaatacttaaagaggataaggaattatgtgttagtctacaaggatggtgctttaaatctcttaggctataccgactccgatttctaggattgtcttgatgacaggaagtttacatctgggatagtaatcactcttgggggagtagcagatgtttggagaagtgtcaagtaatctgcaatatctgactctaccatggaggccgaatacatagctgccactaaggctactaaggaactggtctggctaagaaagttcttcacagagcatggtgttattcaaggcatggaaaaaccactagtgttactttatgacaacactggtgctatcgccaacaataactacccttgaagccacaagaggagtaaacacattgagaggaaataccacatcattagagagtatgtggcaagaggagacgtgctggtagaaaaggttgatactgaagataacctagctgacccattcaccaagacattgacagagactgcatttgaaaagcgcagagagaatctagaattaattgaaacgtactgattgttttatnnnnnnnnnnnnnnnnntttgttaggttttgtgccctaactaaaactctattctacacagtgaaaagtaatcaagattatgtgactaaactattagtcccatgatttatcagtacataagattttacactgatatgataatcaacaatgtagtttatttacactaaaatagtggtatatcttttccaaggtataggtataagcttgtattggatgtgttgttatacattggactggattgatattcacataaaaaatatatcataaacttatcgtaatatctttctaagtaaatatcacttagttgatcttagattaatgatctcaatcctgagatggttaggttctggttcaagtgtattatttatgttctttgacttcttcgttaaagttgaccaaatggatcttctcaatacttacatcttgagaatatggtagtacaattgagtgggagtgctaatcatagatacaaaatctatagcttctatgactacataaaagtgaaacggtgattttctttgagcttggctaaatgagattaaatggtagagtactcattttaataattatattagtttactgaaatatcatttacaaggagctaagtgtttaaaggataaaatacattaaagggtagaacagtaaaattgtccatactcgatctagtagaggataattgattatttggattgaaacaatattgaaacaatagataattaacaatatatatatatatatatttggaacatatagagcgttctatataatcaggagagcgattctaaatctttagtggagtcatgaggaattaataagatagaaaatttacttggtaattttttgaactacttattgggagcttgattatataggcccattgtccccacattagttgagataattggcttgtagactcagttaattnnntttaattaatcaattagaattttaattagactatatcttatttatgaattttcattaatcaatgacctaattgagaaaaaaagagattttagggtttgtttattaattaagagactttgaaaggtctaattaataaataagttaaataataattttatttaataattatttataatttttaaatagttaaaatatgcctttataaagttagagttaaaatatagtatttgagaaagaaaaataagttatttaataaaatggcaaaattgaaaccatagggcctacaaggggttcgaccacaagggttcaattttaaagccattttatcttttttttttaatatatatttaaattcttacttaaccctaatagacatcatataaatagataattataggctcttattatcagaagctgataactcaatttcactttgtcaaacaatataagagaggctcctattaattttcaaaatcccttctcttctcccctctttaatttgaaccccatagtgaagagagtacttgcccatacatttcaagtcaatactcaaatatagtatggaagattgtgaagaatttcatcacttgaaggagatccaggttcagatctgttggaattattttactagg

SEQ ID NO: 110857 - DNA, 7647 bp, Cannabis sativa
ttttttttttatgaatcagaatatgtattggctcacaaacattttatttacaaactaatagtacccaacaagaacctaaataatcatctatacatgctaatcacaacacttgcttcttttctatacatttagattatttattttaatttttaatgttggtgtttgattcaaaatttgaaaatgaatagtaaaatagtaaaagtggtggggggaagggaacactaaagaacatgagaagactataataagcgccgtcatctactttattatactatcactagactactcactactgccaattagcttatataatatacatagtgcaatgaaattcaattcaattttatcttgcacataacacaaggtcatctaataatatacatgtacaattaataattaacaatttaacaattaacaatatagtcaaaaaagaaagccctttcaaaaaaagaaaaagaaaaaaaaaaagaaggtaagtgagatggcagtgacacgtggagagaggacaggtcagatccaaatatggttgtgctaattgtatttaccacttgcccgccttcagtgtcagagtggtaagaataagactcttttttttgttatattttgaatgttcaaaaactcccaaaaagacagaccaagagaagatgaagactgaaagagggaagaaagaagaaagaagtaaaccgaaagtgatcgactctactcgactcagctcaactcgccctcttcactacgtctcctgtaattgtcttctttaatgctctctctctctctctctcatatccatttggaccgactctctttctatctctctcactttctctctctctctctctctctctctataattttcaagatctggtttcgaagattcttctcttccaaacctcaaacctttcgccctcttaataataatacttagggtttttgatttgttgtctttgtctactaccaccttcttactccccttcctcttcttgtatatctacatttccctgtttgaacttggatgagctcaaatggaaagaactcgacccaagaggtcctccaacatttcaaccgcaacctccttccaaagattccacaccagagaacgacaacaagaaccacctttctctcaaggttgctttcaaattctattatttgcttctttcctccgagaatacattgctgcattttcttcctttcagctcagagagaaagaaaaactgacggtttcacttttatctagaaaagaaaagaaaagaaaacattatttcgtatggtattttctggatgcaatgtagagaattgtttgcttgtttatttggtttatttttgcttttttttttttgggtaaagtaaggggttggaattgctttgtgacttttctcccgtggtcatgtgagcatgatttcttctgttttccattataaattttttcataattgctctctctctctctccctacttttctttttccttttagttgaataatgaaggctttttcctttcatgcatttgaaacgtacataaaattacactctttacttctttctttttctagcttcagtttttaatctgaattttgtcaagttattcctcaccagaaatctgtctttgatcaccgatacacgatatgcctccaggtttcaacatcaatttatattaaactttctttcattggtggatttcattgttgagaatgatcatcttttctgggattggctatagttaatttctatctacatcatgtcctctatatttttttttttctcttcttctttactaatcttgaatcgactatttgactatactaacttttttgttggattttcccttttcaggtaacaggccagtccaacacccaagcaattttccaaagttggcctctgattctagttcttgcagtagtggcacagcagatgatgactcggtacgcttgttttctttactttgcttattctactacgtgacttgataaatttgtgctatatttgaagtatagctgtaccacgttaagatctgttctgtcttgatgcatgaatgttatgatacaattataaccagaatgtgttcctcctatacagttcacgtttgaattggggttgagatcttcaaaacaagctgctggaactccaatcaagaacttattagctaaggagatgtcgaaagaaaatgaatcaagaaggagagcacctagtgttgttgccagactgatggggctcgatggtttgcctcctcagaaaccagcttacagagaaggtaatggcatttctgatggttatcttaggacagtaagacctgtggagaaatgtcaaagaagtagccgtcgatatgacagcaaatcttcaaggaaaagctcaatggatgaacaagaatttaaggatgtctttgaagttctggaaacatcaaagttagggagttgtagtcatccatcgcagaagagtatggcaaactcgaatctgactgatgctgagatggcatttattcggcagaaattcatggatgctaaacgtctttcgactgatgagaagctacagggttcgaaggagttccatgaagcacttgaggtccttgactctaacaaggatctcttgctggaattttttaagcaaccaaactcactgtttacaaagcatctacaggatctgcaaggtgctactccccagcctctttgtgatcgcgtagcagcgacgaagtcatcaaatgctcggatttatgagaagacacgccatgacagtaaatcagctagagagccttttcacaagagtcacagtgcatcttctcaacggcatcgtgataggcgcagtaagaactctgacttccatgctgctcaaaattccctcaagtcattaaataatcaacgagagggaaaggaggagcctgccattctccctacaagaatcgttgttctgaaaccaaatcttgggaaggtgctaaatactgataacattgtttcatcttcttgttcttcacatgcttcattaccagagtgtaggaatgacactgaaatctcagctattaaaagcagggaggttgaattattaggagggagaaacttcagacgtgatgcggggatttctggtcataggtctagggaatcaagagaacttgcgaagcaaattactcggcaaattaaaaatagttgtagcaatagttccgtgaagctatcatcttctacatttaagggatatgctggggatgagagttcgtgtagtatgtctggtagtgaatccgcaaatgaatcagagacaatgtcaacgagttccaaatattcttatgacctgagtaagcgatccaggtccttgtcatcacgctctactgaatcatctgtgagcagagaagccaagaaaagattgtcagaaagatggaaactcacccacaagtctctggacatgtcagtggttagtagaggcagcacgcttgctgacatgcttgctatccctgataaggaaactagaccaccatatctggatagcataactgatgaggaaggatccaggaacaaaattgtttgtgatagtgatgggcctgctcagtgggttgaacctttgggtattagcagcagggatggctggaaagatggatgtatcagcaatttaacaagatcaagatctcttccctcatctactaccgtctttggaagtcccagagcaatcacacgctgtgaaccaatacgtgatgacaggtatgtaataccgaaagaggctttaaagcgagaaagagttaatgcacaaaagattaaaacggataagaagagtgtcaacagaaacttaggatcaagtggcaagagatcacatcattctcgctcaatcagagaaagtaaggactcctcaatcaaaactgttgccacccaaaatcatgtaaatgttaaacttgaagtgagtggccgtcagccccagcagaaaatagaagacattaagtcgttaactgataatctcacagatgataggagtccagttcctctacgttgcttggatggtgaacataagacaacaaagcctctaaataattcaatcccagaattaccagcacatgtaatggttgctgatgtttgccatgttggtgaccgagattgcataaatcttcaggtttgtcttaaatctcttatggtcttaaatgctgtaatgttataacatttgtggagagtaatctttattcctaagactgtcgatttctgaattgcttgttgccttatttgcatttaactctgctttataaatcatttctcagaagattcttattattttaaccatagtattttgcactgccagttgcaatttcatggagaattgtattttcaatcgacaaattttgtttctcaacctcttataatgtttaggcacaaacggactcccatgaacaaactccaataccctcaaaacattctgttcctgggctagaatcacctgcaagttctaaggaggctgaacaaccgagtccagtttcaattctcgaagttcctttcactgatgatgtgtcttcttgttctgaatgctttgagagtctcagtgctgatttgcaaggtaattatataagccaaaatattatcaaacttttgtagcatttggatatatgtttgtttaaaaatttccttggtttaggatgcctatattttgacttcacatgttctgttcttttggtactagggcttcgtatgcaacttcacctactcaagttggaatcagaatcctatgaggaaggacctatgcttgtctctagtgatgatgaagttggggaaggagctgaggtttcagatgcatttggatcgtctcaacggagttgggagtcttgctacgtggtggatgtcttaatccattctggtttaaaagaagctgatccagatgaattcttggcagcatggcacactcgagaatgtcctcttagtcctttcttgtttgaagaactagagaagaagtacaacaacgagacttccccaccaaagtctgagagaaggctgcttttcgatagaataagtagtgggattttggaaatgtatcaaccgttcactgatcctcatccatggatagggtcttctactggaacaatgtcgggtccaaggtggtctaagaatgaggtagaggatggtgtttgtctgtggctcactaagcaagcaaagaatgtgaagaaagagacagcagagaaagtgatgggtagggaatcagagtggctggacatgggcgatgacattgatatactaggtagagaaatggagacgttgttgttagaagagctaatggaagagtttttagttgccatgtagagattttcttttaaccaaagctatttttgttcttaggagaccttaatagttaatactactctcgtcttatgtaaatgaagagttgttcaccatgaaatgattatttcatgagaacatgaataaacaaatatgaaatggttacaccaaaatgacaaattatcttaaacctcattttataacatttttttatttcaaattacaatttcaatctccaataacattattccaaattttacttcagaaaataatattttttttaattcctttttatcattagaattaatttgattaataaatttattctatataaaatgtggccatgtaatagaattctttgtttaacgatgggtcttttctaacgctgttaacttatttttcttatgaaaaaaaatgtaaaaaaaaatttaaaaaaccaatggactcttccagaacgtcccactcttccaacaaagtgatactctctttttttttttgaagaaatcaaaatcgcactgcaacaattcaaaatctcaatcaatccactcttccaatcgagtaatctgctcttcttttgaagaaatcaaaatcggactgcaacaattcaaaatcccaatcgatccactcttccaatcaagcgatccgctcttcttttgaagaaatcaaaatcgaactgcaacaataatagcttcttccagaacgtctcaaaatcccaatcgatccactcttccaatcgagcgatcggactgcaacaataatggcttcttcctgaacatctcaaaatctcaatcgatagaagacaaaagtacaatgataaccacttttcaagatattcgaacacctaacatcgaatttcttcgattgatcaacttcaaatcgatttgttaaattatggagcacgattgctccgattcgttcacagacatgctcatttagagaagtgcagcagtatactcttctttctatcaagacaggtggatgtagtcaggattgtttatatagcctcagtcatccaagtatgatacaagaggtatccacctttaacagatttgttgaaataaaatcccatattacctgtacactataaaaccagaacatttacaaagagttttacaaggcagtataataatccctaagtggcctttggcttctaaacaacctagacagattagttaagttagttacaaagtctgttaacactttgtaactaactctcctatctctgatctcttctatagaatatataaagccgaaaaaacaaaactcaaagcagtacaacaacccaaaattagatcggtacagaagaaacacaacaacaaaactctgagcagaataaccaaaccaagatctgttcacagagaaaacaacagacagagattgagttggaggaggcttacagtgtgtaaccttggagccctagggattgggttcggatatccaactcagtggagggtcgttcatgcaatagaaagaagaatagttagtactaattttagagagaaaacagagagaaaagagaggatttaaaatactgtaaatattagggattatcatttcataccctgtgtttgaaatcctagccattgtaaactctgctcattgaagatccatagtgaatcgaggcgagctcgaagaggacgtacacagtacaatttttggggaacctctataaaaatctggtgttatctcttccttttatctttttgcatttttctatattgtttttttttttgtgttggtgtttttcgtgatcttcagagaagaaccacgaagaagaaggctcggtttaggcggttgattcgaactgggaaaggggttttttctgggtctgtatctggttcttgtaggtgttgttcttcatgttcttcacagaagaacaacgaagaagataacagcctctgctagggttttcatttaggtggctggtttatgtgtttgggtgataacatagtatatatatggtctaatattttagggtttcttgtatgtgtataaaacgacctgctgcgcataaaggggctgtcttttggcacaaatcagggagtcaaataagggttttgactaggggtacacatgggtcaggttttcgggtggtcaggttcgggccttggaaatgcacaaccgaacccatttttcgggtgtgtcgggtattaggtcgagcttttttcgggttgggcgtagttgggttccggtcctattaggctgagcccgaatgtttaatttatgggctgaaataaaacttaatttttaaaaatgccattttatatatatataataataacatatatatattagtattaaactaaagtatataataatattatatactttatgaagactttcagtagttgttgaccgaggttttcggtaaccaatttaataatatatgtaagaaagctgtaggaagtttaatgcatgagattttt

SEQ ID NO: 110858 - DNA, 5119 bp, Cannabis sativa
actgaagctaaagttatgagctttcagagaatgaattaaagaatgattagaatggactgacactgcgagctaatttcaacatgaactcaggtacaagtcgtcttcttagaggagctgctgcatcttttgcctgggcagctgagtcatcagcatggatgatggctagtaaatcttcaaacatttgatcattaccacccctcataggatcctgaatagcaagccccacaaaagacagactttttaaatgaacaaaggggaagggtgtaggaaatttaatgagactaatgacagaagttccaaaataagaaaaatttgaagcagaacagctaatagatgaaagaaacagaaaataagaaagagtgttttcttgcattccaaattattccagtaatgtattgaataagtatgaaatgttattaaatcggtagagatgatacaaacttagaaattaggctatttaggattttcgctcccgaattatgactaatgcattattgtggtcctaaatttttcagccgttaaagtggtccttctgtcaagtttagtcacatgtggcaaacataatgaagatgtggatgtttatatgtactaagaatcaataatgattaaaaaaattaagtaaaactaaattaaaaaaaaattaaattattttttcaaattaattacacacgtcgcgctgctatgacaatagtctaaactgtcacgtcatcattatatttgtcacatgtgacaaaaaagaatgaccatttacagcactgtgaaatagttcggaactatttttaacggacggaaaattcaaaagatacaataatgcgtaagtcatagtttaagggaaaaaatcctaaatagcctacaaatttaaacaatagagcaacttttgacttgtttagagagagacctaattgagtgaaaaattctgtataataatcacatagttcttccttcaatagaaagaaataaaaattaaagatatgaatataaagaaaggcatctgaagtcgattttacctgaagaaacaaatctgtatgagtctttccttcatacaaaattgattcagctttgactccaaggctctgaagtgtttcagcaaatttcttgctgcacaaaaaaagatgttagctttgtcaaatatatatttatatatacatatatatgttagccaaaacttgatcaaaccaatgaacttatatgttaataaaagaaagtgaattattagccataaaaataataaaatggtgagggcttgatctcagagaagactttacctggaatctgatggtatagaataatcagctgtaccatggaacaaaataatgggaggcaggagagacaatgcatttttaatgtttgggtcctgtaccatcacttctggagaaaaccgtctaagagattgctctccttccattatactgtaaaaatgtttaggaggtagacataaaattaaaaccaaatttttgttaaggaaaaaagtataatgcacttcatcttcaataagatgaagaagtacgggtaccttagaaagatggaacggtagagacctcgagtgtggaagtgatctattaagtcaaacaaattatacctgtttttgtccaaattgccgtacatactgttaaatatgtttcttaaaagaagttatcatacatattaaatagtcaaaagttttaaaacagaattacagtacagaaagggaaaaagaaaaaagcagaatgaccatttgcaaaactttttgcttacatgattgccatactcgaatttttaatcaaacaagatgataaactctaccagtgacttatccaaaactattcgagtggcatagaacattgagtttttcatttaaccagttcgtagaccatattaataaaaatctaatcctaaagatggatgtgcagcgaatgtgaaacacctccaaattgtctttaggatggggcagctggggttgttgcccaaggcccctcagcccaagaggcctcccaacctctttgttttttagagaaattttttaacattagtccccaaggctcccaaaaaacttttgctaaaaaaactgttatggcctccaaaaaatcggattgatcatatatctcatggtgggcgaaaactgtaaacaaatatttacccgccagataaaccaaagtaagcctttaactgggagacactccaagaagtactctctccttcaccattctccttgattgcttgctccaggagcgtacaagctgcaatatgtgcaccagctgattgtcccattagataaatcctatacaagaaaaacattagattattatataatttgtaatatgtcatgaatgaagaacatgtgtatatttatatataaatgattgttacctattaggatcacctccatattctgcaatatgattgcacagatatgagataccttcagaagcatctgcaaccatatcactaatggttccttgagggaaatttctacatgaagatttcaataacaaaagttagcatcacaggtagtcagcgtccacaatgggaattttatttgtacactacataaacatttgaaaagaatatataacctgtaatctatgcacgccacaataatgtctctttctgataactgttgtcccagaagagaaccccatgctttatagctgcattagccaaaaaagagatgttaagacaagtaattatgcaactgagactgttttgaattggcagacccagctgcttgtttcctccggtcatctacatcttttatttttggtatctaaaactttccatcaagtttgaactgatcaccaaaaccagatgccagcatacattctttcatattttttagttacaaaaatgccaacattaatgttacagaggagctaacacacccaataatccaggctccaccagttacaaacgcaatgactggttttggcccatcactatttttaggtagatacagatccagcctgcaaaacaactgtcacctattaatgccacaaatccagaaattaaaagattcagtacatcaaaatgcacaaggaaacagagtttgttctacctatttcttggtttatcaccgtaaacaatacttctgcgtatctgactggagaagaaataattataaccaactgaaatgaaaaagcatgctagttactctcccatacattaattgttctgagttctacttagataacaatatttataaactgacaactataaatgttgcggaccttgacaaaaaccaggtataagtaacaatgcataacaaccaagtgcaagaaatcttgtcatccatctgtagcctaccctgaatataagaaaaatggttaggaaccatctaacaatgaagaggaaaaaaaaacttaaaagaagctctagaagtacatattgaagttgctagaaaaaattatcaacatagaacagaattgtacctcttgaaactgttcaattttatcatttttcatggatggaatgaattatcactatggttatataatatgccagagttctaatataaactaatccaacaatttgcacttctatatatttatctttctgtcatctatgttgttttccacctaagatctattaccctctctaatttaccatcaacttaatagatcacaccccaacaagttgaaatttagctaaacacatatttaatcaagatactctaacaatgtccatcagtaccattctatatgaagttgattgtattgtgtgccttccattcaacatgatttgaaaagaaaaagaaagaagtgtactcctcagaggcaattatgacaaacattaaacaaagtctaactacatctccctcctaaattcttaatatgatccagttagaactatgtcttccattcatcatcatacaactaattgtcaatggaaaaaagacaaggccaattttgcagcttaattaccacattaatcagataaacaaactacaaatgaagttactcatacaaacagatcaaaatcgcaaaactgggtataacataaaaggaaacaaaaagcacaaaccacaaagcgaaaacaaaaaatggcaattaaaatctgattgatgaaaacttactcacccaagatatctcaaaagcttcaaacagagacgagtgagcaagaacgtctcggccgcggcgtggcggacatcacgccccaaagatcgacggctttcgacgtcagataacgaggacatagaatcttcactattggttcgccgtcgccggtgctgataagacgtcttagccgttgttatcttgggaagaagaggcttgatgggcttgaaggaggctttttcactttcaaatgacgaagaaatgagaagcctcgcagttgggtcatcttcaacgttgagcaacattgtgtctacggaagatgaacaaccaggcgagattgaagaagggttcgattcagaaaatggataggaagaagacaattggtgctgggttatgggcaaaatttgttgggacgacatttttgtagacaaagccagatgctttcgttgggttcaatccaaaaatgtgttgtttttttggaatcgaaacaaaaacaacacaactgtattaacccctattcttatggtttgttttggtgggtaatgggtattagataatagattaaagggaaagcctttgaatttggcttaaactttagctcacctcagatcaattcgcaaagaaagattcatggatactctctatttttgtcatacgaacctttttctgctttcattttctttttctcaaaattttacagacttagaaacaaaaggtggctatcttctattggtcgtatggaagccgttggatttgtccaactggaattttatgattggttcgttcaaaccttgttacccaacaagtatagagttggtcttcttttcggaaaaaaatcacatgtcgccatattctgtccaatctctgtcccaacgaattatattttgccaacggtacatttaagagcataagtctcctttagtccgtttgttttcctttagggcccgtttggtacgtaggattggactggattggaccagattggattatgctgaaattaattctgtatttggtttaagaatgcactggactattttatttatttccttttaaaaaaaaaacttaaattaaataaaaatatataataataa

SEQ ID NO: 110859 - DNA, 5375 bp, Cannabis sativa
cctgccacaatcgcttacaaaatcaacaccgtcaccttataataacttgaaaaaaacacaatattgtacttacacttttaaaatgcgctgacatgatatggttgaacattgcttaggctgccatagaattagaaaacttgtttaagtgtcagaaaaaggttcatgtacttaatgaatcaaatatggaatttcatcatgcagtcgcttttttttaacacttgcatctagaaagctgatacgaaggtttcgctggctttctcaacttttatattccaaacatgtcaagaaagaaagtacatacaagagaaagaaaacatgttgactctattaattaaaactctgagaatctgtaaaatcatactagccaatgaaaatataacaattttatggtaaattgttccatttatttctgcttgttctgcatgcaggtagttagatatccccaacatgcttttacttgtattggaagctgtccatattggattacgtatctcaggttgtttgtctcttttttaattcaaaatttgtttcatatattattatttcacactcatataatatacttacccaatattctagtttggaaattaagtatgaatatattagatttggttaggtaattacttattaaaaagcacattaaaaattaataatctactgtaacttagtcctgttaaaaaatttccttcctaatttttactttcatatataaatttcattgacgaagttcgtgtctaatttgtttttctcatgacttattattactgacaaattatttaatttattgattgtaaatactattttggatcttgtgttttgtaaaagttatagattggagcttatgttttgttaaatgacaaaatagatcttatattttcaaaatggtaaaaataagacctttaagcttaattttcgacaacttttttttttttaatataaccaacttgaagataattcttaacacgaactgatacagaaaatgtaaacaattttgtcataacacattttgatcggattattattaaattttttttgttatttaaaaaaatagagagtctaattagaaacttttgcaaaacatagagtccaaaatgatatataccgttcttaatactatggtatatcgttcacttaaaacgtgatctagaaaatcaaatcggactctggagggaagaaacaaattgttttatgtaattattcttatgtttgtgttcaccaggtacactgcatttattgtgctttatcccgtggggttgtttactggtgaaagtaagtccttactaattaattttgagctgtaaatatatgctatgacctatgatgtttaaacattctccagtttgtattttttcatttctgatcaattgattggtccaattccatgcagtgtggcttatgtatgaagcagttccatttataaagaagaagaatctctacgcagatttcttctctgcatttcctttcacttattatacttttgttagggtaagtttggaacttttttttccttgaggtgatcagggcacatttcctattctaaatctctacactacattttactctgtttgttcattactcacaacacattcatttgttggtcaaatatgtgatgcatattctcttctagttcagttttacaatatttctaagagtttgactctaattttcggatatgatttgaattcatcatgtacttatcttttaatgtggtactttttttaaaactataactacacaattcattattgcgctgctttgtttgccgttgatagacagatttagcatatttacatctgtaatggttttgttataacatatgatttcccaaaggcccagaccggcttcagtaccaattttacttctaggataggatgtgaagtgggatattataacttgtatgagagaatattttctgaacattcctgtgaatttgcatgtacttttcttgataatggccgtacccgtatctctctcatttctctactcttatatgtttactcttatggcatccttgttttgctcatcatgctagctaggtcccatttatttacctcataaagatttctcttatttgtttatgacagacacagtataaatatatgtaaccttaattctttttttattcctctgtcaggttttgctagttttataccctttcctctggttgaaactgtacctgcatttgttcaaacagcgacgatcaaaattgaggaaacacgataagaagaagatgaagtgaagcattattactgtaataaatcaaaacgtattttattttccatcaaatttattgtagatgactatgctcagtacccttgtttattctgctgtactgatacgactatgggagccaatccatgcgctaagttttagttttctcgtcatacaagtcgatacaaattgttcataccatgaatttgatgaagaaaaaaatgtggtaatttggttaaagatattcactattaacagtgtttcatccgctgctaattcatgagccgagaaaacagatcctttaacggtatcacgttattcatatgaaaaaggaatggttgtaaaaattaaacgcaagagacagagatggagagagagatttacactcgcccattgtgaaccttttagttctatctgaaggtgattagtattttgagatagattacaagagtaattttgtctttaccttgggtttatttctcagcctttataatgacttcattttcaatcatttcaggaaaaaatatgaatagaagagagagatacaaatcatttgtagagagagaactttaagagcctgtttagtaggttctatttaagttgaattttattaaataataatactatggataaaatattttattttattaattattgcgactataaattttaatacaacgtgagttgtattatttaatatataataaataatccgtattagcttatattataaagtttacaaagggtttgcggttaacccttggccctgaacccaaccctagaccttagacccaaacccatacccttataatggacctagacccgaacctgaaccctagcctaaatctcgacctcgaacaccgaaacgacttgaacttggaccccagactcgagacccaaattcggatgtggacccagaaccaaactaggacctggactctagcttggaccccaaaccttatacccggactcggacctagatgtggacctggacctcagaactagaccacatctggaccgggaccaacatttggactggaacctataaccagagctggaccaggacctgaccttagactcggattcggaccctggacttgaaagacaacctggaccctagaccttagaccttgatttggacccggaccttggacctgaaccacgacccaaacctcaaactcagatctggcctttgctctgcacccagatcaacccccggtctggacccgaacccaacccctactttgaacccagacttcgaacccaaacttggccccagcctcgactttagactctgaacccaaacccggacccggactcgggatccaaaccctaaattcaaacctagatttgggtttgggacttgggtttcggttcgaggtctaggttcgagtccgagtctgagtgtttgagtttggatctaggtatggggtctgggtctgggtccgagttcaggtccgttatccaagtttgaatccagggtccgagttcgggtctgggtccagggtctaggctgggtcacgggttgggtttgagtttgggttcaacgcatgttttgggtctgggtcgggttggggttcgggtccgagtctgggtctggggcatgttttaggtccagagtttgggttttagtcgggttctgggtcggggtccgggtctaagtcctgcccgtggtcgagattggggtcgagtttattgtaaaaaatttataattttacacaatttattagtacaagtcaatattaaacaaaacattgtattaaataatacaaatcaatacaataaattccaacacaatacaatacatcatggtgttctaaacgagtcctaagagattgtgtttgtaaaatacttggagagaatttataagggaagtgtttgaatcttgaacaagtgttggttcaagaactctagagtgagaagagtctcatgttaaatgcataaatattatatatttaatagtgtacgttgacctcaaaaagtgatcgatcgacagcagggtcgtacaattctgatgcttgccacgtatttgcacaaataagaaatgaaaaataatagaaaataaaatttgttatagaggttcgttgtgatagcgggggtaatgacctacaccccttttagttgtattatatcaagggaaacactatctagatcactataggtgagttccgctatgacactcttaggattacaaggtatgaatccgtattagcaaaactcaagtgttgagatgtgctagggtaggcgtgtgtgagagagaaagtgaggaatatatggtttatcatacaattagagtttagaagcaagtttctaacttggaggcaacttaggttttcagcctgaagttgaggcctttatataggaggcctaaaatcctaggtttacagtttaaatcccttagtattcgtatagtttgttagatatttacaaaagaccaaagcacccataattctagatgttattcaaccattctattgggcttttaggggtctgattcacaacccatagctgttgtccacgtgtagaagtgtctaggaaagcctgcagttcactccttgactggccaggcccctgtggaggccaggctggtcggccatggtgatgtccaaggctggctggccataggggtgggcgaccagctcctaagagagggggttggtctgtcacttgatgcccgtttgagtgtacgggttttcatttgtttagatgctgacttggccttctttttgtgagttgtactaccacgtggtacttgttctgtccacgtaagcatgccacatcatgagaaaaaaaattaggataacattttccccccaagtccctgtgcggatgtctgtacagataggaactttacaagttatgttgatattgtcgggactatcgtaacccttgctgaataaaagttgatgcacttgttgaagcactttatcttgactgtgtagtctcattgtagtagagaaataattactttcgttgcctttatgatgtgtagtaggggtgtacattaaatctttcaaaccgctcaaactgcccgcaccacaaaaaaaatgcgatttgaaattatttgcggttcaaaccgcgcagtgcagtgcagtttgcagttttgaattattaaaccgcgattcaaaccgcaccgcaccgcatgctttaaaatttcaattttt

SEQ ID NO: 110860 - DNA, 4736 bp, Cannabis sativa
acccgaccacacgggttttcaggttttcggttttttggtcggcgggtcggggcgggtggtcggattttttgggtttgcgggtctaaatgttcagccctaagcaacattgcctcatagccgtaagctaaagcaaatggagttttcctagtggttgtcttcttggtggtcctgtgccaccataggacctttgggagaaattcaagccagttgccttttgcctctacaagatgcatttttaaggagtccttaagggtcttgttgacaacttctacctacctatttgcttgaggatgggccacaaaagagatgtttttgatgatgccatgtttgttgccgaaatcagtgaacatgtgactgtcaaactgctttccattttttgacacaatcttctatggaagtctaaatcgacatatgatgttcttcacaataaaatcaaggagttttttttagaggtgattgttgccaggggtttagcttctgcccacttggtaaagtagtctacaacgactattgcaaactacagccctccttttccatttgggagttgactaattaggtctatccccaatactatgaagggccaaggagactatatcattgtgaactcattgggtggagctctaggtatttttgagaatctctggcacttgtcacatttttttacatagtccatcgagcccttgatcattgttggcaaaaagtacctttatcagagtatctttttggataagctttgcccttggcatggttgcctcagaagccttcatacacttctatcatcagttgcttgacttctgccttggttacacaccttacgaagctttatttgtacattactccgtctatgattagataccttgcagcttttcttctaaactttttgcctcattcttgctttcaggctcctctttagagataagctgtaatagatgtcatccatattagactatcatctaacatgttgatttctttagggacagtattgctcggttccttcaggaactatatttgcactatttttgccttgttggcagtggtgctgcttaccagatgggcaagtgcatttgttgtggcattctgttctttggggatctaccttattatgtgcccttgagctgatgtaacaagttttggatcttgctcatgtaggccatcattctttcacctccaactgtgtattcacctaggacttgattcacgactagttgagagttgctgaatatgtccaggtggtcaacccacacttcatggcctagcttgagacttgctattaaggcctcatactcagcctcaatgttgaggctttgaatctgaatttgattgcttcatgcagctgttgccctaggtgttataagggcaatgcctgaactagacaattggttagtgcagcttcaatcaacattgagtttccttgtcaattcattaggtttatgttgttgctcatgctctcgcttcttctctgacttttacgtttctcctgaatcttgagagatttcaagagataagtttatggattcatccacaaattctgcaagggtttgaccctttattgccaattctggttgatatgtgatgtcaaatttgccaagtttaatggcccacttgagtagttagcctaatgcttcaggttttcgtcaaacctgtcgcaatggttgctcggtgtacacctttatcgggtgtgccttgaagtatggtattagctttctagacgctagcaagctataggtcagcttatccatgagtggttactgactttcaacgtcagttagtctcttgtttatgtagtatacagggtgttaaacaccgtctccttctcttgttaggaccgcactcacaacatgtactgcgacttataggtacatgcctagctcttcattgtctaggggttttgatagcacatgtggttgagccaattgtttttccaactcttggaaatctttttcacatccctctgtccactcgaatttttggtagcctctaaaaatattgaagaaaggtacacacttgtttgtagacttgaacacaaatctgcttagtgcagcaatgcaccctgttaagctttgtacttctttgatggttgtgggcgacttcatgtccaaaagggcttggatcttatcttagttttcttctattaccctaacattgactatgaaggcaaggaattttcatgagcctactccgaaagaacatttgagtgggttgagcttcatgttgtacttatggaggatcctgaagcattcatctaggtcttccacatgccccccaacctttttggacttgacaagcatgttgtccacatacagctccatgttgtggccaataaggtgtttgaacattttgttcacaagccactggtacgtggcccctacatttttagcccaaatggcatgactttgtagtagtataggcctaagtctgtcatgaatctggtatgcttctgatctggctgatgaatatttatctggtttgaacctgtatacgcgtccatgaaacttaggatttcgtggccagttgtcgcatctacaagctggtccattctaagaagcggaaagcagtccttaggacatgctttgtttaggttggtgaagtcgatgcatacactctaatttttgttggatttgagcaacatcacagcgttgtatgtgcaaagtggatagaatgcttctattgtgaagtcatgggctcgtagcctcttaacttcatctttgagttcttatgcaagttctttgccttataacctcctcttttattgtacaagtcggatgttgagatcaatgttgagggcatgggtcatcagggaagggtcaattcttaccatgtctccatgtgaccatgcaaacaggtccatgtttgccctaaaaattttattagcactaattttatttctggcactaaacccttcctgatcttcagtcttctagctggagaagttggatcaacgtccacttcctcttgctcttctataggtccaaatttttctgcaggatccccaaagcgaggatctatgtttgcatccccgctttgggttggactacattgtcctttgctaggctcttccatagagcccttagcgggcattttctctttcttagatttggacagggcccagttgtaatagtaataggaagatttttggtctcccctcaatcatcctaccccatgccttgttgggaatttcaggcaaatgtggtagatggatgtcacccccttcaggtcgtatagggttggttaacctatcatggcattgaaaactgagggaacctcaattacaatgatttgggccttcagagttttaggggttggattttctccaacagagaggggtcttctaatgtaccccatgagtgcaatgcccgggccaaagaagccatacatcacttgactgcaaggtccaaatcagtatgttggaaccccaaaatttcatatattgattcgaaaagaatgttggaggaggcaccattgtcaacaatgcatcatgccacagtcatattcctgatttgtgcattaatgaccagaggtcgttgtgcaagaaactgatttgagcagcatctccttctgtgaaagagatcgcaggctctccaagctttggtttcttagagcccctttatttgacaactaggatgtcgcttttgggctcgtgacggagtgtctgagcatagtgctccctagctttactagttttgcctacaatatggggtccgtcgatgatgactcctaagtgacccgccactggaggttgcattgggtctccattttgggcaccttgtgcctgcgtttggtcatggaaaaattcataatggaaactgacaaaacttcgacatgtccatcttgcttaactcccttttgatgggagggggcttcttgtatgggactattccatgagtggccataaagatgggctcaggtttctcggtcaggagggtgaagcagatatacttatcctccttgttcttctagtttttttggcattgaagaagtgttatatttcccctttttagcactgtttcttccaattctattattattgtgcttgttacgagtgttctggccgctggaggtttgggtagagttaccagtgcatgtctgtgtgcctagcaagtcatggggctgtaggatgccttgtgactgcctattgctgactttctctatttgggcttgtcggatagcttcctctagcttgatgaagctgtcagctttgtcgaggaattccttcatgttgttagtttagatcctgcagatatctttccagaagtcgctcaatggaacaataccccccattatggtcgtatattggcattcttcagtaaggccttttaccttggtgtccttggccatgaacctctagaagtaatcctttcacggttctcgttgtcgttgtttgactttgataaggtcttctagctataatggtaaaagccttaaggacaaaaactatgtctagaattctcagaaaaactcattccaagaattgaattttcctggggcaagcttaaagtaccattgctgagccgtttctgacaaagttgtcgtgaatatgcaacaccacgtgacacatcattagtgattttttggagatcgagctacatctagaagtacttgataagtgtcagtggctcttctcgtccaatatatatcatccataccagtatcttgaacatgggcaagggtatggaatttatgtataccgagaatggtgatccccttgacctatctagctgtaacaccctaactagcat

SEQ ID NO: 110861 - DNA, 1699 bp, Cannabis sativa
tcaatggctggccatccccagactaggtaactagctttggccggctgacattggattaggtaactagccatggctgagcagccctacactgggtggtgtatggccagttgttcttccttgattggccaaaatggcatgtgtgttgacaggacgttgatcacactaagtgctcgtgtatggtggattcatttgtctgaaatgattgtccattagtggaataatgtcacttcgattctcactccttaagttgatgttgtctttggtttttccaaatgttcccagacctagtctatcaaagatatgccttagaatgacttgctcccaaatgttttggagaggaatatcattctattggttagccagaggataactgagtggtgttgttactgagctaggaatacttggttgcacctcaccaccacctagtgccagagactagctattcccgccataagatttgtttagtagaatttgtctatcttcaggcaagggaaggtctgtccttgcaactaaggggcttggttggacaacttgcacaatgtcaacctgcccataggccctgcccgaactgttgacgagccttccttgcaaaggatctttaatcagatcatatcctctctcagtagttctttcattgaactcccttattaggttactagcctcccaattacagtggtccagctctgcctgataggcctagaggatggcctcctagccgtccatccacctgaagaatttgtgtctctactgggcgaatgtatcgcaagaaacatctcatgattactcagtttggtcaacttggcctacgacctctctgagcctagccaattcgatgtcttctcccaggtccacataaggctcaccaatagctagttcgccgatccctagtcctatttcccctgcataatactggggaacggtgctagttatgctctataaaggttgttccatgtcgacaagaccttctgtttgaggtgttttcggtggatctactttgggtggcaaaggctattgattaggattagctagttagtcgaggcaattggatcagatgtgttggtcaagtttgtttgtctattgggttgatagaattggtagggttggatgcatcagttgggttcgtggaaacgcctatggtggctggaacacgaacattaagatcaacagtcatggtatcttgaggaagacctgaagaagtaaaagttttagttcttcttgttacgaccatgatgattgattgagtttataaataatgctctcactgaaagcactaaaatattgacatctaggtcagtatttactcttggtgaaggagttttaatttagagaagtattaagcaaactagtatagaaaattcaaccatggaagtcgaatatataacagcttgcaaagcagctaatgaagcgatatggttgaagaaattctacattgctctggaagtagttccaaaagtagaaaaactactggtactctactatgacaatagtggactggtggccaactctaaggaaccaaggagccataagagaggcaagcacattgagaggaagtaccatatacaaagagatttagtatagagaggtgacggtcttaaagattgcatcgaaacataaccttgtagatccattcacaaaaacgctactagcgaaatcttttatgggtcatacaaactaagggagatgtccaatttacttttag

SEQ ID NO: 110862 - DNA, 16306 bp, Cannabis sativa
  modified_base (27)..(28): a, c, t, g, unknown or other
  modified_base (13256)..(13261): a, c, t, g, unknown or other
  modified_base (14474)..(14477): a, c, t, g, unknown or other
  modified_base (16264)..(16264): a, c, t, g, unknown or other
aaccaagaattgccgttagatagacanntttaatatataaagatacattagttcttatatgaaaaaacaaaaataaaaatcatattgtaaaaagttagtaactttataatatacattacagtgcaatttgaaccgcagttatttaaaattacaaattgcattgcattgtcattgtgcagtttgacaaaaatacaaactaccatcgaactacggataattttaaatcacatttttatacggtgtgagcggtttgggcagtataggcggtttgatgaataactgtcttagcctgtatgaagaaatgtcggtttcgttcatattcatgcaaaacgacatgtagtcaacgtaagaaacgacatataaaacaaactacgataacaagtacaaccgtaaaaacgacatgtagctgtgtaataaaggaaaacgacgtgtcgttttttgaccatcgttggaagtgtaaaagagaagaaacagagcgaaaaaccgaacaacaatggctcccaaaaagaaacaacagcagaagcagaaaagcacggccaaaacgcaatcttcgtcgtcgtcggcgacggcttccggaggtcccaagcttcacatttcggctgagaatgagaatcggctccggagacttcttctgaattcgggtcggacggcgcagtctgctgcggctccggtggacgattccctctccaagactcagaaggctaagaagcttaaaaccatttacgagaagctttcttgcgaaggcttcactaatgatcaaattgagcttgctctctctgctctcaaggttacacttttttactttgattctgtgcttgttcgtatttgtattcgattcaatttttctgttttgtaaatgaggaaatgttaaacatcatattcaagtgttcatttttgttagatattgcaattcgtattcattgatagttgtttgattgttttcccgggaaattgtatgaaagaaaaagaaaatcttgtgttctctttgcttgaattaacttggtaatattgaatggtctattttccatttccattgattatcaaatttgttattgagttttagatattgcaattcgtattcattgatagtagttcaactgtttttctattgattatcaaatttgttattcttcttttgcttgaattaaacttggtaatatcgagtttttgaattgaatggtctattttctattattgagtaggagggtgctacgtttgaggcttctcttgattggttgtgcttgaatttgcctagtaatgagcttccattgaagttttcaagcgggacatttcagcacattgatggaggtaaattatggtggagctgttttgaatgtcttgttgtattagtagcttgattaagttggacaaagggtttagaggaatttggtttatgaggattttggaagtttgcactataatgttcaatccttaagcgattttgcaggtggttctgttcgcgtcttattggctgctcaggataattgggctccttctgtggaagcatcatcaaatatatttgaggatgaagtgggcatttctgttaaagcaaaggggcgcagtaaggatgagactttggactcatgtcaaccttctcaggcagattggatcaaacgctacgtggaacaacaagaagaggtattaacagaatgcattagcaaataaatcaatgatcatttaaataaacaaaaacaactaaaaatgacatgtatgtgttatttccaggatgactctaaaacatgggaagatgatttacttggtactgagaaggtacttccattttatattaagatcaaatgagtctacaaagttctgatcttttgtgtttgagatccgaagaaacacaaacattcttttaagtatcttttatagaggactcattcacttcgtagttgatgaattttgcctaatgtttttctccaaattcttagttgatgttattgagatgactctgtcactactctattttaatttatttaaatagatctctgaaccaaggtcctatgatgtgattgctaaagaatatcgtgatgcacggttggaagctatgagagccaaagaaaaaggtgacaagaaaagtaaggaacaggcaggaaatatcatccgcaaactgaagcaagagttatctgcattaggtaaaatgaaatttctttcatgcttcatgtcatactttttgtcattttgtatcttccatcagtgcttattgaaatttctatgcaggtttatctgttgacattttggattcagagtttgagaacgaacaagcttcttatgcagcttctgaggcaacaaatgtgagttctgttccccacaaccagtctgaaggagaaactcctggtgatgtagaatgtgcttctgcatttgtttcgcatgttgacgaatcaattgttgatggaagggtcatggagttgtgtggttccgaagaggtttctgtgaaagctactacatcagatgaacctattaaggataaagactctgcagaagaagagtccccagatgtagagctcggtgatttcttttcagaagatggtccccaaaatgaaagtctctctcttgaagttcaaaaactgcagcagaaagaaaaaatgagagaaatgcttagtgacaaaaatttggagaaattagctggtatttggaaaaaggtagtgtatggcgctgcgattacttgtttgaatatcttttttttctttttagtggtgtatttatgtgaactctacatgttttctttctattaagtgtactataaaaggatgatgctaataaaataacattgttaagtcaagactattaattacacaccattttctgatgttaatccattaattttacacattttttatgattattattatgcaagggcttatatttgcttgcgattgtactatcttatgtatgcttaattgctatccttttcacatcatagtgacgtagtctaaaattacagggagatcctcaaaagattcctaaggcctttcttcatcagttatgtcaaagatcagggtgggaagcccctaacttcaataaagtgcatggaaaaggaaatagtttctcgtatactgtgagtgttttgcgtaaagccagcgggaggggtaagagtagaaaagctgggggacttgtcacccttcagcttcccggtgagggtgacacttttgactctgttgaggtaatgacttatccctattcctgatatctttcttatggatgctttagcatagcatacagaaacacatacgatgccatttattatttactctcttaaaacaaacttatattccatttacatcatgtcacttaagtgcgtagattactcatacgaattattttggtgtcagaatgcacaaaacgcagtggcaacttttgctctttatcggctgtttccagatctcccaatacaccttgtgttaacagagccttatgcttcattaattatccagtggaaagaaggtaactctcttgacaatctgatttaattgccctgagcatgttgaattcatggaaatggaaatccatactcgcttatattttctttatcggtagctttattgaatatcagtgtgagttcttatattaaatattaatttcagtatttcttttggtttacaaatatatgttttcttagaaagtagttattattttggtggagataaaagatttttataacattggaactcttgcaggagattcatcagtcaacgttgaagacaccgaggaagatcgacgtgcaagctttgtagattcactattgaatgctgatggttctaggtcaattgttaccactgatagttcaattaatattcctcaagagaaatctcaacaatcccctactgaagaaagtgaaagttcagctgcaactgttgttgattcagctgttgaaagtatgctccttcatttctcttttgggtggtttgtaaaacaaaaattgtatctgactttcaattttataagtacttgctgctaattgattattactccttacttttgtatgcaaatatattttttttcctttgttattttatgtttctttcttcacaggacaaggcaaggataacttttaggtgtaagattgtgtatgtggtcttcatttaattataaatatatatatgtatatatatttgtgtatccaaatgcagaagaggtatcttaatacaaagcaaaactaaaattacataatacataaaatagggccaatccctgactagataagagcataaaacacctttattctctttgacattatattactatatatctacccaatgtcgtatttacagggaaaaaagtttgactgtgggctgatgaataattttacatggaaactttagatttgtatttgaagtgaaaaaagaagaagaagcaaagagagtgttttatatgctgcttctgtgttctttctcccaacttctcattgacattgttatattacaggagtgaatcatcagaaagaagtggaaagcgcttatttgagaaaagagcaggagaataaaatgaagatgcgcaagtacagggttggtatttttgttctttgctgacatagagatatgtgttccagataaattgttatgcatttactgatttacatgtttccctgtttcaggacatgttaaaaactagagcttcacttcctattgctcagctaaaaggtgatatattgcagctactgaaagataacaatgttcttgttgtttgtggggaaactggttctgggaagacaactcaggtatatgtttgttttctaaatgattctaaacaattaatggtgattctgagtaatcctttactggcagtcccttgattctaaagtgcacttacatgctcttctttcatttaaacattgtcacttatatgttatgtaggttccacaatttatcttggacgacatgattaactctgaacgcggtgggcattgtaatatcatttgcacacaacccagaagaatagcggtgggtacatataaaatctttacttatatatgtaagatacatctatgggcagtaaatccttgcaagctaaactttgccctgaatttggagcaattttttttttttctttatacctatccttgataaatattctcttcatgatccaaactgtttaaatcttttactgaataggaaacttagtctcagtttgtctgtagtgtacctattggttaaaaggtgcaaatttgagcattgacagaaacaaagtatgttttctgttttatgctcacataaggcttccttgttcaatacatttctttttgagtctagataatgtgattgtatgaaattactaatactaactaataaccacaagggagcaagttaatacattcttgtggccatctgcggcaaaattaagatactattttctttctgtttatttaaatttatatatacatttaaaatgttattaatatataatattaaaatgggtggtttctgaacgacacttttgtgttttgctgttattatattataggctatttctgtagctgaaagagtagccgatgagcgttgtgaatcttcacccggatcaaatgattccttggttggttatcaagttcgtcttgatagtgcaaggtgcttaaattactttttccccttaatagttatgaagtccaaacacatgaggaactttcataaaatcgcttcataaattccttattatcgtcttgtaacagttttggagagagtttgccattaacatttgcacttataatttatttgttaaatcacacaggaatgaaaaaacaaagcttttattttgtacaacgggtatccttttgaggaaaattgcggtgagccctttatcttctatacttgtaattgatattaaagttgccttacccccgttctccacacagaaaactatctaaaattactaatttgttcaattttcagggagacaaaaacttaactgggattacgcatgtcatagttgatgaagtgcatgaacgctctcttttggtgagttggtttattttaaatggttttgctagaaacattgaatgttgtgactacacttgatttgcacactattcaaagttaaagtcaaccaaactcatctttgcagtttcagcttaggcatttgctgcataactactacaaactaatattcatataaattgatgcctctcgatactggttacgattgggttgttaataggacaacctaaatccttaggcaatttatctgattgtgaagataaacttactggtgttttttttttggggtttaacagggtgactttctacttattgttctgaagaatctgattcagaagcaatcggctcagaaatctccaaaactgaaagttattcttatgtaagccttacaatctaaattttcttctaagcttgttaattttgtagtttatttatttattgtgttctctttgttcaggtctgcaactgttgattcagatttattttcaagatactttgatcactgccctgtgattactgcacaaggcagaacacatcccgtgacaacttactttctggaggatatatatgaaagtattaattatcggttggcttcagattctccagcatctgtaagatatggagcatctggaaaagagaaggtatttcatcttttggattcttgatttccatgtttgtgcccgagctttattactcatctttcactctttgataattatgtcaatagtgaaaagtttctatcacttatatcaagtaaatgtctttgtacatgttcgatcaatttgaatataaactaaaagcttataatgtttgtttgtggaagtttatttgggttcaaagcttacaagtagaatgtttgtttgtgctgtcagcctccacttggtgaataattaaagcattcttttcccatttgatttgctttgcagttttgttctttgcaatattaatataattagagaaacacttttgattttctattgaaatttctgttgtattatatatatatttttctttgttatatatatatatatatatatcaatttctgtagttttttggtctctgaaaattataggttaggcggggtgcctagcttaattgtataaacatttgtgtatatatatatatatatatatatatatatttgttttaacttattaccaaatgttgaaactatgagatcagagtggtccagtaaacaaccgaagaggaatgaaaaatcttgttatgcaagcatggggtgacgatacaattctttctgaagaacgtgttaacccgtactatgtgccagagagttatcattcatatagcgagcaaactcaacaaaatttggtaagtgcttatgagatgtgtattctttgacctgcatgcatttacttcttgtttgtctgtagattttataataaattgaatcggcttttgaacagaaaagattgaatgaagatttcattgattatgatcttcttgaagacttggtctgtcacatagacgaaacctgcagtgagggtgcaatacttgttttcttgcctgtaagcccgcatcctttcgctatgaattacttgtgtgtacatacattcttctaaatatttaattaattatgtatgttaattacataatacagggagtgtttgaaattaacatgttagtggatatgctagctgcttcttatcgattcggtggaccatcttctgactggattcttccattacattcatctgttgcatcagctgatcaaaagagggtgttcttaagaccacccgagaacattcgtaaagtaatttactatatcttactacttacccttgctaattcttctttagttccacatttatcatttccttttttttttatgtaccggcaagaatgttgttctgatgtataatgattgtgtgcattaatctggtgaaattaacgattgaatgttgaattcaatagcagagaaacaatttttatgcactaaaaatataatgttggatttagagtttttattctctttaaaatatatttatatattaatgtcgactcagaataactcctatactagctatttacatctttcgttaatactctgtatttcaggtcattgtagccacaaatattgccgagacgagtttgaccatagatgatgtggtgtatgttattgactgtggaaagcataaagagaatcgttataatccacagaaggtttgttttttgtatcttgtataataaaaatgttgttacacagaagaagctgcctatcaagacactaaataaaagttcaatgaaaagttattataccaaaaaaagaatatatgatagttgcagtccgagctgaaatccttattcttttcaccactatcaaattacatttcactaaaagaaatacattgctagaatcgcacattcaatggctttcagttctagagaatgactagatttgatcattgaagcaagaagttgtcaaaacaattcatcattttaaagcttctgtgatcaaattgatcattttattattcttttatttatatcaatagaaatatagtgaagataatgaagatagtttgttgatcatgttcatatgttataaggaccagtcagctaagatctgattgttttattactgtagaaattgtcaagcatggttgaagactggatatctcaagcaaatgcaaggcaacgccgtggcagggctggacgtgtaaaacctggaatttgcttttgcttgtatacacgtcaccgtttcgaaaaacttatgcgaccttttcaggtactttgcccagtttttttcccctatttatagaatatgttttgtcacgctcttgctattcctatttcattttttttttctaatgtgtaatgtactatacccaggttccagaaatgcttcgaactccattagtagagctgtgtttacaaataaaattactttctttgggattcataaagccatttttgtctgaggtaagtataccatcttaaattacagggttttacattgacagttatgtctaataggttctattcattaatttttatgtttcaggctttggaacctcctaaagatgatgctatgaagtcggcaatttcattgttgtatgaggtacttattaaattcgaaatcgccatcatgaagattcatgaaaattctgctttgcctacatgtctgtttcttctcaataatagtgatttacttgccaagttgattgctttcgctcaacattttactttattatttgctagttttctcttccagtatcttggttattttgtttttttgtaaatatttggttgacaatttagaatcaatgatttatattgtttggcatgcttaacatcttggtttttgcattagtcttaattttatgcaatactctatttagtttgttagtaaactaacccttgagtctccaaattggaatttataaccactttctgtttacataaattgcttctgttcatatgtttttttttatcagttcacactatttttgtgtatctttctagttattaaatgcatttcattgtttttctcaaaagtaaatcgattctaaatgttgggttatttctataggtcggtgctcttgaaggagatgagctccttactcctcttggacatcatttagctaaacttccagttgatgtattgattgggaaggtaaacaacttccattttttcctttcataatctgtagagtgtaatacaattttgatatcgggttattatgtaaaatataattggtaagaccgagtatgaaacctgctaaaattccagcagcagccttagcttcagttttatttttgtcattattttcttccttaacatttcatcccttatctctttgtcattaatatctattcaaatttccttttgaactaaattttttatttctgtggtcttctgcaactacagatgatgatatatggtggaatatttggttgcctgtctcccgttctctcaatttcggcatttttgagtcacaagtctccttttgtctatccaaaagatgaggttacaattcttcaaaagatatttagttgtttattctataaaattaaatttgcattataaacctgtttccttctctgcttaatttcagagacaaaatgttgaaagggctaagttggcgcttctaactgataagcgggatggtcctactgattcatatgatgttgacaagaactctgaccatctgttaatgatggttgcatatgtgaaatgggaaaagattcttcgcgaggttattgtctgttttacttgtattcatttgtaatatatgatttacttggttccagcggaaaggactagtccagttagttttattgcaatactttagatatgccaagcttgtcattataacccacattgaaggccaagtgctccataatatcaaataaatcattttcatctttggtaaatttatcaagagctatattcatagtgttcagaggggacttattatccatcgttggcttctatggtagaatcagttggtttgtcagaagtatcatttactgtccatttgaaatccggaaccattattgattacaagcttacatgttaccactgatcagtatatattgcaggcatcatttcaaaataaattgtatgaacataacatcgtcctgttatttgcagaaaggggttaaagctgcacaccatttttgcagctcttattttttaagcagttcagttttgtacatgataaggtgcagtttcttttctggagtttaattgtgacaataatctgttattgaggcatattgtgtgaacagtgtttatagtgtttaactatttaatgatatattaagaaattcattttaacttacaaaagggaaaacctttgaaaagacttgcattcccaaaattcatgggttagttcatcttggagggttgattcattaaatgcgtttgtgtttctaattctctgtgtttcagtaaaaagaattataaattgtatgaagttagtatttttcaacgatcctaatatgtattttcaattttttgtacctggttcagagatatgagaatacagtttggaaccttgcttgcagatattgggctcataagttttccgaaaaatttccaggtatgtggttttagtatcattcaagcaacatagcctaactggtacaacaacggtaaactatctgagattatttgtgttatgctcttgaggtttagttaaaaaaattgttttcatgtttcaggttggacggaagagagaaaacattgacatttggctttctgatccatcacagccattcaatatgtattcacatcattcatcaatagtaaaggtaatacatgtgatttgcttctggtaagatttgatcataatcacacaaaaccagagacatttactgggtagtcctccatgaatttcatgtttgttggaaaatgggagaaagacgatgttggtttgtaaatctttgagctttggtccatttagtactagggtacatgatattgtgcttctattgcttgcacactcagctgcaaatgcttttttttcgtttccttcttcttagaggagtgtaccactttaaactccgaggtttccttactgtatctaaaatagcagattacttggctctgttgttatccatgattaattgaaatattttattttcaaactctattcatctttgtatcataagtacattatgcattccccgaatcagagtcaagtagttcatgctatgtccaaatatgcaggcagtattatgtgcaggtttatacccgaatgttgctgccactgagaaaggaattgctggagcagcacttgggagccttaaacagtctattggtttgactagtaatataatctggtacgatggaagaagagaagttcacatacacccttcgtctatcaacagtaactggaaagaatttcgatatcctttccttgcgttccttgaaaaggttttcctcattattattccttggatttactcatatactagattgtatttcatctcttctattgagatatttactttaatcttttacgtaggttgaaaccaacaaagtgtttcttagagataccaccatcatatctccatactcaattttgctatttggtggttccattaacgtccagcatcaggtatgtctttcattcaataatgaaatttgtgtaagttattggtgctggtgctacagcttgtggttccttttttttccattttctgctcatatttatcatcgagtacttcgctgtttttcgtcattgcagaccgggcttgtcatcattgatggatggttaaaattggcagcaccagcccaaattgctgttctgttcaaggaacttcggttgactcttcattctattttaaaggacttaataagaaaaccagaggtattactaatacattcactatcttgtagtctttaaagggttatcttttccttctctgaaaacttgttatacttctcttgaaaagttaggtggcgtttggttgaaggtaatgaaatggaatgggaatggagaaacaataatttttataccatttcagtgcaacatgaaatttttttcaatgatcttttaatattttgttttttatgtattttaaatttgattccattccattgcatttctatttctattcacattttcatttctatttttatgttttcatttttctcaattaaacaccaccttagttctctagtccatgacatttaatgaggagctcactaccatatatattttacctgttggcccaaaaaattataatcatgtagtctctaatgcttgaatagtgccatgcatgatctagatttagtatatatatggatatatggtctgagtagttaatgattcccatgcttatatataattaattaagcttttgtgtcactttgtttggcccatcacctagattgacaatgttgttacttgttagatcctaggttaggtataacctattctagagagaatggaaaggctaggattgttaattagaagaaagttacgaggtgtcccacatatttttatgaaaaaccgctaaccatttgtaaggattcatctcgtgatggtattgaacacctctggtgtctaataacaatgtttgtagttgaaacatggccagatgtaaccaactaattaggattaggatattaaataagctagcctaataagggttagatcattatctctaattgtcttattaaaagagttttgactctttgggagagaccaacccttctctaaatcttcatttcgaaacctatattagtgtacttaaagagaaatgctaaaagacactagtggtgtctaacacctttctatgtgttaatatcgctatcggtccaattaagtatcaggtcttatataatttaatataannnnnnttagggagtatcgctaaccaattgcaagacgacatgtttagaagtactaggcaccactggtacccaatagcaatagtttgtacttaaactacttattgtgttctacttcaataaacaattacctttgctactagttcctattgaatgtcttttacttttttgttatatttatttagtcaataattaatcaattccaatatgattcattttccattttttctttgtgccccagaatgtgaatgttggttctgacaaggttattagctccataattcatttattattggaagaagacaaaccaccagcatgattcatctggtttttgatccatccttgtgttgtcatctcaagaaccgagctcttcgagaccgagtattggttcggttctggtggatcagagtcgtggacatcatcaacagccgcggcttaatgaaatcgagtaatggaattctttcttcatcctaatcaagtttaatgtctgatgtcctaatacatttgctctaactaattggtataattcccattgatgatgaatcttatcaataaaaggaaactatcatatacatattattatgcaaaacatttatttatgaatgaaagttttgctatgaaactattatattagtttttagttttttaattaaataaaaatgtttaaagtacttagaggattttttaagttgaaaaaatgaaacaaaagttggtataatcctctttccaagaaaaaaaaaagacaaatcattatctgaaaagagttataacttgattaagaagcattatcttcttattaaataagcataatttttcttaaaaatatacttatcattctttgttttttttttattcaataaaagtaaagtaacaaaatattatttattaaacaacttaatctattcgaattcgaagagcaagcacaactaattcatgtgcagctatataagccgattaatatacatggatcagacactttctagataacatacttgttacatcttttaataataatctcatatcactggaaaaaaaaaatctcctaacaaaaatagacacaattgctaagaagacataatcaacaagaacaacaaattttttttttaaaaaaactctacccaatgtcactaaaattattagacaatatttttgaattacttaaaatcttcatcttaacataaaatattcaaaatttcataaaatgcaaaataataataataannnnaataataataataataattgcaattaataaaaattaaatagcaactaacgaaacaatttaaatcgcaactaaaattcacagttaacaattaacaaagtaagtatcgatgcaatccaaaccataaatttaattaaaaaaaattaaaaaataatattgaataattcacctaaaaatcaatacactacactcattttttttttttttaactttatatatattttttttctaattattattattatttatttgttctctctaataataacatcccaaatatctttcttcaaaagaaaaatgagtttatatatgtttctaacttcttcttctaaaccttaattggctgctcatcactctctctctctctctaaaactctcactctttctctctctaactgtgtctcccatggcggcaaagagagctactttgctctcttctctccctctctttctcattctcattctcttctctctctttctctcccatttacaacttctcactgctacagattcccacttcgaaggtttcgaagccgatgaagaagaagaagactcatctctcattcccgattccctccctcgttctcctccactgactcaatctcacctcgaacccgacccgattccagatccagctccatcggatcagaatccggatccaaatcaaccctccgatcttcttcctcctcctccgactactactaagccttcttctactaacttcgagtattgggatgaagacgaattcgaaggacttccaatcgaacaaccgccgcctcaggaggaagagacttctaagagtacggaacaacaacaacaacaaggtacagtttccgatcccaaagcatcggagagtcctaagacgagttctgttaatactggtccgaagtattatacgattgagattgtttgcggaagctttttgattgtgtttttgattaattattttactggtaaacgtgagaatgagaacatcgctctttcttgggctggtaaatttgctgttaaggattcgattttcgataagaatttcagtcttcttggaatcagtgaaggtgatgattcgcctttgttgcttaaagaaggtcagaatgtgtttaaattctacgctagtggaaggaggtattgtcaggggcttttggctacaatggagttgaagagtagacatgatttgattgctaggatttataacatggttgttccttgtaaggatgagattactttcgaggtttatatgaatgatgatgctatggatcatgtgattttcgctttggctaagaagaaggcggccaaaactatgcagaaggaagttagagatttgcagaggtttgctagtgttgtttctcctcctaatgggagaaaatgggttgctgatgaattgagtgttatttctgagtctaaagaagttgcttgtgatttgatcactgatacagttcttgatcaggttagtttgttggtttgtttttctttctatttactgattaatttttcatatgggtgttgtttgttctcatttgtgattgcatttagagtggcaagattgcatttttttccacttcatttgtgtgtgattgcatatacgtaaataacttgggtgttttttgttttacagaaattataaactaatttcttttacatgttgggaaattctgaataatttaaagtatagaaaataggattcgaatagttttacttttatgagtttgtatctgactattttgagatttacttttgatgacttaaattattcagaacttattgatgcaaaggtggcgtttggttggaggtantgaaatggaatggaatagaaaggaaataattttcattccatt

SEQ ID NO: 110863 - DNA, 3359 bp, Cannabis sativa
  modified_base (604)..(626): a, c, t, g, unknown or other
aattttgctatcaatttttttatattcttattttcggcgtgttatatttttctgaatttcttaaaattttacaagaggtcttaaataactgtaatgtacatggccataaaaaaaaaaataaactaaaaaaatttctcattctaaattggcttgagcggccaatataaaaatgaataaaaaataaaaaaaattcatcaagtttttcaaaaaaataaatcatcataaaaaaaattatgaaataatccccatcaaatgcatatctaaattttgtgtacaatccattgtttttaattattcattggctaaatttccttccccataaaataaggtaaaaattggatgccctactatagataatccctatatttatatcacaggaaattgtattcaaactttatacatttataacctagctagcataaatatactcaattcataaattaaaaacttattttagttataattacactttaaaatttaatttattaaaacttgaattgcacacctttttaaaaagggaaaaatgtacacctcatttaataaaaaaattgggataatgtttgtggaaatgaaaatgttagaattttattattattattattannnnnnnnnnnnnnnnnnnnnnnattattattattattattcaagaaatgagtgcaagagataacttcatgctcaatatatataaaggtcatatttttttttttggtaagtgagaaattgtattgcacaagaatcaaattacaagagtcaaattaatttgaacaaatgaattgagaacactcaatttttcaaaccaaaatctattaagtatacttattttctctcttttaaaattagaaaatttatcatatatttctctcataattctatttacaactactataatagtatatatttttgactcctaaaatactaaatttcagatctcccatatagtgtaaactgttgcattaataacaattagatacacttctcagcaaaagctttgaatgatggcacatttttaactatcttaagcaaacattcaaatctttccactttgtttctagttttgcccaacaaaaaagccttctactaatttcagaactatacatgcattcaagaaaacatgatcatgagttttttctgcttggaattacgcatgtatcattagaagtgataccaaacttcgctagcggtttgctatcttttattacaagttaactaagtgataaatttatgtttaggtgcactaaactgattccaaatgaaggaattccaagctttttgcatattctcggtcggccaaagcttgagacaaagctttgaaatgttgaacttcattaaaatgaattcagcatatgatcaattttacctttagtctcattttttacttcaataattttcttccaataccaactcccactatgtgaagcattatagctccactaatcttgatcttttatgtacaccgaattgatcaatttaacccacaaattatctttctttagagcaatatcgcacacatatctccccatagttctaaagttccattgctcaatattcttaaaccccaaaccacaataggctttcggcttgtaaacattacacaagaaactaaccccgattcactagcttcaaccttacgtttctaccaaaaacttatacagatgttattgattcttcccagaatatacttaggcagaattataagatttgctcaataagtgtgtgcaactaacaaaactgagttaatcaaaatgcagcgaccagtataagaaatatttctagaacttcaggttcgaattctagccaccattttctcaataatacaatcacattcaactttagaaattcttttagaacaaatgggaatacccagatatctaaaaggaagagaacttttagcataccctgagcaatcaagaatgtactggacattatcttaagccattccaaagtaatagacatcagatttactaatattagcaggcaaaccctaaagtttctgataagctcttaaaagttcggagcatgatcattattgattggacattgcctcttgagaaaagaagaaggtcatccccaaagtataagtgattcaatttcaaaggagttcaatgcaacacaacaaggatgatgcttgaactcctttctcaaagagattttagccatcaacctagagaagttttccaatttcaagtacaagtagcaaaggtgacatggggtccccttgcttaggacctcttctagaagaaaagtagccatgaagagtaccattttaataaggaaaactttggcgtaggtacacactcaatgaccaaatccacaaaaggaagaggaaagtttagagcctctaacatctcccaaatgaatttccattccacagtgccataaactttcttcaaatctaatttgaccataaaagaaggagtattattctgccgaccatatgcttgaccaagtcttagcaaatcaaaatattgtgagcaatatactggccatgaacaaaatccccttgattagatgcaatcaaggtaggaagaatcaatcttaaccgagcacaaatcaacttagtcactgttttgtagaccacattgcaatatgcaatgggtctaaaatcacaaacactacttggacacttaaccttaggaataagagtttaggttgtagtatttacctccttaagcaactttctagtattaagcacagaaaaaaattgcagctgtgaaatcttcccctgtcaagttccatgtttctttttttttttttttgaaaaagatgctactaaaaccaattggccccaggactttagagtcgggaaatgagaatagtgtagctttaactgcctctattgtgtacgactgtataagtaaataagcttgactatctattataattggtccctcttgaacaataccagcaataacagctcttctattagctaatcttgggcccaataattgagtatcatactctaggaagcactactgcaaaatgtgtaatttgcgtcggtcaacgcatctccctaaaattgttggctgaagcaaaaaataggcagatattttatgctttagtggataaccgaagtaaaaagaaaataattagcgtcagctactacactaacgctaaaagatgaaccgaggcaaaaagtaaaaaatttaaacattatcttttacattttgcttcggtggaaaagagacacaaattatttagcttcggttgcaaacagaggttaaaaagtttgtgactgttatccactgaagcaaaatgttttaattttgaaatgggcttcgggcccaattaaaaaaccctaacttaaaagataaacttaacctaaatatcacacacagacccacctctctctctctctctct

SEQ ID NO: 110864 - DNA, 8813 bp, Cannabis sativa
aacaagttaaatttctgtaaaaaaataacatttacatcattttttatttattttagtattttatttaatagaaaaagaaaaaaaacacaaatttaaagattttatagcattcctcttaatgttttttataaaaaataccataggctaattaaatttttatgccacaaaacatatatttattttccctttttgtaaatagcccaataatattcggctaccctaactgttagggtttttatatttttaatctctctacgacggtaacgggaagtgattgaacgttttgggcattgtggcggtggcggtagcggggtttagaagcgggtgtggcctagtctgggagtaggttatttagcttagcgagtgtgccaaagttattttattttattacagttatggtggatgatggttctgacaacgggcttcatgaagaaggggctccaaagtttgagctaaaagtgaatcatgaggctaaactcagagaactattacataaaattaattcactggaaataaagttatgctcagatgctacaaaagagttcatcaggttacttaaaggtaactctggaagtgagttgcttaaatattatgtgaggagttcatgtaggtgctcagagcttctagatgcttggaagcttcaacgaggaaaacctggtttatcatacattttaaaattaatttttgttattttgagtcatcctgatgggaggtatagacccaatgataaagagggtttagttataagtagggttcttgataagtttgctcgattgattattgaagaacttttggaagatgtgtacaaagagctcaatggtaaagaaacaaagagccaaaatgcagcacttcggcttatggcttcgattgtccggcggggttcagggttggcttctgatgttgctaagaattttgatttcaaactcaaagggttttctaagctggccgagttcaagaagaagcaaaatgagaagaaagcaaaacggtcttccagaaagtcttttgttgggtttgcaatgtcatttttagaggtggggaagccagggttgttgaggtgggtgttgcagcagaaggaaatgtattctggtgtacttcgtgggcttgggaatgatgatgacgatgagactgttgtttatgttctgtccactttgagagataagattcttgttgaggagtcattggttcctccaggtcttaggagtgttctttttggtagtggcactttggagcaattggttaatatttccggaaagggtaatggtggctatgctgcagagttggcatacaatattcttgttttggtctgtactgatccctgtaatggattgatgcctgatcttacaagacacccaagtcctttaaggggtaatccaaaacgtcttttggggcttatgaagaaactgaatgcaactgagagcatctttcacagagacttgattttggctattgttagtgggagaccctctttcggtgctgcatatatggaagagtttccttacaaccttgaagattatgcatcacctaattggttagatatcttatcttattttattgcatttcctattttctcttttgtcatacaaatttgttatttaggtatttccccgttgctctctatgtttctattatgactatgtcatttgcaggttttcaattgtgactttggctgcaaatttgatctcctcagttggaaatggcctaaagtttgatttccttgcttccagacctcatgatctgctatggcagagtatcttgaaatgcttgtgtcctcgttcattctcacggtcagtaatcaataaggggttgcttcactcagattttctagttaagcatggaactttgcggctgctttttgaagcactgaagttgctagattctttaattggggctataaatagtcaaagtagttttacttcaagtgatgtagttcaagtgaagcaactaattcaaaatgaggttcgaacattgcttcctgatccacaagttctgctgactctactttcatctctgagtagccaatccaaaaatcgtgtcagttctctaaagaggaaatcagactcagggaagcaggggagagatgatgtgaaaaaattgaaaacagatcatataaacaacacatattcagatatcattgtgggtggagtaaatctttctacagaccttgctccatttgaggacagtgacagaattataggtacacctagtgcagatgaatttgacgatggaaaggatattgtaaaaattcttcatgaaatttgggggccacacctgtgcgatatgtctacttttgcgatgagagatgcagagatatactttcagtccaagctttttgatgctctcaaaacttattttgtaagttccattagtgttatccatactaaccttcccagaatttgaataatcttttcaaaatttctttcaggatagcttacactgtaattgattcttgttttgcagcgagtaatgccaactgttttggagggatcattcgagttccttataaatctcctagttgatcctttgggactagatactaacttacagcattctctattgtctttgctaatagaatatgttgtatggtctcctactggaactcctgtatcggctcctcctttgatgtataaacatcttcagtcatttatgacattgttaatttgttcacccttaagtgaagttaagaataaagcttgtgatctagcacaagcagcgatgctaagtactggtgcctttgatagaaatcttcatgaaattagatcatggttcttgtttataccaggttatggcagaagaaattctgatctacacagtccaggtgtggaagtattacagagcatgtgtcaggttgtcatctcattcttatgtgatgcaatttctactatgggaaataatttattcaaatattgggacatggttaagcttcgtacctgcaacttagaagggctaaaaggtaactgtaactcacatagtcatatgtgcttcttagtgtggtgaagtaattctgttcacttttgagtataattgttacatgctacagtttgttgttttttctgcatcagtttataatttgttttagaaacttgagagttgagacatctaattattctgtgatatggatttcaaaacaaatatgtgctatgagagtatgattaaggacaaatctttgagatgtgtagcatcatggtaaggctgaggaaggccatgaaagaaaagttggtattttgactattcacgatgatatattaaaatagttttagcaattttgttttccgttattggagattgtatatgtaatttcttaattttactcaatatagccgaagataaatgagaaatttattagatgctggggtgactattttattctatctacttgtgatttgatttgtaatgattttttgcatgaaaagtacagttatgtttgccagattgtttgctgggatcggttcattcatttttttatgtgttagattagtaactagtgcattgctgtgtttgattatttcttttttattatttcttatataattaattgtagttgtatggaagtggccacactatgaaagaagtgagaggcattttagcttcagttgatgttttttaccctttattgacctatgacttgtcttatgtttatccctttattctggcagatagatcacctgatttcagccctcttgttgtatgtatactgcaaaagtgcctaaggttgcttgattctaaatctgagacttttacatcgcctgaaaaatcaatgatatcattgtatgtgggtaatacactaaaatatatcttgcaaactcaggtaaacagtgtagcattttagtttaataattgcttgctatccataaaaaaatctgattggggaacatattttttataggtagatgcgaggttactgtctgctgtagttgattcaatgttatctgagagattttgtgaacatagttctgttagtgatgtttctggtgctgccttctgtgagtggagaccattgaagaatttatttcttttatcgcaatgtatatctcatccagaaacatctgtcttttctattgataataaagctataccagctgttagatcttttggagataaagttaaaatattcataaccagtgggaacaatggtgaaatagctggaatgaccaaagattttgcttcctcaatcatttgcgcaacgcctgaagagatttcaaaaaactttccagctgttgtgactgtattaaaaaatctttttggtgtttccacatatctaatgccatctgtgttctttcttgatcatacgtttctggcaagtatttctaatttatggcctgatatctttcttcttggcctggaaatggcagtatcgggtaaaagcaaagacaaaacagatgatgccggcggagataccgatggtgcttttgttgcaggagaaatgatttgtgacaaaggttttgatgcaaatgaagctgcagctacctttagtttctttttaaagcagacaccttttcatatattattaccttcccttatgtgcagtgatggtccttattccacacaccccgtgaaaataaaagaccttctgttggctaaactggcagagtggaaatttgataactgctttgtctcttatctgcgccttttgctattctggattcatcagttacaatcatcttatacggttagccctttagccaaagtccaagagctttctgaggtttgctttattctcttaaaagacttgttgggtcagttacatttgaatggggattttgattctcccagaactactagaattcatttgtcaacccaagaagtccaagacctggctgaaactatcttttgtcatcccgcagtagagatatcactttctcgcccttttacctgtgagatgggcttgtcaaatacaagccttgttgacaatatggatactttaattaatttatccaggcagagcgttcataagttagatcatcatgttttagatatgctgggaacagcttatgagtactttctttctctttgcgacgatcagcattttaataccaaacatgaaaaaggcattgggaaacatcttaggaaagtttttaatgttccaatccagagggttattgaagcggtgaaggataggttcaaggtatgcatttgcacagaaaatatgatgcccctcctccaaccatactatgctttatatgttctgaatcattttataggcccctttgagctgctcgatttagtgcagtggatgttcaatagagtttccatggatacttatgcagattggaatgctaacaggatatctgctatttcttttgggttttgcattgctgctggtgctttcagaaatctatctagctatttggtgcagccattgtcaaagagacaaaaatacaatatactttgggaaatggaagggaatagaaatgcaaagaatgttgaggagatctattttctggtgacaaagtttgccttgaaagttaaaacagattatgcggatctctgcttgcttgaggctgttaaagctgcacacagacaaaaatatgtgcagcacgatgattttcattcttgtttggtattgtcaagagttgtcataaacacttctgtgaaaatcatttcccattgcatttatgagacaacaaagaccagagctaagttattgttttttctcactgatgtcagctcccttcatatatcaatctttgggcatttattttttaatatgatgaacaaagatatatctcataaaagtaaatttgtggaggagctccctgaatttgctccttctgatgagcattatttgatgcttctacccactgctttgtcatacttgaattcatactgcgtgaaatatggattgcagtattacaagcactttagaagtattccttgtttttattcgaagtttcttttgaaaagtcttgtcaattggaagagctttgtgcttagtgacgtgtttcaggaggaatatggtgagtttgtaccatcatctactgaagaacttctcaatcttgtaaatgatagtcttcttggaaaagccatccgtatgttgcagtatcactttgccttaaatggagattcagtaaaactgaagaagcggctgaagctatttaattccatattcctggattcttttgaacgtgaggagctgatggactgtgattttgctgaaattgattcttactcacttggcgactcattgaattttattataagagttattgcaaagatttcatttggaaggatgttgttgtttcccatttgtaatcaaagtcagttacttccattagaagaaagcggagttttgaaagatattcagatggaaatggggccaactagagatgaaagttcaaaaatgtacttcattaacattttagtgggaatttggcaattgattgttaaaaagttctcttctgtttcttatagtggtcaaaagagcacatatgttttgcccctgtatggatacttagaagctttcatattaagaagtattcttgaattaactaaagatatgcatgagactcttatccagctagaatccattccctttctagagcaattgatgaagtctgctcttagatatcgatttgaagatcccacaactttgaaaatgctccaagatatcctaactctgttgtctgatggggaattttcacgtgacttttacctccagcttctactttcccactcccaatttgagtctagtgttcagtcggtctctctctcaacaaatagttcgcaacttggggcatttttgaggcctatatctggtgttctgagacatcttgtttttcctactgaaaataatgcatctgatagcagttatttaaatctagaatcaactgtgttgtacatgagaaagttggagcttattaaattgttgcggacactctttccatccaaaccacatgagtcggcttttgatttggaaaaaagtgtaggcataaatttcagaagtctgcatttaatgcttttgtcttcctatggtgcaaagcttagcaaaattgatatggagatatacaatctgatgttggcaattgaatctattgatggattggaggctgaaaacattgctggttctgatcacctgtggggtagtgctgctttaaaaatagaaaaagaaagagctttggaacatgatccatctaatgtggtggctgatgatgaagcagtaaaagaacgtcatagaagtcaatttagagataaccttcctattgaccccaaaatatgtgcttctacagtgctatattttccctatgatagaattgcatctaatgaggctataaccttggaaaattttcaatcaagtgattttacccgtatgcttgcggtacgtcctttatttttagttcaatgataaaagtatttattgggttgagctacacaatctttcagtaatttgtattctgtttagtcttacttgcataattctcaataatttgtatgtagaattatgcccagactagtacacctgatgatggaaatctagagcgatatgatcctgtcttcatcttgcacttctcgctttatagcctatcagcaggtcatattgaacccatggagtttgctggtttaggcttgcttgctgttgcatttgttagcatgtcatcacctgatgatgggataagaagattggcttatagtattcttgggatatttaagaaagcactggaggtagtaacttctggtttactatatttgtcttttctctttttttgttaagtacttgatgtagagctgtttaattctgtttttaggatgaccacgacatttgctttttttttttcaaagttttttggtgattaatgttgaaactatcttttcagctatgtaaaaaacggaaagaagtgacacggatacgacttttgcttagttctttgcaaaatggtatagaaacaccatggcagagagttccctctgttgttgcaatatttgctgcagaggcatcatttatattgttagatccttcacatgatcattatgcaacaataagtagggttttgatgaattcgtctaagttgagtatgaaggtatgggttttctgacatgaatatattatgtactgtttccattttatttttccctttttgttttaatagagttcaaattacatattgcagaatgtacctctttttaatgaattcttctggagtacatctgttaattttagagcagaaaggttgtggatacttcgtctcctatatgcggggttgaacttggatgatgatgttcaaatttatacgaggaactccattcttgagactctaatgagcttttacttttctccactttcagacaatgagtccaaggatctaattcttcaggtaatctcttatctaattgtgatgatttgctaccaaataacaccgtcacgagcaaagcacatctctcaaaaaacagtagaagattgagaacaataattttttgatttacttttaaagagaaatgcaaacactcactatctctggtggtattcaagagaccacccctctctcaagagcaatagctcttaatccaaattcttaaaatacataatacccttaatctctcctacactatttgattacactcattgtttctagaaattcttttaatttcctcaaaatcaccaacactcttttatcacaaaatattgtagaaaatctttaaggctccccactaaatttctttctatctgattctttattgggcccctgacagtttcattactcattgttctatcttagacacgtggataaaagttgaagattattgtctgatctttagtacttactattgtaagaattactgttttcaaattttaatttgtgagtttgtctttggaaagtact

SEQ ID NO: 110865 - DNA, 2167 bp, Cannabis sativa
tccttactcagaatttcttcagttttcagtttatttggaaaatttcttcaatgcaaaagagaaaaaaaattatgtttggtcatacaatccaggtgaaaatgaaattattaggaactatattgaacatgaatgcataaatagaactctgttattcctaagatgtcttgacatgttgttgttggataatcccttacctcagtttggaattctctttccccctgtttagaatcagaagcaagcaccttcacagctattatctctccagtagccattgttgctttatacacaggaccgaatgaaccttgtcccaaaatagtggtgaaattttctgtagctctttgtatatccctgtaaaatatagtatatacatccataaaatttgatagaccctatatatagactgtgtgaagttagtaatttttaaaatttgaatttatctgttaactctctttaaatctgaaccaattacattctatctgagcaatcaatgcctgttagttcattccaatggaaataaatgtttgacaaatgaagaattaagaattcctacagcatgaaacatcaacactccaaactaatgaaaagtaaagagctttacatacttgtaagagtatctaagcaagcctgacacagaagcaattcgatctttgttttgatgattccaggaaaagagactatttttgggaaggctttctgatccttgattcactacagaatttgaaagagaagcactgaagtcagtacttgtccctaagccatttgttcttataggaagagttgtgggactacgttcatttgcacatcgtcgaagatgagcgtgtttcttgtaccaacgcaagccccaaaataagagcgaagctatgaaaataccaagagctacaccaacagagattccaatgacaaccagatccgctttatgaaccattctttggtctctttggaagttcaggcaatgagaacattttgcgaggcaaattcccacaggttctctatcataaacaacacacaatttagataatacagccataacaaaaaattaaagaataacttgatgatcatcaggtaaacttctctgccccatgatcataaaatggcaagcatatagttaaacgaaccaagaagtgaaatgtaacaattatttgttttacacttgtcctcttgcagaatcttagagcatttgggagatgggaaactataggaacttgcatgacaagtctccacgaggaatcaaatccaaaacatgggagcaaccatggtttgaccactcaacacttaaccattaagtgtaagtaattatgccttcaagttcaacataaagactcaagaatctgtgctttcttactacaaaagtattatctatattcctcacgccctcatttaatacgaaaatcaatctacatctcgataaatatcaatcagattatttacaaaaagtcaggatacaaatctaccagaaaggaaaaggaaaacataaaagcaaaagattcaagtatccatgatcgatcatctaaatccatatgaagactaatacaataaactcatatacaatataacgacaccccagaaagcaaaaacaccttctaaagcacaaaacgtcaaaaacccagaaccataatcagccaaaagggcgcaattcagcccaaaatttcaagaaacaaaaagaacccatgtacataataagaacaacattcataccttctcaacccaaaaaactcaacgccaattccgacaatctggttatcttcgtcgttgttttttgcaagtcaatggtgtacaactcaaaagagaagccagccaaactgtaaacagagagagagaaaagaagaaaaagaaacgaaacccacaaaagaggaaaaagtcgaaaggtggcacaaaaacacggtcaagttgtggattggagagtaatgaaattggggttagtttgattggggactacagactatggatggagttgggatcaaagaaaaagattgggttgggtcaatttaggatcttcttgtttgtacatggctgactgagcttagacagctccgtcccattaaaacttaaaagtcaccactttgccttttcaagttttaagcttcaacatttctctccattgctttcacttttaacattttttttttttttacataatttgtggtataaattattgggtgattctaca

SEQ ID NO: 110866 - DNA, 6758 bp, Cannabis sativa
tgtagatgggacatgaagtgcctcatagaaaaaaactttgacctttttaccagcgcattagcgaactatgctggtaaaagtgacatttcttgtagtgatcactttaattagttcttatgtgcattttctacgccattaggacatctctaataagttcaacaaaaatagttttcgacctattagtctcgcctgtcacattttaattggtatagccaattataacttttcatttatttttttaattaaaaatatactgggcattgatgccctatttgacgttttttcgttaattatctttcctttcttctttcctctcacaattgtggcccaccattatttggtcaactatatgagccactccattggagttggtcttattgactgattcggcaagtgatggtgcgagtttcttgggtgaagcctcatgagatattaatggaggtcaaggttgatttgcaaggggaatagccaacatggatttacttgatgggtgactagccaacatggatttttttgcagtcaggatgggctgctagatctagagcttgtggaagcgatatgtatcagggaagtttttgagcttttgaagtgggggttcttgagacagattttttatttctaactacatcacataaaaagtaaacagaaatgaatccatactaaagttaccctaacacttgattccaaatcaagtttaaagatctaactccccttagaattttgaagccaagatccccttacttcttctcagctgaaatcccttcagcagtttcatttgaactccctttaaataatgtagttcatcattcattcgtcagctcctgaagatccaatgattaaccacatgcaacacaaacatgaaaaagaaaaatatgtttcctagcagaggaagaatcacaagaagattcgaaaaacatgaaaagagttagttagaaaaagcttgacaagctatttattcggtaacaattgacttatccaactgtaaaactaggtcattacaactgacaatggattgttccaactaaaagaaagatactaaaagctgacctcggaaactataaaaatattgtagaaaaatatatgcatctaccaaagcattagatgaccaactgtgaaagccagaccaaatgcatctagcaacccaaaagacatcaatgcaaagaacataattttccactataaaatatggcacttacaatctccctttgacaaattatgatcaaggtagatagaacaaataacaaaagaccaacaaaaaaacaacccaaaagaaattaccaagttcatacaaaaggactttaccaaaacaagctatatcaatattagcaaaacataaccaagagactaaacacaaaatatggacactatttggaacaactcttcaaaaaatatggaatatctcctccttggtgatcataatcattcgttgttggagtaggcaacaagagtagcaggagtgacatcaatatgagcttcagcagaaacttcaacatgtggaataatgaaggagacaacatgaacattagcaaaagcatcaatagcagttggaacagcagtaatcacaagagaagtttcagactaccctggacaccagtattataaggaagagagtgagactcctcattaatcaaaccagtatgtgcgagaggcacaactaattaagactccccttggaccagtgcagatgcaacttaatctagatttgatggagctaagactggtgcagataaatcaagcatatgctttgatggcatgaaaggatgctcaaatgaagtaccatcatgatcagaggaactagaagaaacaccaccagtgggagcagaatgatcaacttcaaaggacttgagcacttcagtcatggctgtgagaacataaataacaaccttctcaaaatgatattgacaatgctgatcacgagcataagactcaggcaaaccctgaaccaaggaataccacttcccttgttggctagaggcattcaaattcaaggaagtctcacttaaggagaaatggatgaagacatcaatgactggtgcaggagagcagcaagaacatccaatctgataaggaaaactggcccgctgcaccagtttgttaattaaacttggatagggcaaggtgtgtttcacacctttggccttggcataatacacaatctgatcatacatcagggcatgaagatcaatacttccactagtactcaaagcaaacaagaacttgcctatgctatagttcactatggaaatatgtgaattggcccaccacttggaaagagcaatcttgtgaagaactctataaaagtcagaaaacacagtgatagacaactctttcccactccagacacaaatcagtattgtaccagtgatctcagacccaatctccttaaatgaaggcttaaaattctcatcgtaattaggcttatctaaccggggaattttcaacacataaatacacagtagagggagcatactgaaaccaattacccctaatataagtctaatatttgaattttcttttcctatttataatgttatcattgaggttggcacagaactcccttaccaggctcttattaggttcttgaagatgtgtgactataagaacccaccctcgagactcagttagttccttaatcgtagggaaatatttcaacttgagtcggtaaaggacaaaaaaaatattgtcttgaaagcgaagcaacttgtcatttgagtaaaaaggtggacccaaatgttttgactcagataaactaggtttagaggtagtccttgggtgaatggttttggttttcttgggaaatagaatactaggagaggctgatgagacagtcttatgtttagacaaagacttagaatgattgtgcttggtcggagatgatccgtgtggtgactgggaaggtatcgttggtgaaagggactaagaaaggggtcagacctagggatagacattgaatgagtaaaatgcttacatgagaggtggactacttacctaggtctggcgactgtgacatataaccaaagacaactagtgatgaactagggctggcacattttttcgacgaagaagagacagcactaaaggaagatcatttgaccttgcgaaccaacttcttccccatagttgagaggctatgaaatcgagagaagaaacaagggaagaagatgaacaatgaatctaaatggtttgacttcatatttaactcaaagtccaggcttcatgaataaccaattaattcaaattaattaattatttgagttttaaaatcctggaggtaagtaacacttattaaaaaaattctaaaaaacggttgttaaaatttcaagattcaggtcgttggaaccgtgttccaaggaataaataaaaataatttgttaaaaataaaagtcaattctaagcattaatcaaaagtttgaaggttcagacttttggaaccagaaccttaggaagctaaaaataaaattaaaacttagtgaaaccaagattcaatagataaaactacaagtatttaaagagtaaaaagtatgaaaatgtcctaaataaatttacatacataaaagccccgcggcaaaggcataatattgtctctgcgttcgcgaaaagggagatccttatccacccaaagattagtaaagaaaagaagaatgatagcgtgagttttgttagagtttgatcatggcaaggttgaatcagtccgttgctgggtattctctggatgattttcaatagaggcctctgggatggaagaattgaccaagaaaggagcattaacagctggaagagttgagtcctctaagctctcaccttctgggagggaagttccaggatcgaactccttagctgctctagggacctttacaacttcctcagctttagctaactgaagaatttgaggcatcatctgttctttgctttcctcatctaacaaatctattatggacttattgggcttccaaatggtatacagagaaaacaccaaggcctgcttcaacgccttcgacatcctaacttcatgatcatgtttttcatgggaaagtgcttggttttggttctccaactgtgaagcattttttttggattcctcatgatcatcttattctcaaaccaatgcttatttggtagagcttagcttagcttcagtgtcctccaacttcttaagagcatctttttcagcatgctccaccttctcctacaaatctgaatggtgttttatctttttatcaatatatagttgcagcataaacaatcttgtcgttcaataggtgagtttagttgtcatactcttgagttaaaaaattattctttcgcttcaagtttgtgaggtcctgcttagctttctccaagatctgttctagatcagtgatccaagccaccttgaaacactgccaagggtagggatatagaagttgtatatggaaattaagacaaatctattttgatttgttatttgtcaaaatagtaattatttatttagaaatgaatattttaaatttataattttaataaattgggaaaaagataaaagttgtttggacaaaaagacaacaccattgtcttgttaagacataggtggcgccactatcgctgtgccctgacatagtgataggctccggttgtccccactggattagtatttgggttaattaattaattcattcattcaaaagataaatatttatttaaatttaaaaagtagttatagatatttctgttggttgagatattctctcaaggtaattgagagattctctcaagtgattgagagattctctcaatcggttatgagaaataaatatgtataatttagttatattatttattcaaataattaatatgatttaataaatactttgaatttaaataattaattaaataaatacatttttaataaaaacaaatgagtgaaatacccttattattgttttttgctctgctaggtttatgaccacagcttctgttgtggccatggccaatcgtggccgtccgtgcaagatccaagtacagtggtcaagcaatcgatcaaatcagagtacaaacactcatgtgacgaggaagcaagggacgaaggaaaaacaagttccatccttcttagatgtatcaagattttcctgattcaatttcctttacgaatgaaatcactagaagataaaggtacctatgaaatatgaatggttgcctattgtttgtgtacgtaacatataaagggttgggacatcgaacttaaaatttttgtaagaaggaagagtctaaagtaatttgggttgcaaagaaacaaggaaatgagtagctagaagagcaaaagaagcaacaagataacaaagtggatagtaaagacttccaaatggtaaaacaaggccgcaagaggcctgttaatgaggaggatcaacctaatatcgttaacaataactttcaagtattagagacaattggggaatgttcaaaagtgatggaagaaagtggtatcaagaaaaggtggggatctgttaatggataagattttatcatggaatgtccgagggatcaacatccgcgtcaaaaacaaaaagaggtcaagcaattgatttctaaacttaatgtggagaataaaataaaataaattatagtattaattctaaaaaaaaaaataattatttaatatgcaactttcaaatatataatttgaaacttgaaatgacattattttagtgttattaatacttataaatcattacactttatatttgtttggaaacttatttacatgaaaacttattgatgttatgtgaaaaaataaagcatgtcattatataagtgttgtgaatttgttctattataacaagatgcataacacttatataatgttgttaaaagtatttaacttttaacgctactcccattcggcaatattatgaaaaatattgttaaaagacttcaacaacaaaattttaattttatgaataatcatattctggtaattaatgaatatgataatgaactggatgtacagatgctccctgattacctctctggatgctatgattgtgctggagggttatatcatctgaacgagtcatctgttcaacatccgaaacatgactttgctaataaatttggtccattatcttagttgaggctactcttgggcttgcaataaccgagttgtaccacttttgaaattacacgtgtccccatctaaaaacacaaataacacttaccaatcaaagttaattgatggtcacattttcttgggatataaatgatcattaagaatgaaaaagtgcaacaaacaacgtgggcattaatgaatattgttgtggtgaattaattatgagaattggttcaaccatatatataaataggagaattttagtctcagaactacatcaacaatatggtaaacattcaggtagtatttggttgaagataatgaaataaagtggaatgaaaaaaaaattattttatgttttttttatttaattatattttaaagtattgaaatataatttagtgaatgaaaatattttttaattattttgatgaaataattattttatttttcaaatagaacaaataagcactccaatacaatatgagaaaaaaaaaaccaataattttttattttattactattcatatcatttacttctatatgttacgaaaaatagttacttttaaaaacaatcttttagtcacaacataaatttttgtgactaaatgtgacttttagttacaacaaaatgttatttgtgactaaaacttagtatttaattacaatttgttac

SEQ ID NO: 110867 - DNA, 8501 bp, Cannabis sativa
  modified_base (761)..(762): a, c, t, g, unknown or other
attaaaataaaaaactaaaatattaaataaaactaacactacgtgacttggcacgtaacaatcacctagtatatatatatatgtttatatatatatatatattgttgagatttttgttaggagctggtctttttttttttttgttttctttcacacaatggtgtgcatttgcaggtaggtcccataattttgctatttttttttcttctatagatttttggaagttttttattttcaactatatctctccaaaccagcacatcaggatgttttaggggatttatgtatggagttgagttttcagtttgttattattgtctggccattatttttatgtcatcacataagccaaaaaaaaagagagatcctaaggtattgtttatgattttgatgatcttatatgtttcctttctcaaactacattgtgtagtgggcataacaagataacaaaattatttatttattaggtattgggtttttagcatgaatgttttctaaattattagtatactttcaaactcatccttgaaaaataaaatattcgtggattgaatttttcaaatattcaaaataattgtcgaaagtagccacattttgtaacaaaaataaaataatgggcacacgattttcccattaagctgtctaaattttgctatgtagtgcttgaaatgttcaataaattagcatgattcccttctcaatttctcacttgcatacaaaagaagtaaacattagctttttgtaaataataataataatannaataataataataataagatttttattttcatgctttaaaatagttttatatatatattttacggaaatacacataaaaacttttataacaactactaaatcgtaacaaaaattcacatatcaactcacataaaaactatcagatcaacccaaacagtaaatttaaaaaaaataataatgaaaaaaaaataatatctataataattcctctaataataatgaccactttttatttagcaatattacaaaatatttttctttaaattttacatagctttttgaaactgtgcgacagtctgtaatattataccttaaaaacttttaacttaatagtgaaaatcactaatttaatagagagactaattaaccaagaagtttggatatcgccaactactgtatctcgattcaatcgcacatgttacatgaaaatataatacaatcattaagtaacgtttcattgacctgtgacaataatgaaagttaaatatataaagagaaaaacaattgattcggttggtatttttgctcgagttgtcaagctcaataaacaccctctagttcgaacatgacagaagaatattcagttgcacctacatatatttttgcagaccataacttatgactgatcattttctccatgttataaattcacatatatattcatgtcatgtgcatcaatgggtccagaaagaacactagattttcttgtcattcattatagctattaaattgtacacaagtttagcaaagtaaagactagagttattggacactgcataactcagactttctctgcatagctttctgcaatttcagtcacagaatcttatttcaacttcagggaacgtgaatatatgctttgttttcatgagaaaccatttactgattaagtgtatgaacaaagatgtgaaatggggttccttttttattgataatagagttgtctttaactgtgatattgattgaggtttcctttttctttttagtgagtttatgacatagtctgaaatctacttgtaaacacttgataaaaagagaacactgacacaaatggagagaagaacaaacaaacttcttcattgctacttttaaattcacttccctcagttggatttacataaaggaatataatgaaataaatgtactaaagcatcgtaaaaaggataaaaagagagaactatcttcttatactgacttaacagagtgaacaatgggttttatagaaagaggctaagtaagaacttggaagatggagattagtatttaataaatacccttttaacttcttaacttcaccaaactcactcacacagatgggaagtatttgtttagattgaatggaagagaatagaactcctcactcctggtgtcacccttgaaggatctgaacttgtcccaccaatgtttacctcggtctttcctgatcgcgctatcctttttatgcaatgtgttgtccaagaagtatgctacacagcccgccacaaacgcttctgattgtagagggacgttgatgatatcgttgaactgccaagaacaggagaaaccacattatttcgaaataaacaatcaaatttggagtgatcttattcgaaagcttagtttaagaataacagagcaatgatatttggtccttacccatcttccaccagtgtgaactggaccataaccattgatggcagtgtactcgttgaaatattgtggaacagacaaacccatgaagagagagaagcctagaatgaactttgttctgaagctattgaggttgcagaactgaagaaagctaagaccgccggaacctacagatatgaaaggaaaggatacatcattcattttcactaggaaatagcctgtcaaagggaccagcttcttaaaataatgaatcgaaattcgtaccaacgtaagcaaagaaaaggcagtataaagcagctataatgggtgctgggattgaagcaaagactgctccgaatttccctgcaatgattaaaatggtaataataagtacaatatgctggtgcagaatagtgcaattatatgacatatcatactttacaactaaccaagaatagagaaaaatatcataaatccagctgatatttgcaccacccttcgactgccaacacgagtcaacgccaaaaggccagcattctcactgcccggaaggaagaaaaaatttagttcatgttgaaaatcagctcattagccaacaaaatctgagggtaaaaattaataagattagaaatgtgtcgttattgacgtacatagatactgaggatccactcactgttccaaacaatccagaaaccagaatgccaactccctgaatgtagaaatatactattaatcagcaatgagctgaaatagaaggtcagcaaacttgcacaagcagagttgaaatggtatgaaaaacacactaacagtgttgcacttgctttcatgttttagtcaatacataagaacacatgagtccctaaaaatccacaagagccaagttttcatctatacatatgatttgaacatgcttattaaagtttaatttcaatatgcttattattataatttcatatgcgggagggttgtctattttaaattgttacataagcaattgacatgtaatgggacaataatttcgggaggaaatgattccccgggtctcaacggtcaacacattgaaaatcaaattcatctagctattacaaagcaacctgcattttgcatggaatcaatcacatatgataaaaagtttatacacaaaaaatgttatatttgttacctgccaaccgactccacgactgagtatagaagctggcaatggagttgcactagcataccttgcaacagcaataaaagcacctgttgactgttcacataataggtcaatatgtgagaaacaatttttcaataagataaaatggcataatcatcataaagagaatgcgccaaatcaaatgcatactgaaatatatatcaagcaccaactcatggaaccaaagcaatacacagaccacaattaaataaaataatttagtcgacaatgaagagagtgtcaaaataaaaagagatattgcattttggtttttcattggcagactagggaataaaggaagcagaggaaactgacctcgacaagagcaacaaaagtagccatcatcatggcaaaggcttcacctgcgtcgaaagaaggtgctccccattgaaatggataaggaactcttatcctgcaaaaccaaataccttttaaggatgatacttgcagtgcatcaacaagattacaaagctatgaccaaatttcttctatagcgtacaagcaatgttattttgtacattcaggcgaagaaaaacatcaaaatttcttcaaagtgaaagttaagatgttagatttgagaaacaacaacaataataaaatagactgaccatggagcgccactaataagacccgcacgatctgtacggcagctcatttgtgtttttggggcactatcattatacgccccacccactgtgagaaggtgagcgtaaatccatacaatcaccactgtaaataggacagcaaaacggtcaaagatatgtttccctgagtggaagaggtgcggcaaatactgcaaaacagagaagaaaaacaatctcagcattttattttaaaggagccggtaaatacaagcaaaagcagcaaatcaaaacaattcatagaaattactgtaactaaatctcgtgaaaagacacttccaggaacttacctgtgaaacgaacactaagagaacaagctgtggaagtccaatctctacacatttagccacctaaacatccaagagaagcatttcgattagaaacaatcattacaatgagattcagtaaatgcaatgtgcattagagggaaagtacacataccccaggaaaacccaactcatagagaccaaaaccagctagagctaccaaaggaacagctgaaagtggacttaagaacctgaagagtggggaaaatgtttcaccttgattaaattattttctgacaatctgttctgaagaaaacagtgaaagcatattgaaagtctagccaacttcgttatgaaaatgagaccgttcctctttacaatttaattcttaaatagataaccttgtaacattgcgccaaaggccactgaagcctaaaacaatctgaagagttgaagcaacaataagagacccctgaattgcccgcattgtcctcttaaatttctgagacaatataagaatatttacatggtgagaagtaaacttaagaatttcacaaaattaatgtgtgtttgagtgcattcatcaatcttaattttggagttttcataggtaattaagaaatcttttttatttccttttggcttccgctatgtatccccaccgcgtgaactatatgatgcactggttctgataaaaacaaagtcaagtttatacatgcagtctcctaaaaactacatccttttgtaaggtgagaaccattgctaaacctatgattgaatctagccatcaaatccattgtacatgtattgaattagtagttaacaaacagctcaatgttaaagtatcaaccaagtttaaggtgctcagattaaaaagaaaaaaaaaacctcttcaggatcagaagaatcactgaatcgtccggcaaggataattgaaattgtggtggggacaaacgaatacgatgctccaatgacagcaggtaatcgagttccgaacaatgattgtagcaatgtattcaaaccagcaacaaagagtagggtctggatcaccttagccttctcgtcctacaagatgatatttacaacgtcattatacaaagaaacaacttttacaaatcaaaatctaccaacaaagttaaatatctttcttagaacttacatttccaccacccatctggggaacaagagcagttggaatgagaaccgtagtgccaagcatcacaagataatgctgaaaaccaaggagaatggcctcggctgtgcatcagacatggtccacatttttataagtaacatttatatctgctgaaattactgatactcatataatttcaaagatggcaaattatcaaaaaccagaaatctcaatcctaaaacatttcaactcaaaagttaaaacttactaaattatcatgatgataaaatatgttccagcacccaatcccaggggatatgttacaattattatggagaataatatttaaaaagcaacttacaaaaagatattttttgctgcgagtagcagacaaataaacttaaattggggtcaaccaaacttatatgcatattctccataacaactaaaaacaacaagatctcagttcctcaaatttacaaggtaggaacaaataataataaataaaatttaaaaggactaattaattagttgaagataattgtactaattttaaacactaatcctcttaagaaaacaaaattaaactacaattcccacttctttttttgttcttgttaaagtcaacaagaaaaaaatattccttccttataaaactagatttctcttccttttttattttatttttctttcaatgatttccatatttgctgtacaaacttatcagtatttcagcttaattacttttcctcaaaagatagaattactttttaaaaagtggcttctcaggccaagataaagaaggaactaagaaaagctactttcaacaattatgtagtacaaagaaaagaaaaaacccaccaaaagaacctacttgaaatataccccaaaagatccagaagaatcaaagtaataattaagaaccaccattaattaatctaacaccatcttagcaaatgaacgagatttctactaacagaatgaaaaaggaacaagattcagaataacaaaaaaaaaaaggtggttagagtgtacttacgccatggaggaggactggtaatgcagtaagagatatttggtagctgatccttaggtggatgtggttgtggctcatctgcttttggtgcagcaccgcctgccattgttactctacaactttctctctctggaactttctctctctatctaaccaaaagaaccacaaatgaaactcaaatctaaccaaaacccagatcccaaatctggcaaaacccaactaaaatgagcagaaaacagagatatattgagataatatgtatgacccagaagattgaaaccagtcacatgtgtaaccactacagcacaaataatagaagatgggaactgtgtaactaaacgaaagctacacccaaaataaaaaataaaaaacaagaaagcagaggaaaatgatagtgtaagtagagggtttgatatagtgagaagaaataatgcgtttaataattgctacaaagataaataaggaaagttaaagagagaaaatgataataataattaaaaaaaaaaagtaccttttaactatatattgtgaggaagcaaactcaagtggtaagcttaaatccaaaaaccaacataccccacacctaaaaaaattatatgttttctttctttttaaaactttaaaagtgaaaatatatgtatcaaaaaggagatatggatatggtgaagaaaacccagatgggttttttcctcttttttatccttctcttctcagtaggacatgaaaatgggactttgaagaaggtgaagaggagggtttgcggtaatgaaagccaaaaaaaaaaaaaactgactctcacaagctttctctctctacaaaatgtataatcttatttatttttatttttatttttttgtgttgtacgattcttatttccctctaacctgaaattacattccaactaacatatattaatcatttatttattattgtagtccaatttagtaaaataagaaataatgataatgaaaaaagtatgagctctctggtatctgagactgaccttattttaattctaattattttattttttttcagtgttcagttatgcacaacgtcagtcagacgaaaattaaaacaaagatttcttatgcataaaacgtcagagacaaattaaaaataaatagataaattgtgaacaaacgacgtcgttagcctataagctgtcttggcagtatcaaaatatcaattccctcaataccctagaaagatgcactagggaaagtttatgtacggtaggtccctaaattaaatagatttttttttgaaagactaaattagatagattttgataaattggtttttaaattttattttttagtaaattagttctcaaattatataattttatttttttttttagtaaaattgatctctaaactttttttttttgaaaatataaagtcttcacttttaaataatgatattttattatttagttttgtattagttttaaatatttttatattgatatatgttatcaaattaaaaaaatatatatgaatttattttatttatatgtattttttaaaaaatatgtaaaaataaataaaaaaaaaacaaatcaatacatattgttttagatatatccaaataagaaaaaaaaaatatatatttttatttatatgtatctttttaaaatcaaatcaagacatattttgaacattacaaaattatttatacatgtgaactaccaatttatttttttttatgaacaacacttacataaaatatttttgctaccgaataattcttctacacttcaagcaaatattctatctcatcaaatagttttttaaagggaaaaaaacagaaaaatacaaaaaagaaaaaaaaattacaaaaatactttgggccg

SEQ ID NO: 110868 - DNA, 7778 bp, Cannabis sativa
tggcgagtagacttacgaatgcgcagaggatagcaaggaggagggtccacaatctaaggaggatttggaacaactatagaaggagggggaagacgattttaggttgcaaagtatcaatatctaatggaggagtaatttcaggttgcaaagtaccagtatctaattcttgagacctttcaatacgatgcatccgagagtaatgaagaggaaaagaaactgtgggagtagtggatggttcagactcagactcagagaatgggttaatttgaataagatctgattttatcaaattatgaggagtgctaggaatagtaagaaaaggtatatgctcaagaaaaacaacatgacgagatacatacaatttttgagaaactggatcaaaacaacgatagccttttttcccttccccataaccaagaaacacacaaagagcagagcgtgatgataactttgtacactctacactaggacgaagcacaaaataagtagaaccaaagactcttaaagaagaatagtcaagaatacaaccatatagtttctcaaaaggagacaaacatgaaatgactagacaaaatcatattaattaggtgaactacagttagaactgtctccccccaaaactgactaggaatagaagatgacaacaaaaaagatcaacgagcacttctaataatgtgcctatgatttctttcatcctcaccattttgttcgggtgtatcagtacaagaagtttgatacatagttccatttaaggtaagggaatcaagaaatttatttaaagtatattcaccaccttgatcacttctaaaacatttaataatagcaccatgttgagttttacataagctcgaaactgatcataaatactataaaagtcaaaacgatgtttcataagagaaatctaacaaaaatgagtgtgatcataaataaaaaaaaaaatatagtatcgataatccccttttgtaataacaggagaaagtccccacacatcatagtgtactaaattaaagggtgcaacggaacaagttgtacttttattaaaaggtaaagcaaaaaattttgcaagtttacatccactaaaattagaaatatcatgatgttgcaaatttcctaaagatcctttagaagttaaaaattttaaacgagactctgaaacatgaccaaggcgagactgccacaaataaaaacagaagacgaaagagacaaacaaaaagaagacaaatcaacactaggagttgtatatattggtaatctcaattcatctaaaacatataatccccctcgcctatggctggtcccaatcaacttctgagactgtggatcctgcacataacatgaagtagaagaaaaagatacggaataaccaaaatcacacaattgaccaacaaatataagattcaatgaaagattagaaatataataaacattaggaagcaacaaatttgaactgacaataggaccaataccatctaatggcatgggagaaccatcagcagtcatgacatgcacaaatgatgtgggactcaaagaaataaaagttgcagaatgcagagacatatggtgtgaagcaccagagtctaatacccatgtagaaggtgacatacccgacgtgctagtgggtagttgacctaccaaattaagaacaaacatggaattaggttgagtagcaaggaactttcgaaactgtcctgacataacaacaaaattgtaagagccagggttgcagcaatactaaactgtggaggtcgaatttggttattaaactatggttggttacccttatgaagaggcttggactgatatctctgttgatgcagagcacaatttgcaagcttaggacattgagctttccaatgacctttatgtttgcaaaagttacactcatcaataccaacctttgtacgaggttcgttctcctgtagaggaaacaatgtagtaggaggaactgccaaaacagaagaattgggggttgagagaatacctttccttgactgagacttgagacaaattttatctgttaacaattaactgactaatgaatcaaccaaaggaagcagaaaatgatgtaatatagaacacgaagtccctcaaaatccctatgaatagccattaaaaattgaaccaatatttgttcctctttacgagtaatatacggtgcaaaagcacgtagctctgttgatttagtgagtgccaattgatctcaaagatctatcattatagaatagaactcttgaatgctcatacctttctattcaatagttctaatatcagtttctaattgaacctactttgaaaaattagaatgtgtgtacagtctcgcaagatggtcccaaacttcttttgttgtcttgtactttgctaattgggtactaatagattgttcgacagaattacttaaccaggtgagaatttttgaattgtcaacttcccaatttttttaatagatgttaccatcagctggtttcctctttgtttcagaaatataaccccacatcttttttcctttcatgaaagttttcatatataatacaattccaatacgaataattctttccatcgaatctcacactcaccgcttgaaggaaatcatctttattggtagtcattgtagaaaaaagaacaaattgcaaaaatatttcaaatacaaaactgatgaaaatttaaaattgtgttgcaaaaattaatacccaaaattgttatgcaaattaagaaaaaattcaataaaattaataccaaaaattagaatgtcaaactgtacggatggcgattgtacggacgagctgcctcctacaatcctccagtcaactcaccgcggagttggatccagaaaagttgtgattacgcttaagaaatacactatcataaatcttactctgatatcatgataattatttgtgaagagaagaataaccaataatacagagaaattaggatttcattcagttataaaattaaaaataaaaaaatacaactaataagaaagacttatataggcaactaacataaaagattaaaatattcctaaatactatttaacaagctcacttaaatacttttatggtcaattaatttttcaaatagttacttagctacaatataatttacttaaagtagttttgtggtgaatttttctttttacgtaattccttattataaaaaaataaataagatttttttaaggtaacttacattaaaaaataaaattagacgcaaccatccctaaattacataattttttttttttgttttgtttggtaagatgtataattttgtttttttttttaataaaaacactataatacaaatgaaaacacgtaggaagcaactgtgaactaataataattattatagtaattattattattattattttgctaagaataattataataattaattttttatgtcaaaaacaaataataattattttggttgcgacttgcaaaacaaaacgtgcactttaaagcaatttggaataataagggaaaataatataaagagcttgtagtattcgcaattagttttgccctatatctagtggatacattatcattttaacctatatataatttgtttaaattaataatcacatacattattgtctactcttttagcaatatccaattgcgtttatggaaaacaattacattaaaatattatatattatattttctcgtaattttcagaaagaatattatgttaacaagagtcaccaaaattgaggatggtgactaattgaagcgcttgaccgctattatatataaatccaaatccatttgaaaaataaacaacgtttagacgggtacttgttattttttcaaataggccccattaagacatctctaaccgaactttaaaacgctaaatatagtgtagtttcacactatatttatttcaatgagatactaaaattatacttataaatagatttgtctactgtgtcccaccgaatttagtaggaaccacactatttttgctttttaagtttttaataattaaataatactttttaagagaaaaattaaatacttatatatatttagtattaaaatattcttattatattaataaagtaatagaataataaataacataaaatttggtgtaatttttagtgttgtgattggaattgaaaaaaaaaattaatgttgaagtagtagttttttggtgttgatttaacaccaaatttaagttttaccattgaagatggccttagttacccatctcgacattgggtctactaaactattcgttgacctacaatttgttacccgttcggttaggatgcatgccaggccccatgcaagccacatgagaatcagtgtccaatggaatccccatttccaatcctattaaggtataaggcgatctcctcactttattaaggcgtgcctaaaacaataggagacactaggatttgcacagtcagaaattacaaaacacacatttcctcttgcttttctataatattgagaaccaaaatattgcaccaacaactttattgatattatttaatccattgagagttcgtttggtaggctgtaaaaggtagtattatgttaaataagtaaaaataatgtgtgttggataaaattttatattgtattaattattattattatgatcgtaaatttttaatacaatatgaatctattggagatataggtggttagtagctagttaggtaattagttgttagttattactatttatacctaactaacaagctgttattaagttagttatttttctattttgtgtagctggtttttgctgagtttgtaactaaccattcttgtacaaagatcacgtatataaataagagatcaaacaagccaatcgattgattgagcttcactttattcattccatctctctatctctcgttccatctcacaattctttagctcaagaactctggttttacagagttctttcatggtatcaaagctatgtccaacaattgcaaacaaccagcaaggagagatccaccatcagatgaaagaatggctcaacaaaatccaccagtcgaagctcaacctgttcttcccaacaataatcttctgccttcgaatctcatattagatcgaacgaattacactatttggaggtctcttgcccttgctgcagctcgagcatatgaactggatcgattcatcctcggtctgaatccaccaccaccaactcgacttacaggtaatgttccaaatcctactcatcagcaatggctacattttgatcaattcttgatgcattggctaatgaattttgtctttaaaaacatgcttggctatgttgtcaattgccaaacatcgactgagatttggactacattttctcaattattcaccacgcgatccaaagccagattgcttcaagtttacagctccttcagaccaccaagaaaggttcacagtcgatcaaagaatacatcctcaagatgaagcagtacacagattctttgtcagcagctgaacagcctttatctgatgatgatctggtcttgtacaatcttggaggacttgcatctgagtacgaagctgttgttgttaacctcacctctcgcacagtgcctctcactcttcaagaattcatttcatgcttcaaagtcaagagatgggtatccaacaacttacctttgattttcttgtcaatgttcaagctaacatagcttccacaaatctcaacaatggtggtcgaggcttttacagtaatcatggttttaaaggactatacagagggggtagaggaaattacaacaacaaaggaggcagaggaaataagcctatatgccaattgggtggaagagatggacatgtggcaatcaaatggtatcaatgatttgatatgacttttactggccctccccaaagtttgaattccaattcccaaccctccaccagtgattctccacaagcctttctcttgaagctagttctgcctcaaatacatctgatttgtccaatgcctggtttcttgacactagtggcactcaccacatgacaaatgacactcaaaatccctccacagctgttgactacaagggaaaagccaaagttgttgtaggtaatggctcttctttacctattcatcatataggtcatagttcagtctcagctaattttccttccaaaacattagtcttgcaagatattcttcatgttcccactgttacaaagaatttacttagcatatctcagtttaataaagacaataatgccactcttgaatttgatgatgtgtgttgtctcattaaggacaagaccaccaagcaggtccttcttcagggccaccttagtgaaggcctttacaaactcgaagtgtctgccccaaagcccaaagaattgacccaaaccagtggtgcttctctcaaaccaaatcccagggcctacaatttcactacaacaagtaatcctgtccatgaaacctctcaaattgcctctgtttggcattcaagagttggtcacccctctcaagttgttttaaataaattctgtcttaagttgttccaaataagaaatgtaaacatattattttctgtgatgcatgccagttaggcaaattacatcactttagtttcaaaccttctcaaaataacacttccatgccttttgaacttgttctctctgatgtatggggtccatatttttacagttctagtgaaggttacaaatactacctaagttttgttgatgattacactaagtttgtatggcttttccaataaaaactaaatctgaaaccactgctctatttttacagtttaatgcctttgttgaaaggttctttcagaccaaaataaagagcattcaaattgacttagggaaagaatatgaacccttgtaaaacactctcaaaactatggacattcttaaaagaaattgttgtccccacactcaccaacaacaagggagagtagaaagaaaatataggcatgtggttgacatggaccttacacttcttacccaagtaaacatgcctttagcattctggtggtaagcctttgcttctgctgcttatctcataaatgggtttcctacaacaacaaacaatctctctctccctatgaaaaactattcagtcaaaaaccaaattacaatatgctgaaaatatttggttgttcttattttccattgctaagaccatatgagaatcacaaggttgcctttagatcctccaagtgcttatttataggatatagcatcccctcaaaagggtatcaatgtctacatccaagtggcagggtctatgtggccagaagtgtcaccttcaacgaacaagagtttccctactcccaactctttctctccccctaacccaaatcatcatctgtccctataatcattgactctgcagcatatacattaccttactcaagacctgctatttccaataacaatatccaagaacccgtctttgaccataatcaagcctctagttttagaacctcacctcaaatcctaaatcatcccaacccaaatgatgttgtcccaccatgtcacaaccctcaagcatctcctaatactggttcagatactgaaagtaccactgccatagcagcccctcaacaactaaacacttatcctatgttaaccaggtctaaacatggtatctttaaaccaaaaacataccttgaaagcactaatgttgagactaaaccaaaatctctcaaagctgcattagctagcccatctagaatgcaaccatgtctcatgaagtcacaaccttgaaaagaaagaaagcttgggtctttgtaacgtccccgcttcaagcctcca

SEQ ID NO: 110869 - DNA, 13141 bp, Cannabis sativa
  modified_base (6236)..(6239): a, c, t, g, unknown or other
  modified_base (11956)..(11963): a, c, t, g, unknown or other
  modified_base (13093)..(13103): a, c, t, g, unknown or other
aaatgatagattttaaaaaagaaggtaaaaataataaagaacaatatgaaaaaggtatagagtgtaatttcctctacaaagtaagacttaaagcccaataacttaactggtccattagatcagcccacgtcctgacgtttaccgaaatgaccacattgaccttaccgtttaacttgcatactaactcgacaacgtttatttctgacataattcttttccactaacacaagctgatcaattttcccggcttcgaaggaagacgacgggaaaatcgttaaagaatgccttcaacttcaaattcaaagctgccatagcaagaaaccagaagaatcagtacaatgtaagctatctcatccatttctaaacttttagaaaatcaattatgaggaaaggtggtattttttttccaaagggtcttaaagattctcatcttttcttttctttctcggaaaaacaattatactttcttttcttttcttttctccacaagtttgcttcgatttttatttttaatgatgaaaaagtcgaaaccttttcaggaagcactttgaagagaatgactatggacaaagaaaagaagatgggttgacgttaagtacagaggaagatggtgatgatgagagtgattgcttagtagagatactcgactgtattaacctgtacaagagagatccaaccaaacaaggtaaaaccctaagaatacccattaattgtaaaatgttaaagaatgatgaatagtgtggcttttaatttcattttcagaaaaattattacaaacccatttgcatagagacataatttatcaggttttggtaagagaaaagtatttggtaaagaacccaattgagtttgtatagtgctgaatcaaattttatacaattgtagccatagtagaatttgtgaaagaacccaattttataatgcatattggctttgtatatgaatgaattaatacaccacttatatatgtaatgttgttgactgtaaatttgtaaatgtgactactaagtgaagaggtctcttgggagaagtatggtcaatggaggcaagagcaaaagagcagagctgcaagactagaaaagcagttaaaggcaaggtgggaacttgaggaacttatagatgagcaactcaatagcttccattcccattacaaccgagccatggtcccgaatcgactcaaggacatctcccaaatcctcatgcccaaatgggctccaacatatgaactggctgctatgtcatggctaggagattggagaccctcttccattttagaccttgtacttgttcttgtccgttcatcaacatctttacaaccatcatcatcgtctccatcaccatcagcaacctcattctgtggttctgattctcctggtgctgaaaaactcttgtcacaactcattaatgacattcgaattgaagagaccataatcgatgaagagatggctgagattcaagccacttgtattcttcaccttccctttggtccaatgaacattaaaccaggtggtgatggtagtgccttgacttgtgttcaatctgtgttcaagaatattgaacgtgttatcatcaaagcccaaaaactcaggttattaacttactactactctcactgaaaactataaatatatatatatatcatcaacatagattttcatttcatatatgtttatgtttgttataggttcaaggcattagagttggtactaaagaaggtattgagtcccattgatgcagctgagttcttagtagcatttgaggaaattcaagatatgattcaccagtttgcactgaaccataggctgcctctcaaggcctcttgatcatgagaccaagccaaagtcatctcttacctaattgaattatcagaaatctagaagaaggaacaacattgtgttgttctaatagttatgtgataaaaaagggtattttttgtagcagatttatgatgttttccttaaaaaaaaagtgaaatctgttctttggattgtaatgaatatcacattatctagtgattaattctttgctaatattattagatggaaatagtcaagtgcatacaattttaccgttattttattaatttttattctatatggatccaaattcaattttgaaaatttacttaaaaaaacgtaaaacagagaactaatgacaatttttttcttgcaaattcagctttttcaaattcacaatgccaatcaatttttttaataaaagttttcagataccaaattgaatttttttaatcataaacctatcattattttctttttgattggaaaaattattaattaaaaaaataatttatccatatggtccacacaagtttcttgtgggagtgacgtggcactttgacctgtcagatacaaaacgtctacgtggttataaagcgcgtggagtgcactgccatccaccatctacctcatctcatcaccgttcaaacataaaaagcacgaaacagcaaccattactttactttcagactttttttttttaaaaaaaaaaagggtaaaggagacctaaccccaaagaaaacccaaaccctgaacgaaaaccttaccttaccctcttcatcatctttgtcttcgaaaaccctaaccctaattatattgttcttgttaatcggatcggtgttcttggcgattgggattggaaaaggtaagaagagcaagaaagagaggaaggagaagaagaaggaccaaaaagtttgtcggagattgaacgatgtctgctgctgtgtgcggaagtaagagatccttcttcgaagatcttcctccatcgcctcctctttctaagaggcttcgttgctcttcttcaacctctcccattcgcttctcggctccttcgctccttgatcaactacaggccgtctttcctaacatggacgctcaggtatatgatttaatgtggaagtttgtgtggttttgtatataaatctgtatttttttttactttgaatctgtttggctgttgaggaagttgatgagatgaaaatatctgaagatcttttgcagtttatcattgtccttttttggggaacagtatatcattgacctatatttgtagatataaagttatatatagattttaccagatcaatttagtgattgacttacttgctgtatttgtttttttatgatgaaatggtaccataaggatgagtgttgaatctgaagtgtcgttgaattctagttttctttttgtcatttgctgttgaatatgtatggctttattttcatggcaaccttggtaaaatttggggatgtattcttactttaaagttaatttgaatgattgaatattttctttgctttttggttcattaggattgattattgtgaacgaaagaaattattcttttctttctgttcacgttattatttttatacatatatgtaatatatattgggtgttgggaaatggcttcgccttagcattcaaattaatttgtgttgtagatataattcttatggagattcataaatgcttaatttgcctttcagctacttgagagagccttggaagagtgtggcaatgacttagatgctgctatccagagcctgcgcgatctttgcctacgatcagaaaagaacccagattctgctgagataccagatgcaactgtggagaaaggtgatgatttttattttcctttcgtgcattgagttatttaatgtttttttattttgcttctgttttaattgtggtgctgaattgttaagtatctcacttatttatgcaaagttgtgcaggtgccaatggtgaaaatgttgctgtttctgaagctgcgtcagcccaacttcctgtggacggtgcagaatgggttagcttgtttgtcagtgaaatgatgaacgccaccagccctgatgatgcgagagatcgtgcttctagggtacttgagattttggagaaatccattagtgcccgtgctggtgctgaggcggctcaaacatttcaaaaggtgaaaatcttgtttgttgttcctgcacattttcttttgtagctgttagatttatttaggatgtgcaagaagtttccttgaggggtaggttgaaaaacttaagggtgatgttcaatggtggaaacctatgtatcaaactgtgagtattatgtcaaagtctagttaggaatcatttactacattatactaatattgggttataagcattgtcactcacaaattttatccttgctaaattatggttttctgtaagtgcaggaaaatatgttgctgaaggaacaacttgatggacttgtaagggagaatacaattctgaaacatgccgtggctatccaacatgaacgccaaaaacattatgaagacaaaaatcaagaattgcagcagttgaagcagttggtctctcagtatcaagagcagttgagaactctcgaggtcagaatcaaaactcaaaacttcttctatttttactcaactacaactattcttgtcctgttgagaccggaaccaaatagttagtgaaccatcaatttggttttactattttatcgcagtgataaagttatggaatttattttgttccataatatgtcgaactcaataactcgtatatcactcgatcactccacatgggcaattataaaaattgaacctttctttcgtactaaattatcttttgagactttgatggtcatattagctaactaaatgaatctctttttttttttatggtggtgcaggtgaacaactacgccctgacaatgcacttaaagcaagctcagcagagcaactccattcccggacgattccatcctgatgtcttctaattaagaaatctccaagtccttagcgttttcgtgcgtagaatgaatgctgccctggctggctgcgtgccttgtcagtcctcctttgatattgtgtctgttaagtgtgtagcgaatgtagattgatgctgtcttttaagtcttttaaccgaaaaatcccgggcccgacgcctgaaggctcactcaatcatccaatatttcaattcccaccaccaccacctttcactctctcgtctggaatgttatagtaatcagccagaattgtcgaccagtttcaaaattgcatgagtagattcttctttcctattatatttggtgagatgtgctgtatcttatcttattatgttattattgttatttatttttatatatacaaatttcattgagagggtttttactaatacttaataatagaaaaagaatgacgttggaattttagctaaatttggcgacaatgatgtttattttcaccatcgtcatttatagtgagctacttacaacgcctgtttttgcaaaattgtagaagattttggtacattagagaagattttttattattttttttttaatttttttttgtgattatgatcaattggggcttggcatattagtcaatatatccacattaagcagaattataaccttgaaaaaagaaaaatacaatggagtggaatggcactattccaatgtgaattatttccttgatacttggataggttggagttgaaacacaacatgtacagtgtgtattgttcttgttaagtagttgttaaaataaaatactcttcatttgtcaagacaaaaaatctctctttatactaaatcatcataaaatttagaattttttttaaaaaaattagaagctctaacaccatgacatattgtttactaaaattgtttggaaatagaatgatagagatttatcttatagaaacataattaaaatgtttaaattaactaaattactttttttgagttaaactagaatatatgacatattttaaatgataaaactgtcattttaaatttaatattaaaaaataaaataaaaataaataaaattcattcccttaatagcatttcttaaaaaattggtaggataagttctctttttttttcttccttatttaattaagttctttatttttaaaatttaataaattaaataaactaaagaataattcccttactattagagactgtttggtataataattctagtagcataatagtaatagtttttatgtcacgaatagtaattttttatggaaccaacagttaatatttgatggcatgaatattattatttttttttggctaattagtaatttttctttctgaactttgacatgtactaaatcgtgccccctgaacttttttaaccgttaaaaattctttccgaactattgagattgttaaatttaagtacttttgtctaattttagtaaaannnntctaacatggatgaaagttcaatgggcatgatttagtatatatcaaagtttgagggacatgatttggtagatatcaaagtctgagaaacatgatttagtacataaacaatccctgaaattgtaaaattgaatgaaattagacaaaactccttaaatttaacaatctcaatagttcgggagaatttttaacggctaaaaaagtttaagggacataatttactacatgttaaagttcaggagaaaaattactaattaacttattttttatgtgtttttaatttatctattcaatagattagctatgcatgtacatttaatgtggatggtgaacttgtttgaatagaagatatttttttttaagccactaagattagcttagtggtgaaggaaggatggggaaaatggaaaggtcatgggttcgaacctaagaccttgaagctattaaactattaaatgattgtgaaataccattaagctacactaaaaaaaaaaaagaatagaagattttttattttgtgtagtctcttatttatttatttattttttttaattaggtgaagttattacaaattaggcaaaaagtaaaattgaattaaaatgaaaagaaaaagttacgtgttgtataaagtcgcaccacacaacaacacttacatctttctcttcttttcttccaatccgtaaaaggccaataacctttttctcttctcttcttctctttccccaaagcccaaagctcaatctaatatgaaatgaaacctttcaacaactctgtcttcttctcactctcttacaacttttgtcgaacactttgagaccagcggcattcccaggcgcttcaatggccgctgccgccgtctctttctcactccttccttcttcttcactcacctttgtctccgaccgtccccaccttgttatttcatcaacaacttctctctcttcttcttcttcttcttcctcatcttcgttcttgtcccacaaaagcttaatttcccttcattcgaagctttatacgagaagggtctgtggtaaacgcggatttgggtccgtgattactgcttctggggactattatgccactctcggtgttcccaaatctgcctccggtaaggaaattaaggctgcttatcgaaagttagctcgacaggtactgatgttcatttgggtgttttttacattttagaaattaataaattatcaacaacatttatccaatatcttttttgttttttttgccatgggttcttttaatttagtgtcgttttcttttttataaccaagtaaatcagtggataacaatcaaattttattgtcgaaattgattgttgcagtaaaaaagaacataacttttatgatctgtaatagattgcatacaactttattatatgaattttggctcgctttttacatgttgaatggcgcatttcgtagggtgtgtttgattgggatttcatttttttgttataccttttttatatcttagagagtttttctccttattaaagttagtaatctccaagatcagtactctatttgagtaatgaaatgtaacttaggtaataggcatttaagtttcattaacctttcaaaagtttatatactactgaccccctaatcaattcatataggtgaagttcattcaacaccttgtgtatcttttatgatttcattttagataatacacaataatacacttaaggtccctttggtagtattatattgaattgtcttatatatcatagtaatatgtttggtatataaactataatgattttgatataaatcaaaatttaacataatattatacaaaaatgtgatgtacaacgcaatttaatactatacaatctaatactgtaccaaatggaaccttacattaggaattccagttcacttctattatgtgcttttataactaatagtatatgaagaatacaatgtcaatctgatcttccactcgttctctttattttttaagtaccatcctgatgtcaacaagcaacctggagcaactgagaagtttaaagaaatcagtactgcatatgaggtgtgcaatctcactttttggtttgttttgttttttctataaaaggaatatctttgtatcaaagagattaatggcattggtgtctactcacttcacctcctcccacatttttcttttcttttcacatttatgatattgtcttttgaattctgaagtacaacgctatcaggtgctatcagatgataaaaagcgagctttgtatgatcaatatggagaagctggagttaagagcacagtaggaggaggatcaagtgcttatacggtatttcatgttcttgttggatggacatatgggcatgttatttagtagccttgtatcagactagtgacagttagtagacatatatctttgagcaaatcttactcactctaattgtgcacctaatgggaagaattgaaactttcttcttagttttggtggttcaattacatatttctttcattgaaagctctttcttacttaagtgagtataactttttttaatttcttttatgttaaagactgaaacaataggtgtaccagcaactattgaactgtgtagtcaccctcatgattagcttgagtatagaatcctacaactaagcttattctgttttctttttctcacatgttggtcagactaatccatttgatttattcgagacattttttggaccgagcatgggtggattctctggtatggaccaaggtggatttggaacacgccgtcgtagtactgttactaagggtcaagatatacggtgagtactctttaaaatacaaattggttcttcttactactacttgtgtaatgaagggaataataacatttattttgtatgaatagtcatgagaaattaattttaagtttcatctgttagtatcttctactattgtgagaatgttggtttggattgttatactaatagcaactcgtacgtgtgaaagaataggtcatgattaatacaattgaaaaagattagtgtcgtcaattgtctctctcattcttacatgaatttaatcacccttgtgtatcaaactatattcactttattcaaatatatgtgcagatatgatatcactttagaattttcggaggctatatttggagcagagaaagaatttgaactttctcatctggaaacatgtgcagcttgcactggaactggagcaaaattaggctccaaaaataggatatgttcgacttgtggtgggaggggtcaagttatgagaactgagcaaacaccttttggaatgttttcccaggtaatgcgtcactatgtttttccatatatctggacatgtttctgcacgatatcgagtttagttgacctgtgctgaataattttgtagtgtagtgtaattttggagcccacctggttggatggattgctattttatttgttgatacttgctcagtcacatccaattttaccattaatttaacaatcttagcttttttcccctcctgcaaactatataggtttctgtatgtccaacttgtagtggagatggtgaagtcatttcggaatactgtcgaaaatgttcaggcgaaggacgcattcgagagaagaaaaacattaaagttaaaattccacctggtgttagtacgggcagtattctgagagttgctggagagggtgatgttggaccaaaagggtatgaagttaacttttctaataataaatgttatgtggaagatcaaagaagaaatgtccacttttccttgtgttgagtgtccactggtttaataatcaatatagatgacaatttcttactcatgatattgattctaaatttggcctctgaagtatcatctctcctcttatctctctaagatcctattatccagaagaaaacataaattttctcctcttataggatttctgaactacttaacatcaataggttgtgcactttatgatacaaatgatgtcactttgttacatggttcagaagctaaaattttaactttgttgttacatcaggggccctcctggagatctttttgtatatctcgatgtggcagagattgcaggaattcaaagagatgggataaacctgaattcgacaatatccatcagttatcttgatgccatcttggggactgttgttaaggtatggtattgtatttttattctaggccattttatacaagtagaagaaacaggtagcaatgctaagtgttatgtgtcattggttctttgtgtgcaacctgttgacggttttatggcgttttatcaggtaaagacggttgaaggaatgactgaacttcaaattccaccaggtacccaacccggggatactctcgttttgtcaaagaaaggtgcaccaaaattaaacagaccatcaatacgtggtgatcatctgtttacaattaaggtctccattccaaatcgtattaggtatagcataagctttccttttctctcttgttatggattctcttttaattcttctgctcaaggtttggagttgaatgtgatgaagttgaaagggtgtatattttaaccttgcaatacttgaactgggttattgtcttgaagacaactaccagaggttatagctagaaattcactcaaaagagaaataaattttggaaaatgatatcacacaagtgaagatggaagagttgatttacagttccaaggatatttctctttaatatttcctttcctgtatttacagttccaaggagcgtgaattgcttgaagaactagctttactgaaaaataccaacaccagccgaccaagaactcgccctcaacctcggccagctagtagtaagtaacatgattgtggtaattctgtacttggggtttttgtggattttatattatgtcttgtttctgtagctaagagtacagaaagtcaagccgagagcagcgaagagaaaaaagaagaatcaggagatcaggatgacattttgcagaaactaaaggattttgccgggtaataagttctctcctttcacaattaccttcatatttgtacccccataaaaaaaaatctatacatagtctcatatcccttggatttcttatttggcagctctgttgcaaatggagctctaaaatggctgaaagacaacctctagagtggggtcttaattcagtgaattcaaacagacaacggctctcccaaccttaaaggatgctgatctttttctggtctcaattaaggggactctgaggactgcagtggcagatatttttttttatatttatatttgtctttgtaacttgtaaatcttagaaacccaacaagcgaactatactaaatagccatcatttgataatttgatatatatgcattcaaattttgaatagaaacatagtgttttcttactccaatacacattacagaatgagttcattaaagagaaaaagtttctagcttggtttgtctttgcgactttgattgattagaagcaaaacagctataataacaggagaaagtatgatgaaaagagcttgggtgagattgggtttggttatttctgggaaaactatgcttccatacttgattacaccagcacctacgatagacccagttgccaatttccccaaataagccaaatcctgcacctgtaaaacaaaccattatcattatctcatcttatctcatctgggttttcttaaaaaagcttgttacagaagagagagagagacagagagacagagagagagagannnnnnnngagagagagagagagagaccttcgaggtaaaagctctgtcattggtatctttgtcttgttttagagctgtgacgaagaaagaggctttggttatggtggtggtggtggaagccatggctttgtttggtgggcttagccgccgagagtagtgggaggtggagccatagagtttggaggccgtgactgaagcggtggctgatgctgctactgtcaatgccattctttctcttttattatctctttgttgttgttggcttggcttggcttgtcctaagttgacttctttctcttctctgcctttaaaactttaaaatcgaaaccatctttttttttttttcatctagaaaaaactaatatatattttaatttattaatacaaatttttttggctaaaattttaacacaaaattggtctataaagtttaattaaaaataatgtactagtatttacctacaaagtttcaattttttatattaaatttttaatatcataattttctatgattttaaattaaagaagaagagattaaatttttttacgtggttcgagtgttaataaattctagtctacgaatcaatgttattgaactaaaatagttttgaagtattccttacaaatatttttaccctaattgaagaaccttaattcccagttcttttctcaaaaatttaatttttaacattttgcgtaatgttttgttcttaggagagaatcgagtatgagcatatctaaatcctgtaggattttttggtatcaactaggccctctgacagggtaaaatacaacagtaaatgactttgggccaattgagtgaggcccaattcaccaagtgagtacaagcatagaccgtttgagaatgctaggtgtcgtgtgcagccacgtccatactgagaatgtcaaagaatatgacgttggaaaaaattgtgatcttcttttggtagtgcactctaggggtgtacgtcggtcggtttacattttattcaatttaatgtaaagatcgggttacaaaaatttaagtgcaacccgtccaattaagaaaaaagaaataataatccgcccaatgaaattagtcagtttgatcgggttaacttgtccaaaccgaccgttaatattttttttttaatttttnnnnnnnnnnnattcaattgttatattttaattaattgtaataatgaaa

SEQ ID NO: 110870 - DNA, 7082 bp, Cannabis sativa
ggctaccgaaaaacaagatgcaccttgttgatgtacgtggtaccaatcaatctatttaagccttttttaactatgtagtcacatacctacaaaatctcataatcatcacacatgaccttccccagacgatatgggattgtaaaattcccggtttttctccttcggatcacggggctctaactattacaacttgagctgaatttttaacaaaataaaacctaataataacctctgtagaaaatgacatgacaaattgtctacattttttacatttgcaccaagttccttgcatctagtgcctaggtcgaccctaagttttgagctccttcactctaacgctttcaaccgaatgataacgcgagtgtttgatcatgagataagacaacaaaatcaccatgcacctgagggggtacccaagtagctctgtgcaggtgaacacctctccaggtgctcgttttttcaacattgtgaagtaagcaatggagacctagttataacacaagagtgacgagacaacgtgaaatttttttgaaaaatattcactgcacatggtgcccaggtaaacatgacgcccaagtggcactttttgtaccactcaataacacctatctccagaagttattgtgcatttaatgtttttttttagggaagttgcaagatcacattgaccatctaaaatacactaggaacatgtgctttggatagcttagcgaccacctggccaaaaacaaaaccctcatggtcgcatcctttattcttctctaaagataggtgaacatttaaatttaaagtattttgaccatatctcaaaactcacatctctaacttatgcattcttggaggtgaaaatcttattcaaaacccaaaatgatcatgtttctcgaagaagtctaaattcaaggaggaaatgtcaaattattggtatgatatcataattatttacaaagtcaaattttcaacacttaaggaaatttagctattgtgatagccagagtcccgtgatctacaaagagaaagactggataaattgtgcaatccctcccacacattgcctgggaatgtcaagtgtgatatttctaagattatgttggtacgagactacacgatgacttaaatagattgatgagtactacctatgacaagaagatgcatcttcttttcggtagcacgtcacttgagaactccaaatttaagcgcacttgacctaaagcaatctcaagaagacctcctaaatagttttttaaaaagtgtgcgagtgaaaataaagtacgctggaagactcgtgttgatttgcagggtcagtcatcattccaggaagcagccaaagtaacgcacccatatatcattaagtcaaagttcatcagatgtagaccgttatagttatgataccagatcaatagtctacataagatctcataatcaacatctatcattaagtcaaagttcatcagatctggaccgtttggcaaaactcaatatttgcagacgaaatcaagcctcaaagttctatgatcaagattgaatactaatatttaaattcaatggtggtgaagatatggcaaaagaaatattactaaaatttaataattaaagtatttaatttttttatagcaatcaaaatttacatattttaatttagagaaatgctaaaaggtactagtggtgctaagcaccttcctatgtgtcaatattgttaaagacaatatataataactgtattaactgccttaactattttttagttatgtttgttatatcttaagggtagtattgtcttttgtctttgttcatctactgtgtatataaaggttgtaacctccttgttcacaattaatgagaatcaatttatttcgttctcttgctgttatttcattccttcacatggtatcagagcatgctctaattctcattcatcgtcttctccgttggtctgtgaatgtcttctccaccaacaatgtcatctacaacaagccagtcaactgcgtttggagctacaacatcatcgttcgtccctgttgtattctctcacaagctggctacaaaattggaccatgacaactttcttctttggaagcctcaagttctttctacaattagaggtcacaaacttcaacaatacatttctaaaactgttgttcctccaccaagatttctttctgataatgatcgatctgttgaaaatgttaatcctgccttcattaattgggaacaacaagatcaattgttgttctcctggcttctttcatctatgactgaacctattctcactcgtgttgtgaatagtgaaacctccgctgcactctgggtcgttcttgaattgtactttgcctctcatactgaagccaagattgatcaatatactactgcattacagaatctcaagaaaggtgctctcactctcgatgaatacctactcaaggttcgttctctcattgataaactcaattctgttagacacaccacttcaaataaagaacatgttactgctatatttcgaggccttccatcgcctgactatgatacttttgtaatctctgtgaattctcgagctgaacctcttgaagtcactgctcttgaagcccttcttttggctcaagaacatcgtattgaacgaaagcacaaagatcttgattctacatccgtgaatcttgcaaattttagatctcgaggtacttcttccaatcctcacaacagagatcattggaatccctatgccactggtggaagatcaaacaacaatggatacaattctggaaattctagtggacatgggttctcttctcgacccccaaaccctggaggaagaggcaacttcagtaatactcaaaacaacaactctggaagaggaacaaatatcaccaaacccacctgtcaaatctgttctcgacaaggacactatgcttccaaatgctatcaaagatttaatcctggatttcctggttttggtgctggtcctagtaataacaccaataattctccaacagctatggttgcctggtatcctgactcaggggcaacacaccactgcacttcaaatgacagtaatctctctcagaaaaatgatttcaatgggcaaatcagatatacatgggcaatggtattgggttaaacattgagaacattggtaagaaactttttttgtctattgatagatccaagattctaactcttaataatcttttgcatgtgtccaaaataaccaaaaatctaatcagtgtctcaaaatttgcttctgataataacgtattttttgagtttcaccctgatttttgccttgtcaaggatcgggagacacaccaggtactgctggaggctactcttgaagctggcctatatgtgtttccccctctttagcctacatcaaagttacaacaaccttctcatgctgcttttcaatctctgtcaacaatttcctgtaataacgtgcaatgtaacaacactgttaataattccttatttcatttgtggcattctcgtcttgggcatcctgccattaaaactgttcaacaaatcatgcacaaatgtaatatctctaatagcaataaaaatgcttttgatttctgctcatcatgttgtttaggcaaaatacataagcttcccttcaatagatctactactgaatatactaaacctctacaactgatacactctgacttatggggcccctccccaatgatttcctcaaatggttatcattattatgtgcattttactgatgctttttccaggtttacatgggtttatcttttaaagaacaagtttgatgccattcagacatttattaacttcaaaaaccttgttgaaaaggaattcaatttgcctatcaaaatgctacaatcgaactggggagaagaatttcaagctttttcaccatatcttactgagcatggcattcatcaccgactttcttgtcccaccacccatgaacaaaatggtgtggcagaaagaaagcataggcatctcattgagactgctctaactttacttgctcatgcctctctccctttgtctttttgggatgaagctgttcgtgcctcagcttttctaataaatcgacttccctcttctgttctcaaaggagacactcctctccacaaactgttcaatatcgaaactgactattctcagttaagggtttttggttgctcatgttaccctaacactcgaccatataatagacacaaacttgcctttcgatccgaggaatgcacatttcttggttatagcctaaagcataaaggctacaagtgtcaatctgcctctggtagaatctttatttctcgagatgtcatctttaatgagcatcaattcccctatgcaaaattgtctcctacttctgtctccactcccataacctcctccaacacctctgttcctgtccttgttaaccccactgtttttcatcctcctgctcctaacatctcccctacttccccttctctctctaattctccatctctttcctccccttgttctcagccttctcctgttacatccaatcctaccacctctaccaatgttcacccaatgactactagagccaaagctagtatctataaacccaaggtatatattagttccaaaacaccatcgactcttgcagatgctcttgctgatccccaatggaatgtagccatgggaactgaagttgtggcactaaaaagaaacaaaacatggactcttgttcgactgcctcctggtaagaaagttattggctgcagatgggttttacgagtcaaggaaaacactgatggctctgtctcaaaattaaaagcacggttagttgccaagggttttcatcaagaatatggtcttgattttcaagagactttcagtccagttgtaaagtctcctaccatccgaattgtacttacaattgctctctctcatcaatggccaatcaaacaacttgatattaataatgcctttttaaatggcattttacatgaggaagtctacatgcagcaacccccttgctttgaagacaatgacaagtctcttgtttgcaagcttcataaggctatttatggccttaagtaggcccctcgagcttggtttgatcaactcaagcaaactcttcacagttttggttttcagagttcaagggctgacacatctttattcattcgcattcttccacaacacataacttttctactggtatatgtggacgacattatagtaacaggaagtgattctactgccatatcgactctcatatctcaactcaactccatttttgctcttaaagactcgggtgatcttcactactttcttggcattcaagtgactaaaactgctactggtttacacctttctcagacaaagtatataactgatgttctttgcagggccaagcttcagtttgccaatagtttacccactccaatgacagggggaaaagctctctgccattggaagtgaccctgtcaaagacccatctcactatcgaagtcttgttggtgctcttcaatatgcaaccataacaagaccagaaatttcatactcggttaacaaagtatctcagtttatgcattctcctcttgagtcacattggaaagctgttaagagaatcttgcgatatttgaaaggaactcttgattatggtcttacacttcagcactctacttctctcgaccttgttggattctgtgatgttgactgggcatctgacattgatgatagaagatcaacttcaggcttctgcgtttatcttgggcaaaatcttgtgagctggacatcaaagaagcagcctactatgtctcgatctagtacagagacagaatatcgaagtttagctagtataactgcaaaaatcacatggatacagtcattgctctctgagttaaaaattcaagtttctcgatcaccaatcatatggtgtgataatttaagtactgttcagatggctgtcaatcctgtacagcatgctagaaccaaacatatagagttggacttacacttcgtcagagaaaaagttttagctaaaactctcacagtgaaacacactccatcttatgaccaaactgcagatattctcacaaaggccttatccaacactagatttgtgtttcttagaagcaaactcaaagtcgagtctctctccaccttgagtttgagggggaatgttaaagacaatatgtaataactgtattaactgccttgactattttttagttatgtttgttatatcttaagggtagtattgtcttttgtctttgttcatctactatgtatataaaggctctaacctccttgttcacaattaatgagaatcaatttatttcgttttcttgcttttatttcattccttcacaaatatcgctattgatttaatttaatattgggtcccatataatttaatataatagtttttagggaatatcgctagtcaatcataaaacgacagtcttaaaggtactaggcaccataacaatactctttaatttaacaagtattgtaaaattttattaaccataggtaaagaaaatatccatagcaatgctctttaatttaacaagtattgtaaaattttattaaccataggtaaagaaaatataattaatgctcaattattacttacgatccaaatagaattttaaaagaaaataattattcgtatatttccaaccacattcttaattccataaatttgtttgtattgaaaattttaaaggatttggtgaatacgcactacctttcagtgacacgcgtgcctgccaataatgtcgtgacacgtcatataatggttggacctcctaaaattgaatgcatcctttatatttatagagcaagggcacgattgccaatacaacttgatgagagcattggatgattgattatgcagaaaataaatatggtggaccacctctagtaaatttcatcttatctaaaaacatgtatatataaatttggtaagtgtatactatgcactacgcccccttttttgtttttttgttttttttttttttgttaaatggaaatggtttagtttattaataagataaaccattcttaagaatttaaggtggcgtttggtaacacttttttaatcaattttctgtttttaaaagtagaaaagt

SEQ ID NO: 110871 - DNA, 2352 bp, Cannabis sativa
tctctctctctctcttatctatttttttcccctatcattattcaactgattgtcttttgccattgtataaatggccaccacgaggtcaagttcaaatttcccatctccttctaaaatgcttcctaagaagactaaaaaagctcctcagaagagaaacaaagataaggtgcaagttaatcccgaaatggagttaaaagttattgcaaaaatggaaaggtccactgaatttgatctactagagggttctggtttgagaaaaagccatctaccatctaaggtagaggctcggaaggccaaatgaataaaatcttcgaagaatgtcaaggatttaacattttgagtgtttttttttttaattgtttttgtgtttttttgctgtttttttatatgttgtttatgttttagtttgatttctaatgttgtaggatggttctgaattcgactttgaagaagaaattcttgatgtggatagcaaaagcaaattaatgccatggtttgtttctttttttctcttttctgttcatctgtagatgttgattaagatttttagggtttctgtttttgttcttcttcttcttcttgattttttgttttttgtttttttttttttttgttcttttcttttttaaaaaaaaatcatgggtttagttctctcaatatttaggaaaataaaaacattgtattagtgtattgattgaattgttttgcggttattatttcaggattttttttaattttattttcctttctaaaaaaaaagttcgtagggttatgtctcttactttctctgtttctaattagttattttcttagtttgaattgagtttttatatgatttttattctaggtttcatgagtttttttaaaaaatcaagatcattgggttaggtcttacattcatcagatgtatttgagttgtaattgagttgtaattgagtttaaattgagttatttaagttattgttggcggtgagaactcgtcaactaactttgtggccggaaaattgaaatctaaccttaaactcagaaataagatggagatggtgatgaagtgtaaactcaaatgacaataagattttacactagagagaaaaaatttattctattgctttcaagctcaagattataaatctaactttccaaccccttctcacatttgagaatggggtatttataggcctttgtggcctgagatacatagtggtccaaaaggggataagttgttgctttcaagctgcaaattgcaggtgcaggaggtagttttgtgtctcgtacccttgtctattgttaagtggtcccgagttgtaggtgtattgtctatagtgtactcttggtcggctcctcagaccttccaggtgtgatgctaccgatacttgtaccttcttacttttagagcttatagaaggcgtggtcatacgttcctcccatgcacgccttgtccttgtgaccgtatgtttcttcttacttgggagaattttactaagttttgtcagaccatggccgagtgaccttggaaatgtcattgttgagtgacattgagaacgtcatggccgagtgacatttgtaaatgtcatggccgagtgtattttcactattgcgtatgctcatgaatgtttgtttatgcttgagaggcatccctctccttctagcataatgacatgagtgtctttccagatctcttttagctaagtaacttttgtagggagaagtgcattttttttgtcgaccaagggtagctagtccttgtcaatttgagaaaagttttcttttcttttccccccttgcccccaagtgtgtagcgttattcatgacgttgtacactttttatacttaatatcttcttctaccctctcttttttaacagggaacaaagatattactttgaaaatatgtgacaaagcgtaacaaaataatctcaatgcagtattcattccaaagaagaagttgaaggtcatctaggtggcctcttggtacattacattgaaatatcaaaaaagaaaaataaaaggaaataaaactaatggggttgcctcgtgggcttcctccttgattcctaataacttagataaataaaggataccttcgactatcctcttcaacgatagtacttctttaagtactctgcgtgttgagattttatggtttaaataaaactcaattccatgtaatcttatttacattcaataaagatcagaaatcatactatgacttagtcatatgctttgttcacaagtttaatacatgattataggtttaatatataagttctagtaaatcgttaatacatagttattcacaaataacagtaattgttgggttttatgccctaaataaaactctgtttcaatgtaa

SEQ ID NO: 110872 - DNA, 6033 bp, Cannabis sativa
aaaaaataagggatttatataaaaaaaaagttagcgatagaatccttctatataaaatgtttagatgaattttaataaattatgtaaatgtgaattttatactttaaattgtaataatgagaattgacttatgtttcacacgattttaataatttcttaaaattatatatagaaaaattaatttattaattatgaataaaattttaagtgtaaaatttattatgttttatgaataatataaaattatacaatattcttataaatatcttttttatatgtgattagcacaaatatttattataaaaataaaagcgcactttgcatgaagttatttataataattaaaagtagttaaaaatataaatttattttgaatgagtcagatattaataataattaataaaatatatatattattatagactacacattagataaattttaaaaattataaataattaattaaaaaaaatggcaattttttttatatataaacatatagataataaaatacatatagagtatagattatatgaatttaataagactgatttaatcgattatcccaaaaggggattaaatgtaattttggggcaattaaaattaaaatggtaaaaaaaggtcaaaactataatgtaacaatacaaatattatccatctattcgaccaccgcagtacatgtattcgcagaatctacttcactatggttaaatatttaagatattcaaactcaaaaaatatgaatattattccacccatccgaccgcagaacaatatatcacaaaatcttcttcactacggatgaatgttaattatattcaaactccactaagcactaataattaattaataacaaaaagttagtgaatgtatatacatgtaacaagttaaaatccgatcaactccaaattattcggaaccttgaaaattagctcacaacctacaatataatgaaatacaacaaaattaaaattttaataatttaacctacttactagttatatcatttatgagtaactagttactaatgaggactagttagtaataaaaatatatgaatatgaatgaaaaaaaaataactagttactagttagtaaattatataataaattatatctcacactaataaaattttaaaaatttaatttctaaactaattaaaactctccgatctcattctcattcacaatacaatgcttaaaatatatacaatacaatcaggggcggagccagggtaaaaatttagagggggccaaactatattatatattaagcgacaaatagtttaaaatatattattaaaattaaaatatagtatgtctatcttgcatatcacgaaaatcatctataattgaatctatgctaaattttttagcaagttttttttaatatacactagcaaataatcacttaaaaattcattttctatcttgttgtgaagtgtagtcttcattttaatttttaaattttagtttgacttttctaaaggagccaccatataataattattaaaaagtttaattacaatatactataactaagattttatattgcatatatataaatgctagggggggcatggccactatagggagacaagtacgtccgaccctgagtccgaccctgaatacagttataatattttcataaatacaatacataatatatatacacacaatacaaaatatatatatacacgcatattcaataaaatacaaaatatatacatctatactatatattaaggtctaaacttttaccttataagagtaattcgacgaccaattctgataaaaattcgaccaccatgcacatacacaacaacataatgttaataatatggaaaaactctaaaaaaatttacaaaacaaaattaaaacaatgtgcattactaatatgaataaaaatcatatttatattttaatggacgttgagattcaatattttttccattaaaattggtggtcggagttgtaacaactactttatttctatggcttcagtttacaatgaaaaatggaaaaaaaaaaacatcgcaactttttgattgtataagtttaggtatcgaaaatagaagattgtaaaaaaaatggctcaaatggtgcaaaaatagtggagatacggtaattttttgaagtagttggtgagggttttggtcgtgttctctaatttagctggctgctgtgttttgtgctgaagaagaagtgtgaagaagaaagttgaacaaggtttgttaaataatcatatggagccggttgcggttatttataatacacgtgtcgatatataatatgatgtcggctattttcaaataaccgacgccataggattttttggcattctttatttttgattctaaaaccgtctctaaattgtatgatcaataaatggtatacctatagtttttataaaaaaaattgcctataaatgtaattttaaatcaagcgggtatttttacactctttaattttcctttttaagagaattgtaaaaaataaaatagcttctaaaatcccattttataatagtgcaccaacaactttttactttgaaaacagaagtaataggacgtctgttacttcgattcttaattatataatcgaagtaatcgacctatgtaaggattattcttattagctaatcaatatatagtatttgaaattgcttaactaaggataaccaatttatatagcccatatttgctggctatgctctataagaatatctcaataataattaagactttggtagtatttgatttcagtgtgctttattaattatacaaatacaagattaaaaaaaaaaagaaaaaaaataatgtatgcaaccttgacggcctgagcacattataggaatattttgtaatagttctgttgtatacgaatatattaattttgattctactgtagatatatagcaacaacaacttcaaactgatgttaattttgtttgtgtcagtgtatattattaatgacaacattaaaacaagaatactccaaatcacattattaattttggcatcaataatttctactgacatcaatacgtactcaattttgttatgtactaagtactatgatactattactatctaaaaagtaaaagtagatactgtaccaaataataagtccaatatatatatgacatcgatcgccattctcactaatattcttccctagcttcttataaaaatctaacttgtattgggttaaatgtcatataattttatcatcagttgtttgcgtttagctttttttaacgatcttcacaaatattattgttgactgtacttcctattaatttgactgtttgcttgagatagagaataatggacattaattgtaaagctttttgttatgttagtctcctaaatatttgtttgtcccttgaattgtgtcagtatcagatatgatttttattggaactttgcaccttcaattgtaattttttcttttatatatatatatatatgagaggtgtcgatgctaattgacattgacaatgcatcgacttaatcggttcaatattatttcaacctgggtttaaattatcctatctcaagtctcttctatgtttcgattaaagttgcctatgtaattacttcgttggtaagacttttattttaaacattattaaacccatagttttactttaaatattattttttttttcaaactttacattcatacatactttaataaatttttttattttattttaacaaaattgatgtcttgttatttttttggttaatttatagttgtatttttattattttataattattatattgttgttttttacggtattgtttaagtgttttatagttgtttttctgttatttttatgtatttttttttttgtaaagttgttatttagtttatgttcattttttatcgtgtacattttctgattattctagacaatattttattgtatatatgtgtctttgttttattatttttatgttattaatcagtttataattattttttaactattactaactcaaaaaaaaaaagaaaaaaaattaaaaaaataaagttgtaacaacaaattatacatgaaaataaaaataatgtaataatacaaaaagataaatcaatttatcaaaactatgtaaaaaaaatcgtaatacaaaaacatattgaggagttgatattattttgcttattgtaattaggtcaatattttgttactaatatgttactttgtagttatatttttgttgtttataattattttcatcttgttttgttaaattgttgtagaattgttttttagttattttaagagttgttttatattttactaaaacataatatttttgtaattttgaaactttaaacacaatattttcgtaaaattagtatagtaaaaatgtaaaaaattctacgtgacaatattttatgcaaatcttcacttattttacagtacttttgtaagttcttctaaaattattatgcttatcctagaaagaaaaataaaaaaagggaatagtgtcacatgggccaaacagaattttcagggaagtaaagtcttgcttttttatatattctagcttttctgctttgcttgctttgttatgatataaataactaataaagtaattaattaaaggaacccgattcttaatgacctaaacctcactacagccaggtcattttgtttttgattaactaccaaaattaattagttccacactcttaattgataagactagttggccctatactttaagcttcaggataacacttgcaagagaggttttttagtataaatcagtcgttatactttgatttgtgtctaattaattatgatcattttcacatggtcttatatgtcttttggatattctcagattatatgaaaaaaaaaaaagaaaaacaattctactaccatgtgttttcaaataatatttatctagtattttatatttttgaaattgctcatatttaatatatcctgaatttaaatttcaataaaattttttatgagttaattgatcaaactactgttaattatatataataaaataattaaatttgaatttaaaattaatttaaaacttatatagttgaagatagtttgattataatgattaaatttgaattgagagttctaaatatatataatttaaaaatataaatatactatataaatattattagaaaatacatgctatttgtatttttataaaagtattaaaaagctttttctggtttcattaaaataaaataataaaaaaagaaatattaaaaggcacttgtagtatttaatactctctaaaatattatattactattgataaaattaaatattgagtcttatataatttaaataaataactataatgtgatatcattaactatatatgcaaggtattatccatctcaccatagttttaccactagtgtctaagggtaactctaatgagagttgcctatatagttgatgaaaaaggaggtgggctatagtatgatgtggcaggagagaagagaaaagtaaaggaaagacttcaaaaatagcattggtatccctttatttttaattaaaaaaataggaaaaatacaattgattaaaaaattagaagtgtgttaagtgggactaattggacaactaacaccattggaaatgataaatttactaaactaacaatgtgaaatattaaattttacaaaataacctcaattaaaaagtagtcacatcatttttagttatataaaattatatatcacataattgacaattataattaattatgtagatataataatcttaaccaggcagggtcggccttaggcataggtggactaggtccgcacctaggacccactcattttagaggcccaaataaaaaaaatacattttaaaaaatatacatattattttaattatttttaaaaatatcattcatctttatagtaaagcccaaaaatattttttttgtctatgatccatttcaactcaggatcagtcctgcctgtagaaattttattatgtttatataattaatatgttaaattaaattct

SEQ ID NO: 110873 - DNA, 5481 bp, Cannabis sativa
ataatttttcatgaaaaaattggaggatttctcgtgagggctcacaagccaataaagagggctcacgagccaataaagcttactactttccattcccatcctgatcactcacgcacttttcattcaactgaatcaactcccatattttcgacaattttaatccccactcttactcttactggagtcgcttctccttttatttcctaatcatttccttcaaatatgttttctttgattccatctggatactcgatcaataataataatatactttctgagcaatatttctgatctggataccatgagtttcattctaattcttatcaactttcgctaggttcggctttttcttaactaacattcctttcggggctcacttgtttttaaggttttattatcattccacgtacttcactaagtgtgtgaccaaacagtcattctacttagtagccgcttaagactgttgccttttgtttttcctgatctaatatcgcctcaaatacgatgataactggtatgaatatctctagtgtgaccataaaacctaacgcccgtttggctaaaccaagtcaaggtagtctcagatacggagagaatgggatttggggggagcgaatcaggggaagcctgaacaacaacaatgtttgggtcaaaaaggtagtgaaaggagtcagtagagccaaacccgctgttgtttttgctcttcttacatcaaataacaccaaggagactctggtaaatttttctgtgatcactttgatgtctgtttttttgttctacttatagagtttcgtcttcttaaatatatagtaactcttgatctctaattcattgtcagagacagacccttcaagtccctcaatttcatagacgaagagcggacccaaaaaatgttgctgcaatcattttgggaggaggggcagggactcagctctttcctcttacgagacgagctgcgacacctgctgtaagagataatactgctcatagttttttctttaactatttaacgagatcatattgttttaattttttttttctatatcttatattatatccaatacgttcgtaatgacaacacatggttaggagtttttaatgatgaatgttttgaattgcaggtcccggttggaggatgctataggctcatagatattcccatgagcaattgcatcaatagtggcataaacaagatctttgtactgacccagttcaattctgcttctctcaatcgtcacatcgcccgaacatactttggaaatggcatcaattttggtgatggttttgtggaggtatgaaaaccctttaagcatatgaaatttccatgtccttcgtgtcagtcattgatttggtagttagattgcccttgatcagattcatagttgtagatgatacagttaaggagcacaatttatcattttatattgtcattatcattattattattattattatttaaaaaaaaaattaaaaacctcttgattgtgcattgaggaaattatttttgggatatttacagataaatcacttttgacagtactcttgtagcagaatgatatgtctgtggaaattttacctattaatatgaataaaataagctaggtgcattgcatatgtatgttgattttttggtggcttaaaaggtcaattcacttcatggataggtcttagcagctactcaaacacaaggagaagcaggaatgaagtggttccaagggaccgcagatgctgtgaggcaatttacgtgggtgtttgaggtttgtgtgaagtttcccaaagcttttaccatatttaaggaggaaagaagaatatgaccttgcaaagaattttttcttttttcagcttcaaaatgaaattgtctcacataacattgtcaattcttttaggatgccaagaaccgaaacattgagaacattctaattttgtctggtgatcatctttaccggatggattatatggactttgtgcaggtacaagacaatgaaatttcttttaacatagaactattgatttataattgaattatatacttatttacaataaatttacagagccacatcgacagaaatgctgatatcacaatttcttgtgcagcagtagatgacaggtctgattagccttcttttgtcttttttttttgttgatttattcattgaatattttttttatatgaagatcatatgaactttatctaggtttttaattgtaattttaatctacttctttctggttaattcagaagagaaagatcaatgataatttggataataacaatgttaccttttggatcaacttctacttcttaaataaaatttatagtcgaaccaattgttttcagacgtgcatcagattatggactggtaaaggtggacagccgagggcgtatttcccagtttgctgaaaaaccatcaggtgctgatctcaaagcaatggtgagcaagcaatggatatctcatccgcactgcgcactgccttcagatttttcagtttgattgtttctagagtttattggcttcaataaaaactaagcactcatagatttaattgtttcaatttcgataaaactataaatcatcattaagtacgcactgcaaattgcagaaaaacttcgtactagtattagtttatttgagatattctagctgacaaaataaatcagagtcatagttggactttgataacaatgtgtatttattacttacgttcagaatttatttaccttataacattttaatctacggtggttttattaccatttgaaatattgtactctgctcatatatagacattctttgcttgctttctacagcaagcagataccactcttctagggctgtccaaacaagatgccatgacatcaccatacattgcatccatgggagtttatgcatttaagacagaaattttgctaaagctcctacggtggagatatcctacatctaatgactttggatcagaaattatccctgcagctgtgaaggagcatgatgttcaagtaagagaatcaatctttaaattgtcacttcagtttttattatactggaactggattctcaatttagagtttctaacttttgatttaagtactaagaaattacattcattttactttgataggcctatttattcagtgactattgggaggatattgggaccataaagacgttctatgatgccaacttagcccttactgacaaggtaatctccattatagatgtttcaattcattggatattttctagtttaattggttcaagctcgcatgttcttaggtttcatatcaatggtatgctagaaccatccaataagatactactttctagctcttccttataaaacaaatatggtgtccatcgaatgattttcttaccaactaaagcatttaaaggctactttcgtgtagcagattgttgatacgactctaccataatgttccttttagtaacttgtagttactcacattaacttcaaatgtgacgaaactaacaaaatttaatagaccatctcttttttaatgcagattccaaagtttgagttttatgatcccaaaacaccttttttcacgtctcctcgattcttacctccaaccaagatagacaagtgtcgggtatgcttatcaaatttggttcagtttctgtcttatttcactgcagtctatttatgtttcagtcgggtgtgtagattgtggatgctataatctcacacggatgtttcttgagagaatgtagtgtcgaacattccattgtgggtgaacgctcacgattggactatggtgtagagcttaaggtaaatcatcacaaatttcagaaagagtcgttagttgtttttcggatgcattccctatggctaaacttgttttgttcaatggtcatgttcgattacaggacaccataatgatgggtgcagactactaccaaactgaatctgagattgcatctctgttggctgaggggaaggttcctattggcataggacagaacacgaaaactaggtaactcagacatgaatattggcctgtgatgtaactctaatattaaggttcttcatcagattttagagttaaggtcctgactaattgtctctttctcaggaactgtatcatcgataagaatgcaaagattggaaaggatgtgatcatcatgaacagagatgtaagcgcagctgcatatcgctatttaagttgtatgtaactatgaaaggattttttttctttcttttgtgcttaatttcatcatctttttctagggagttgaagaagcagatagaccggaagagggatttcatattcggtctggaatcaccatcgtagtagagaaagcagctataaaagatggaactgtcatatagatgtctgatactcctagtagagaaattctggaaacgaacatatcaaagctgctaggagaaatgtcgacattttgatgcatggaaaggcaacctttggggcttgtttgtaaactggaaaaatctgttagtgctagtgcttgtgaaaataagcctgtgatgcgagtctatccaaccagatactggaatattacccaaataaattcataggcccgctggctgcattcctcattattgaataaaaacgtcgtatccagctgtgcaatattggtttcatttataaataaaagcagtgagtctttgtagtaagatcaaaaatagaacttcatgtttgttttttctttttgataagcagtagagaccttgcttatttctctacattaaaggcagtgagtcagtgatcacgtagttgcgtccaacttaggacgtaggaaggctacctgatatggacaatttacagttacactttgcagtggtttttgctatttaatttactaaaataacgtattagttttatacaactgccgctaaacttatttttttttttttttgcatgtaagtaattttttgtagcattaatacaaatataagtttttattttgcaaaactaaagttgaagccacgcaccatctccagaggctgcgattctaacaaagaagaaagatagaagaaaaaagtggtatgaagctttacgtacaaaatcatctccttcggctccaacaaattttcaaaaatcattgaaagagttactgacctttggctcaagagaatgacttagaggaagaggaagagagattgggatttgggttgcgaagggggcatagcagagattgcgatatggttaatggttattctaggttgcgatgggttgcaatttaggttgcgacagagcatgactgagattgtgatatggtttaaaggtgatttaggattgcgactaagcatgattgagattgtgatattaatggtgatttaggattgcgatttaggttgcaatattggtggcgatttgtgcggcaatatcaattgaacctttttagttttgtttagaaaatcatgctgggttttatgccctaaataaaactccatttcaatataatctattttattcaacatcaattgtgtatgttttagttc

SEQ ID NO: 110874 - DNA, 6341 bp, Cannabis sativa
tggacagaaatgttaaattgttaacagaatacgagtattggaggttttaccgcccaaatttaagttttggggtttaagtgaaactaaaataaaagttttgagggttttgcagccatttaccctaaaagaaattatgttatgtaattttgtcattaatatctcaaagtaatataatactttttattgaatattactaaccaaacataggttggagatgtcctcaacaacaatgcaatgatagtgtaaaattgtagcgattcgtacaaaaaaaaataaatatactatttattgaaaaaaaaaataagggcaattttcatttataaatgtataatattacaaaaaatgtgcaaaaaaatattttacataattctatacaattttatgattatttacaaataaacatatatgtttacaattttaacttgttcattactttcaattgattttctaaaaaaaaaacgcataaagctaaatatgtaaatatcaaaattaatatttatattttgatatattactaaatatttactaaaatttaatataaaattaaagaaaaatatacaagtacatttataaattttatttatattttataaacaatgcacatatatatgtttattaaatatttgattagtattattaatgtttataatgttattattaatttagtatgtttattatgataatcaatatatgtgtatcttataatatcataataattttaataatgaaacacttaaatttatttatttatttatttaaatacacatttttttcttgtttattaaaaggtcatatataatttaaaatgtaacacttatgtttaatagttattggaaaatgtgttttaaaaaatgaaaatgtggtcttatgtatagacactatatttatattattattgataatgtttattaattattaatttaatatatttgttatgacaatatttttaatgatatgtttttttgatcaagtgtataatgatatgttgatatagtgtgttattaaaatttaaatacaaatttataaataaaatatgtatatttattatttacttttactatatataatttgtacaaaaatatatttctcataattaataaaatataccatattttttttttatgtatttataatgtaattagttactataatatacataaaattataaatttgcattgttgtggttatttaattattacacacattaaattcccaattaaaaaaggaattaaattatgtactaaaaatgaagaaatgataattttcctttttacaaaaacatatgccaagtcagagtgtcgactgtagtgaagtgaagctacgcggaaggaacgcaaaagagtgggctccagcaaccaagttaccgaaacaacctgatgtaactcaatgaataggcgacacgtcaccctattgagtgataaatcagtaattccacacagaaacaatgatgtaagccaatgacaaaacactgtctcaggggataaattggtaattgtgtattttccacttaactgtgtgcgggtgtaccatggttaaatttaacaatagtaatgtttaaccatgattactgatactccagtagtactgccactctactatataagtacccctaagagctggggcctgagtagcaattaaagaatccggggatcttttctctctcaggttcggttgattcactgtccaaagaacttttttttttttttttttcattttttttgggggttaattttcgatctctggaatggaatggaacgttaagtgcatgtttaattgagctattcattcacagtttttattttattgaaatttttattaatttttgtttgtttgatgagtaaatggacgagtttgccgggacggaaaagaaagctcgaattgtgtttgggaagaaaagaaaatcgatggaaaaataaaattgagtcttttttattctttttctggagtttaagaacgaattatgttgttattgttgggatcggtattaaattaaccaacggattataattatggtcattaaaatgaaaattactggaatcgattaatttgggctttaatcatattaaatgatttttttttttagtagaaatgaatttcttgaatgtctttctttgtgatgctcaattcctttatcaaggtatcgtacgataacttattttatttgatcttttaacaaagaaaagatgggaacttggatgaatttctggtttttctgctctctcatctcatctcagcatcaagtaatattatggtttgtggatcaacatttgagtcaaaatatttatgaattgtttcatcgatgattttatgcttggtctctggtatcatgttatgtaacacttcatttatcagtcaatagcttatcattgggtttgctttagtttagaaatttaaagacttttggagaaaggctgggttttggattatacaccttattggtaaatcatatctttacctttgataatgtcataattaataaaaatcttgagtttggagtgtaatataatcttgagtttgtagtggactattagttcggtttccttttctttttaaattccttttggtcttttgattttaatgatatacttccatttatctacatctgcatctgttcaaggttaaaagttaaaattaaaaccctgtctatgagtctgtcgtttactctttcacatataatcttgacaatctgatgattggtgttgacaattccattttattttatgtcaatctagtttgccagcttgacagacattcattctacagacgaccacagatcgaattttgtcactgctttgttacctttatatcaggctgccatgtgtccaccagcaacttccccatcccatgaaattagtactttttgttctggtgaggagataattatgtctatggagaaaatggagagcggcattccacctccatgcaatgttatttctgatgtaaatccttttgaacacatgcctgaaaatttacctggtatgtcatattccttattttcttgatagggtgaattgtttgtttaaaaataattggaaatagcaaaattttgatgtggtacatattattatctgtaagaacattattataaaatgtgaaggaatgtgaactttttcctgttaataatgggatgagttttcttgttatatgcagatggaatttggttttacattatgtctaaggttgaaaaggatgcaagttttggatactggagaccaaaaggggaggcttgtcaaattttttccaattcttcaattactggttggagaaatactcttgacttctttgaaggtcaagctcctcacgggcataaaactaattgggttatgcaaaagtactggattacttggaatatcttacctaaagataacaatgaaaaggtattagtagaacctactacccatctttggttctgtctctgccctcctccttttcttgtttttttggttcccaatcgactaattaactgccagtttggctgaaaatcgtgcaggaaagcttgctttgcaatatctttgttgttgatgaacaaaagtctaaccatggaatgcctcagaagattgctagagctgatatggctagtcaatcaacacaatcagttattcaaaggtctgaaaactatacaggacaaagttctactagtaagcctcaggtacatatcaatgatatagtgaagttttgtgggtcaaatttgtagttatctacttatctgtcttgtgaatcctgagctcattaattgctttaacaccacaatgttgattttgagtataagattggatattatttattatttttctagagatccaaattgtttgtttattgtggaatcaaaatgcttcactgctagttattttgtcttcacatgccaacatttgcagtttctcaaggactcttcaaaactaaatttgacaagcgtttattataattctttctgattattagtaatgatgatttgaagaagtggattttttctttaattcccaaagatcattttattttttccttaaaaatttatgaaatttcactttgatattttcttagtatagtagaatgcccaaatggtgattatttctttactagtttttcatgacatgaaaataaatcactgcatctaaacttttaaaaactttttgtaatgttaaatttgtagctaaatgaatatctctctttcctcttgctcttcaaagtagggagagtgctttcttaatatatgttgatggttgctacatattttagacaagcgaggataacgagattggaaacagagtaagtgctcctactaatcttgtggacattgtaccaccagctgacagtgattatctttctggaggtgacttcttagaactgctggatcttcagattccaccatcaccttcttctagttcggattcaagttgtgtgactatgtcatcagaggaatgtttcgatgccctagatttgttggcagacatagagtcggagaaggagaaaccctttgacttggtgcaaaacaatgctggttgcaagttaagcgtttttgtttcttccaaaccaactgagatggttatgcatccagcattgacaggtaccctaaaagattttccttgtttgtgtataaatttacttgctgcatttgacaactgtattagctttaagctcatacataaatgtgtttttttttttgtgtgtgatgagagtgtgttgttacaagttacaattttcattggattgaaattgttttatgttccatgtttaattgaaggaacttgcaagtcacaaagcaaagaattagaaggttcagcaaaaatcccagatgagaaggttttgaagaatccaatcaaaaatcagaagcctgatttgaagattgaaggtacatcatcaacttgtggaaatcgactcgagtcacaaggtggcaacaaaacagaagaagaagaagaagaagacaagaaagaagctcatgggagaaggaaaaagcttcggaagaagtatctctgcttcatgccattttaaggattatagtttgactctattgtttgtataatagaatgtctgttctcgcaatatataaatatatattaatagaattattgtcttttggcaattggaaataggatagtgttgtttgtgaagtagttggttcaaaggtcattttcacacttaaatgaagacagattgtgggattgtgattagttaaatgagtgtatttagatacatagtaataagatagagaggtgaaatatattcgtagaaaagaagggtggagagatcaaacgttgtaataaggtatttgcccagttaattcggaaggacccctttgatagaaggaagacaaatcagcttctgtactactactaatgatatctacactcacaaagtacccaaatcttttaaaaaatagtattattcttaataatggcatctcactaatcacatatgaagagatttttaactttgggcttttgttctttttgttttccatttttaccaaaatattcacacatatacaattttacttaaaatatttacacgtttttggtaatgtattattcaccttccccaacacatcttcctcacttttttcctttcctcttctcataattctctctctcccactgtctgtttcaattttacccaccatacacacatatacatctccatcattggctcagtttatacccgtttctcttttttcttcttttttttttagggtaatccacgttcgagcttctcgccttatgtataaatttgtattttggagtaatggagtgatgacaattactcgttctaattctgcttctccatctaaaaaaccccaagaagacctcaaaagaatctgagtagttcatccatgggtgaaaaatgagttgcgaaagcaaaaatctaagaatgacatgtagagtgtgagccattttcttataaaggataatcttcttctaaaggtattgctagtgattctattgagaagataggaaggctaaggggttcaaaaactcaaaagaacctgtgaaagaagcttatcaagctccaaaagtatttttgtgcatttcgtatttaggtgtttgttgacgcgagttgagatttttctttaacttaatttaaaaagataattaattagaagataaatttaagaaataaaaagatgaatataatgtttgaatactaaatatatttatgttgttttgtaattaaatctatgtagtttacgagtttatcttttatttttaaggttttagttgtgtttacaatttgatagagtttatgtaagttagatgttgctatatttttaagcgctacgcaagtatacgcaatcaagtagtaaatctcacacaggtgaggtcgatcccacagggaattggattaagtac

SEQ ID NO: 110875 - DNA, 3781 bp, Cannabis sativa
atattctcattcactttctcttctctcttcatcttcttcttctttcttctcatctaatttatattattttataacaaagaaatctttatctatacaatattatggtatagataccgatttattttaaacaatatgcatacaatataagtattattctgtctcttcaatacagaacaatctgaataaatagaaaacatcatcagaaccaaaaataaaaaaattaaaaaatagaaatttaagcaaccaacaatcattgtagtattacacacaacaataaataatctaagcactccccagcggaccatcttcgcttggttgaatgtctttctaaatatgcaattcaaacctttgcagacttcacatagcttataaaatatgtcactccaatatagtttcttcacttcttttctttttccttatttgcttttttgggttttggtattggttttgttttcataaaatatgtacagaatagctataggaataaataaaaggtaacaaacctctttgaaactcaatttgcatcagatgtggctaagggattagtgtcttgaagagagatcacagtctcgaaagcaccaaccagtgccttaactttgctcttcctactctcaacaagcttacttgctgtttcttcaatcacattattgaacaaactctgaactatcttttttcctgccacattttggtgtctcaaaacaactttcaccgaattcattttagtaccagccaactcgcttccattagtatcttttctcctaaagtttcttctccttgtggtggtaccttccatgttttggtgtcttgtgacagctttctctgaagttgctttggtaccaatcaactcactttcattagattccttcttcctcaagcttctttttaaagtggtacctttcctttctacattttggttttttgtgacaactttctcttgctttgtcatagtgctgaactcagattcattcccttccttgccttggactctttcgttcatgttgtcttcttttcgactttggatctcatgaataaattttactcgtctgaatttgagtctcctaggagtattgttctcttgtttaaggtcaattattgttcctctcctgaacttcacctttcgagcaggactgcttttttctgaagcaagttttccagccatccgagccctgattctgtattctgcttgcaaatcgggtttcttcttctcagttagcacctttgctcgacgcaaataggtgatggaattttctttgctatcaagcttctcagagggtgttgtgggtaataatggtgttgattccaatgaagacaaaggtctttttgtaatattatttttgttacttgaatgtctgaggcctttgtgcccaatggccattggagaaggtggtgaccgagagtcgtgcattccagaactagaatatcttgaattcgtctgagaggatagaattgattgagttgtactagttgaggatggagaaacctgaagggtatgattaacatcttgtgttggctcagaggttgtgttctctatagttgagtcaatgatatataaagtcttttcaggaacatgctcaggttcttcatctttattcttgtgttggctttttcgagtgatcgtgctggaaactctcctggaagaaggcttgggagataatgaaactgttggaaaatgcaaaatctttctctcacccagtaaagaggtcctcacagcttctttgcttctgttcttgtttcttattctgttgttttgatcatctagcaatcccttgccttctctggttctgttgcttctttcattaattgaacagccatgctctgtgagagaaaaagagtttgaatgcttcaaacttggattgttaggatcttctacagcagaaatatctgtgccttcaagggctgataagtcttccttcaaataggaagcttcattctgagaattaatctttaatttcctcttactttcttctgaaatagttgtttgatcattgcttgcacttcgtcttgctgctataaattttcgtattggagcccatgattttgcttcaacttcatgttttcttccatatttgcaaaaatcatggcaagaaccagttgacgctttaagataccgagaaggaaccgtagtactatttggggagtgtatttttttggtagcatgcctttgaacacaacttgttttaggttcaagggttgctaaagggatttcaaagcctgcctcagccatacaatcagatgcaaaactctacaccttgctgctgcagatgaaagcttaccattagaaaaacataacaaaagaagaacaacaaacaataatatacaattcaagaataatgttataatcagtatctcctcccattttcttatttaatctttggaaagcaccattggaacattatgctaaccaacaaaaatgaatgtaagaatgaaaaacccatttattctcctatcagagccattttagcagttaatgggtctaattcaatacacataagatcaaaaacccaattcataaaaatattatcatactatacacaaaacgaaaagtcaattacatattagatgatacacaatcatggattgtttattcaaggtgatgaaacgttcaacaatataactatcattttgccaagacaaataaattaagcattaatatacctattacaagcaagaaaaatatatttcttctacaaatgtatttttcagaattaagtatcccaaagatatatcaagttaaagttaccagagaaaactaacacacgatctcctttaattaaaacctatgaattaatatagattgaaaaaagaaatagggaaaaaataagttattggtttatgtcaaatatcataacgacacacaaaactgcaatcaacccaattcgtattaactcacaacaaatccaaatccccattaccctcaaaatcaccgctaagaaagaaaaacattcctccatccaaatcaatagttctaatcaatcaaccagtacaaaaataattattaataattattaatcaatcaaccaaatcaatgaaaaaaatcaaaacataatgaacaaagctttaaaagaaaaacatacctttactttctgcaaaagtttctttgaagaaagcacagaggatggaaagaatgaaaccacaaacaagaaatgactaaaaaaaacctttttggttgttgtttattgtttattgccagatacaattttttgcttttagtttaaactataaatgtgataaaaatatactttttattttaccgcgagaaaggaagagagaaaataaaaagttaggaatttgccaaacaacgaagaaatgtttagagcaagaacagaaagtaaactattttagaaataattatcaaatataactcctacacctgcgttgtgacatcctaccacctttgacatttccttgtaatcctaaaatagtgacataatattgtatttaatttgttatattgctctcaatgtcgtactaatattgtagtttagtggcgcacaataatacatgaaatactctatcaaaacaaaaaaaaaaattgtaagcaaaaatataaaagggcagtactactgattgtagttgtaagtggtttttggaacctcctatattattggcttaaaataattatttcttggagtactattgtcattcaataaattaattaggagattttatttacatcctaataatttagaaatgtacttattttaataatttttattttatataaaatatacatctttaattataataagttttttttaattttttttcttctaatttatat

SEQ ID NO: 110876 - DNA, 15405 bp, Cannabis sativa
  modified_base (15204)..(15218): a, c, t, g, unknown or other
ttcttggatagaacagttttgggtcgagacttaatgtttaaatcctatctaaagggctctgctgagatataattatgcgtacaagtggggccatcatgatatgcaaattatacattacatatgttgcaaattgtagctaaagttaacagtgaagctaaatttgaatggagtgtgtctttttgcaagcttctgtttactccacatatcttattccagttatgatttttgtctaatcgaactgccactttgaaagattttctttcgtggttgataatttttttgcttttgtttcctttattttctttcgtatctcaaggtagttactgttgattagcattttgtttagttatttgttaaacacgaaagcttcaattgatttgctttccctctagtttatgtaatacatattgaagaactctagaagtttgtcttgcttctatttttattttaatgccatcagatagtattggaataagagaagtgtttctctacaaagagttttcttgttgtatgtgacattttgtggaccttctgctagagtcatagattgtgctctatcatatgattgctttgcaattaagttggaggcactcatattgagcaacttaaccatcttagctacctgattgctgttttttagcgggggtgtgaggggtggtttgcaggtatagattttaatgtctacattgtattgaatattcggtgctgcaactgacctgtgttgtatttcatcatttgtctaagcatttgccatattctgtttcatttagtgtattatgttcgttctgttctgtcactaaatataatatttttctcaatgtagatggatgcccttttagtacccactgataacaatgagcttctaggctctgatatattgcctaataagcgtagaaggaagaaatctattgtttgggagcactttgtggtcaaaaaagttgatgctgaacacattagggcctattgtaaacagtgcgaaaagtcttttgcttacattactggctcgaagctggcaggaaccagccatcttaaacgtcatattgccttggggatctgtccagtaactcgtcagaaaaatcaactaatgactggtacacctggcccaagatctgttgttactgaacccccaaagagacgttataggacaagccctgttttcccaaccttcatttttgaccaagaccgctgttgtcatgagattgccaagatgatagttctgcatgaatatccactccatatggtagaacaacctgcttttattgaattcattcggactcttcaaccccagttcaaaatgccaagcttcaatactgttcaaggtgattgtgtggatatgtacctgaaagagaagcaaagccttttgaatcttgtgaatagaatccctggaagagtcagccttgccttggatttatgggtttcaaatcaagacctggggtatgttttcgtgacaggccacttcattgatggtgactggaatttacaccgccgcattctaaatgttataatggtaccatctcctgattctccggagtcttttagtcaagctgtcgtgtcttgcctgtcagattggcatttagaaggtcggttgtttaccttgactcttgaccaatcctttgtgaatgaaactgcatttgataatctaagaggctttctttctgtcaagaaccatatcctgctcaatggtcaattattggttggaaattgctttgctcgtgttcttagtaacatcgcccaagatgctttggggatcatgagagaagttatttgtaaaatacgtgaaaatgtaaagtacgtcaaaacttcagaaactcacgaagacaagtttttagagctgaagcaacaactccaagttcctagcatgaaggaccttgtaatcgatgaccaaactaaatggaacactacatatcatatgctggtggcagcttgtgaattacaagaagtatttgcttgcttagatacctcggaccctgactacaagataactccttcaatagatgaatggagacaggtagaaattctctgcatgtacctgaaatatttgtatgacgcggctaatattttaactgccccaacataccctactgcaaatgtcttttttcctgaagcctcaaaaattcagatggatttatttcaagcttccatgtgtgatgatccttttatcagctacttgaccagacctttacatgagaagtttgataaatattggagtaattgttgcctggttttagcagttgctgtggttatggatccaaggttcaaaatgaaacttgtggagtttacattctccaagatttacggtgagaatgctgagacatggattagaattgtcgatgatggcatccatgaactctttatcgaatatatgacacaaatgttagctttaccagaagtgatgatggaagaagtagatgatggcatgatcaaatcagagccacctcatgatatttgtcatgatcatgaaggtccttatatttctactggggatgggctttcggattttgaaatctacatctctgagattacaagtagccatcaaatgaagtcagaattagatcagtatctagaagagtctcttctacctcgggtacaagagttcgatgttctgagttggtggaatcagaacagattaaaataccctactctatctaggatggcttctgatattttgtcaataccagtatctagtgttgctcctgaatgtgtttttgacacccaaataaagagaatggacaagtaccggagtacgttgcatccagtgacagttgaggcccttatttgtgccaaggattggctccaattcgggtcatcaacacaaacaccctcaccaacttttgaggttactaatgcaattgtgaaaatggaattttaggtttagatttaggtttcattttctccctgtaggtatggtagataatgataccctcattggattttttttttctttcttaaatggaccaataagtggttcaagtcattgctttttatgctgtcttaattttcatctattatagaatgttcatagttttttgatgcttgcaatagggaaattgtcctattcttggattctttgaactttgggacttcttgccctggctaatttttccatattctggcttggttggcttatacaaattatttacttcataaagtgtgtcgttactctctagtctactgttaaaattttagattttgtggacactaataataaatattgtgttagaaaaaaaaaagaaataaaaggaaaatagttaaccattgtttttatttgtttgagatgaataacaagtgcattttatttttatctgtaatgattatacacaaatctgacatataatttaatggtaaatgacttttgacaagttagaaactaattcatgttgaaaggattgcagttttcacaaatttgtttctgagttctactgtatgttaattgtaattatttgtctgatgtctaataatttctctctcatacttgataaatttgcaaatatatactcataaattagcaaagtatattttttcggtgaattttcgagactatggagataaaaagcaagttaaaaagatttttggattattcgatttcattcaaatatttgttgccgtttgttaacataaactacaagtcgtttaaccgaacaacatgtcgttttaatatatgttgggataaataagtcgtttaatgctatttgcataaccttattctcaacgtctcattctgaagaaagtaaataagtaaaaaaaacaccactctttttgggaatcagtataatgatttccatggcatcccaagctttaacccacttaccttctttagagaatctaccagtaccagttataaacctattcgagaattgcaaatccattgaacaactcagacaaatccacgcccaaacaatcaaactgggcattacatcacttccctttgtacagaataaaatcattgccacctcttgtgctcaacaaaacgacaacatggtatatgcacgtcaagtgttcgatgtaattcctgaaccaagtgtcttcatttggaacaccatgatcaaaggctattccaatgctaggatgaggatgcattgtcctagagatggagtgtacatgtatgtagctatgttggaaaggaattgcaagcctgaccattatacttttccctttttgtttaagggatttactcgtgatattgcattggcttgtgggaaagagttgcatggtcatgtgcttaaatttgggcttgattcgaatctttatgttcaaaatgctttggtgaatatgtactcttcgagtggtctggttgatatggctcgtggggtttttgacatgtgttatgagatggatgctgttacttggaatgcaatgatatctgggtataatagagtgagaagatttgatgaatcaatgaagctttttgaggaaatgatgggaaaaggagtgttgcccacttctgttaccttttctttggtgctttcagcttgctccaaattgaaagatttggataatggaaaacaggttcatagatatcttaaagagagtggaattgtacctaatttagttttggaaaatgctttgatggatatgtatgcagcttgtggagaaatgagtacctcacttgagatttttgagagcatgaagactagagatgtgatttcttggactacaattgtcaaagggtttgcgaactcggggcaaattgatttagctcggaagtactttgatggcatgtctgaaagagattatgtctcttggacagccataattgatggatacttacgagtgaaccggtttaaagaggcgttggagctttttcgtgagatgcagacttcaaagataagaccggacgagttcaccgtagttagcatcctaacggcttgtgctcatctaggtgcttttgaattaggagaatggattaaaacttatatagacaagaacaagatcaagaaagatacctttgttggaaatgcactaatagacatgtactttaagtgtggcaatgtggaaagggcactaatggtttttaaagaattgcctcaaagagacaaatttacctggactgctgtgattgttggccttgctgttaatggacatggtgaggaagctctcgatatgttctctcagatgctgaaagcttcaattacaccagatgaggtgacctgcattggtgttctctgcgcctgtactcataccggcatggtagataaaggaagaaagttttttgctagtatgatcagtcaacatggaattcaaccaaatgtgtcacattatggatgtatggtggatcttcttggccgagcagggcatctaaaagaagcatatgagaccatacttaacatgccggtgaagccaaattcgattgtctggggagctcttcttggtgcttgtagagttcataaagacgcaaaactggctgaaatagcagctaaaaagattctcgaattggagcctgaaaacagtgctgtttacaatctcttgtgcaatatttacgcaacttgtaataaatgggagcgtttgcgtgagacaagagagatgatgagtagtaggggaatcaagaagaccccgggatgcagtttgatagagatgaatggtacggttcatgaatttgtagctggagacctgtcacatcctcaatctgaagaaatatattcacacttggagaaaattacaacagatttaaaatctgttgggtattcacctgatacatcagaggtatttctggatatgggagaagaggagaaagagagtgcagtgtaccgccatagtgagaagttggctattgcatttggccttattagttctaagccaggggtgacaataagagttgtgaagaacctaagaatgtgtgtggattgtcatggaatggcaaagttggtatctaaggtgtataatagagaagtagttgttagagatcgaacccggttccaccatttcaggcatgggtcatgttcgtgtaaagattattggtagaagtataataaaactgcactaccaaggattcttgactgactgtatattctagaaaatgcaataacaattcatggtttcgagcatgattataaaaatatctgatatgcttttactaaatctttctacagcttcaaacatgcataaacaaaacccaagactaggaactcaacatatagtaaattactacagttttatagtcctcaaatattgtaaggctaggcatagagcttagctttagaaagaaagcataaacaaaattctaccataatcagattatataactcattagagcattcttgttacacaaaccactaatcaagaaagcaattatatttataagggttttttttttcggtaaatattacatttataagggtaatactagaaatctaatacatcacaagaacagagccaatatatatactgacaattataatatctaatagtagtagcagttgtcttacactgatggttaaccacaactggtccaaaatccgaagaagcatcaagtggtacctgggtcaagcacaggaagtctgcaatgcaagctgattgacttgtccatttgacgtgaaccaggaatgaagaactggaagatcactgtcaagcaagcaccttgaggagcaataccatagaaagcacaatctggtttggccatgtggtagcaaaggcttttagcaaaatgtttcacactaacttgaactgattgaccgtctcctctttcaatagctctagaggatcgagtttgagcactcagatttcgatcctcagctggagcctctgcctgagctcctataacaaacaatttccgaaactcagctcccagcgtgattagagtccttgaaatctgtacatgtaagtccccatatttggtgatggagacattaagcaattcccctaagtgcttcattcgatccacgaaactctgcaactgattcatatcaggtacctgaacaagagtctgaggcaaatcctgtgccatgtcgagagccgtttgaagctcgagaagttgagctctagacaaaggtttcgagatcggaacatcttgaatcaccgccgatttgaatcccttggtttcaaatgtgaggaatggcatcggctgggtcgaattcactggtagtttctttacgagtttaatctggaggcgattcgccgttggaccagttccgaactctgtacagatgctgacactactacgaagagctcggtggaggagcgaaacgtcaatagagaaggcaattcgatcctcgttctggctggagatacggtaatcgtcgaagagagcttctttacggaattgagcgatggattgaattccgtcgccattgagaagattatggaggaatatagcgtggtctctggtgaggtagagatggcaaatcttccccatcttgtcaagagctggtaaaaacctcttttccagcaggcaaacaccattctcagtcaaaaacgccttgaacttcatctctctactctatctatcttctaggattagcaatattttcttttctactgatattttctcgggaaacaaacagtgggcttagggatttgaattttaccagtgtgaagtgggtcggcgccaattcgtaactacatcaaaggaactggcgccaaagctcaatttgcggttcggggaggtcctattgtaaataaattaagaatgtaagggtatatttgcaataaaacttgtttgggccttctattatgctagcccaattataaacccggcccaagcccaatcggttctgtatatttttttttttttttttgtttttgagggaggctctgtatatttagagttagtattataatgtgaaaattacaaattattattagtttttactgtgggcaaaaatattttttttttgttttatgggattttttttaaaaaaaaaaatatgagaaaaacaaaactggtttccttatattagttttcttatattttatagtttttttttttttttttttgaattattctcataaaatattttgaaaaaaaaggtcatatttttacaaattctgccacaaaaacaataaaaatggaaatcaatcattttatagttatacagaaatgcttccataatcattgattgtaatatgattttttagcattactcattcatagaattggaagaaaaaggaaaaggaaataatcttgaatgattatgaaagttgcaagatttatttttgttatagaaaggcaaaaaatggtacaagaaaaatcatgtattctaatcctaagctacaaaaagatgaaaagatccaatttttatacataaaaataagttacaccagatgatcttgttctgcaagacgaagcttgttcaaaatctcttccaatgcctgaactgaaactttgtacaggtcttgtgattttctgccttcatccacaacttgaacaatgcatttgtacagatgatcatatctgtgaactgggttattaacatcaatgccaatgtcactgctgaaactgatgttactaacaacatactttcgcttcagatcttttctccaccgcgaaagtatgtactgcgctggaatctcctccatgccattttggctgaggactgaaagggcgtgcctgcacaaataccctcttaagttaaacatgccacagacgcatatgacctccatctccgggggattgaatagaacctcgtaatctctagcctccctcacatttccatttacttcagtttgctcttttactatatatgtcatgattggcccatcagagtttgactgtttcgagcaaaaacatgaatacattccttccacttccctttcgaaccttcgcagtatgttgttcgtgtacaatcttgagagctgcaactcgaaataacatcttgtttttgagtttggattctttgaatccaaatctgccaatgattcaagctgatagtgtttctgcagagctagatcatacttatctaagaactcttttattggagtatttctgttcagatattcttcgaaaaatgataagacaacctcatttggttgtagtggaaacatacctgccaaaaatacatctttcaaaaatacaggaacccagcgtttcctgtcttcatataatgattgaagccatttctgatctctaattccatgacgctgtaccatgtcctcccacgctgcctcgaattcttcaggcttctgagagtagtatactgctttattcaatgctgcattaatcgcattgtactcaaacaagcttcccaatttttctggtaccatttgcattattctcgataagcaaagacattgagtggctcttgggaaaacatcagcaacaacagtttgcaatgtgtcattttgatcggaaattatgacttgtggagggcgtccagacatacatgtaagccacgccctgaacaaccatgtgtatgattcaattgtttcacctgcaagtaaaccacaacctaacaaaacagattgtccatggtgatttactccaacaaacgaaaccagaggtacttcatatttgtctgtcaaacatgtagtgtcaatacacactacatctccaaaataattgtaagtgaccctagtccttgcattagcccaaaacaagttcctcaagcatcctttctcattgagatccacaacataaaagaaatgtggatctaccaactgtgaacgagaaaagaaattttgaactgcttgggaatctcctgcctcaagtttcaactgattggagtaatcaatactcctaccagattcttcttcctcgacttctgtgttcccattcacctcagcatcaactatcacagttctgaatagcttgactttctgagtttcatcggggccatctaattgcaacgctcttttggttccaacgcctatgttcttgtgggatttgtagaatttcccactagcagggctaatcaggtggttatgctctagttccacttcaataattctccatcttttagtgtccattagtctgaattttatcattgctgggcaaccagttcttgtttctggtcttgggcggttagcgtcacttttctttttgaaacctgcactgctgcagctaagttttcctctgtatctttctttactctttctataccatgtattacttactctaacaccaaatccttgatctttggcataacaattataaaagtaatatacatcatcataagaatcgaactccattccaaccgaaggaggcaagggattccccccttggagtatgccaccttgactgacatattcagtcattgcacaatctgcctcggtctccaactcatcgccatcatcatcgccaactggctcagtgttgagagaaacttcttccatttataaacagagaaactgaaaaactaataagccaacaacaacaaaaagtgaaaaactaagaaacaatccattaagatttccaacacaggacataacattgcacctacttaatctcatttctatggtattcactaatcataaataagcatatctcaattaccacctacatcccaattcaaagacaaaaattctatgtttgcaattgaagatgcattcatagctatgattctaataagcttttatcattttcaccagtttcccaacttttccagcattaattatatacatattcaatgcaatcaaaaaaatttgacaatacctcaacattaatcattttctaattccttaatccttatttcccaaaatgatggggaaaagcaataacttgaaaactacccatgtactaatgttagatgatctacttttccttgagcttaattgataaataaggaagtgagcaaaagagagcaaaagccagaaaaaggttattgttcttcaaattttctagcaagtaaaagaaattcataaccggaaattggtgtcagcatttttgatgggtctgtgcaattacctcagaagagaccgtgccggagaagcgtgaagcgcacgcgccgtgtgagcagagaaacgagggctttattagattactccctaatatatcctcatcaaatgatcactttgaaagcataaataaaatcttaaacttggactgttgggttgggatagtaatgtaataaaatttgaagtatagatttctcataccaaaaagttttgattttctatccaaaaaaaaaagttttgattttctattaaaaaaaaaaagttttgattttgatgtgtttcaaaatttaagagtcaacagattttacattatagactcacaaaagagaagcttaggtaatggactcacagtcacatatcatattcacccttacgacgccgtttctcttgaaacttttttcttttcctcttttataaagaaaagaaactgtctatgttcttttgatttcccaaatctcatttggttttatatttttttcatctatttattttatattattttaaaaattacaaatgtaataagtttaaaattattagttttgacggtaattataagagatcatgtaatggtattattacttatgttatagccaaatttattttgacaacaagtagtactagtagtattatttggtggtgaaaaaatttcgattgtaatcaaaatttgttgatagcaaatgttatttttgaataaattttggttccaacttcaataaaatgcactaataaaaaaaattattttattattttgttttgctgaaaataaaaatagcaataaaaatttaccttttattttcctttttttttttcgcaaagggaaattttctttaattttctttagtcaaataagagtgttgactttgagatcgtagtctatttcttattttattaggtaaataaaaagagaacttttttttatatataaaaaagaaactaatcccaaaaacgacatcattttgaaaaaacgacatttgagaaacaatattttacaaaacgacaccaattaagaaaacaacatacattacgacatttgataaacaatattttacaaaacgacaccaaccaagaaaacgacatccatttagaaaaacgacatttgagaaacaatattttacaaaacgacattactccagcaacctcataaagaggaatttcctactttattttggaaatgacaaaaaatattattattatccaatgcaattataacaatatcatcaaaaaaataaaagtcaaaacacaaccaacaatgatcaatgtttctttttaagttttcaaccaatggtgttcacttttcacactcacctcaacgacaaacactactacatacaaattagcccaaaaagcatctatcattattttctaatcaaattattttcataggaaaaagctaaaaagcttccacagtttacttacatatggaacagttaaaacttattcacagagaattggagcaaaccactcctcaattaaaaattatgaactataattcttcagctacaaagaacttcaaacctaccccacttattcaagtctcacacctacattatgaacccttttcaatgactcttcaaatgattgtaatgcaaccttgtaatggtcaagagagattgcaccctcttctacaatttgtaaggcgctcttgtacatctggttaaaccattgaacacgatcagaaacatcgatgttattcgaaccatgatctagaatgtggagacgcttgtaatcctttttccatcttgagaggatgtatttagaaggaatctcctctacaccattaaaattaagcacacatagggaatgccggcaaagataaccataaaagttgaaacaactgcagatgcatcgaacctcgcctgctgttctgttgtacagaacttcataatcctttatctctcttctgtttccctcgctcacaacacgctctttcactaagaatataacaattgggccgtctacatgcagctgtgtcgtgctgaaacaagaatacatctcttccacttcgtattggaacttcttaaaaacttctcttgtgtaagcttttgaaagctgcaactcaaaagaacatcttgttttcaatatggggtttgagcttcttgattctatatctgcaagggcttcttccttgtgtcttttttgcagagccaattcatacttatcaagaaactcttttaagggtgtctgtttgtgcacatatttatcgaaaaatggattgagtgcctcatttgggcgtgcagctgccattccagcaaacgatgtatccttcagataaaccagagcccattgaactctgtcttcatataaagagcgaagccactcgtgatcaccaattccaaaacgctggaccataaatccccatgctgcttcaaattcaattaccttcatagattcataaactgctttcactaatgcctttctaatagcatcataattgcacaagcctcccaatttttctggaacctttttcatgatcagcgataaactaaatcggtgttgacatcttggaaacacctcggcaatcacacttgacaaaattttacacctatcagtaataatggtttggggagaatgtcctaatgtacaagtaagccacgccttaaacaaccaaatatatgactctgtagtctcacctgctagcaagccacagcctagcaacactgactggccatggtgatttattccaacaaaagccacgagtggaatctcaaatttgctagacatgtatgtgttgtccaagtaaataacatcactaaaataaccacatgcagctctagaccttgcatcaatccagaagacattccttaaacgcccttcctcattgagatccatcaagtagaagaagtttggattagtcaattgcatacgacagagatagttgtaaagggcctgtgtgtcgcctcttctaatgttcaactgattgggatgatcaggaaacatgccggtggggtctcttgctattggattagaagttccattacccccggaatctatcacaagtgctttgtacaacttgattgttcttacatctgcatcattactcggttggcaattcctcttaactccattacccatcttcttaattgacttgtagaccttactacctaataagtggttgtgttcaagagtaacctcaagtatcctccaccttttggtatccactaaacgcatccttatcatagccggacagccagttctcgtttcctttctcagtcgatttacatctttaattctcttgaaaccctggctgctgcaacaaagaacagcaccatacttttctctactattccgcttaaaccacgaattcttcactctaacccgaaagcccacttctttggcataacaattataataactataagcatcttcatatgactcaaactccattccaagagcaggtgcaacaaattctttccttccctcagaaacaccattttgaccctctaattctgctgttaaagttaaatcatctccatccatctgaacctctttgcaatctggatcaagaacttgctcactactaagaggagcttcttccatctggaaaacagataaaccccccaaaacccttaataaactataaaaaccaacaaacattaccaacaactctgtaaagaatgaaaatacatattcttgtaaaaactaaatactcaaaatttttacagcaagttattcaagactcaagtttgacacttcataaattacaaattacaatctttctctatacctaaataaattgcttcaatccaatcaaactctcacttaaaaattcaaactttcatccaaatttcgcagctcgctaaacagaaaatgaagggtgaaaagtctaggctctaaatctaaaacctttaaataattactttcttccaaataaaaactatcataaactaaaattaaaatttcagtctattgattgaaggacaaaccctaatgaaagtggtggaaaatgtagcaactaacaaattttggaattgaaatagtttcgagttggagaacacttacgttttaggataactgtgaatagaaggaaactccagtcggagccgagagttttgggagtgggcggtgagattgtgattagggaggagtgagttccgtctggttctgtactttcaatgttatgttcattctttcttaacaaaaacaaaaaaaaatggtgttcattaattaattcactttaataagtgcaaactcattttacataattgcatgagaccactatttatttattttattatttttttttgttagagatatttattttaagaaaattctacaatgcactcctttaaaatagatatattgatgcacctttatctattttagcatctaaaataattttttagacaaattttttttcatggtcatgtacgttatagttannnnnnnnnnnnnnnaaaattttaagaaatttagaaaattttaacatgccgaaaactatgttcaaacaatgtattgcacgcgcagggccggccctgaaataaagtaggtcatagagaaaaaaaaaatttgggcccttatgttagaaaaaatgtggtatttttcaaaatcggtaaaaaaaatgtataattttaaaagaggaaa

SEQ ID NO: 110877 - DNA, 8243 bp, Cannabis sativa
gagagagagagagagagagctaaccagccaaatgcccaaaagtttctggaatcaggattccaacattgttcttgggaattggcaaactaaaaagaagagctaatgttggtgctatatcaacctggttaaacaaatcaagatacgaggtgaataggaggtcacagaattaatttggaattatcaatctgcttataaagaacattacagttgaggattaatgccaaagtttatatttactgaatgtttttgaaaataatgatgggtaacttaatgttattgttaatctgagttagctttgttaatctctgagtgctcaagtttaatcgttatgttaatatcttatgcatcaatcaatgggtcattaatggaagggcttactgttgtctctttttcagtatttggataaccgcataacatgacagtacagcatgccttgaatgcatggagtagttacaatccaaataaagattatcacaccttgaaaacataaaacaaacaactatataagcaaactattgtaaatgatttacctggtccacagttttctgagagaatgattcaaaacgggagacatcgttcagaccgataaataaagccaaagaatcagtctcttcatatgaagatcctccatgattaccattctcagtcatgccatgatcacttaccactacctgcaaggaaaactcatatcagggaaagtttacatgtgagtagttaattacccacgctcaggcgagtttctaaatatatgattatataaacaaaatgaattcttaggaaatgaaaggtgcaattaagagatactctaaattagaaaacattactgctatacaaaaacgtaaaaaacatacagaaggcaaagaaattatcacaaaccaaaagtgtccttccatgattattcatttgattcagaattctatttgtatgaatcatcttaaccacctcatccatctccattagttttggggccatcaagacactgaaatagttaaacaatactcaagaatcaaaagtatagaatcagttaagcaagaaatatacgaaactggggaaaagaaaaaacctgttgcggccaccaatatgtccaacatgatccaagcctaggtaatgaagaatctgaatcataaactcagtcacgaacatatattattatgaaagtgtcagaacacacagtcatcgttagataggtgagacacttagattcattatttatgtcaactgctatgtaagccctttgtttttcatagaagaagttcaatatttcctacattacatactcatttgagagcaagaacagcaatgacataaatggtacaacaatttcatgaagaccaacatcatgctttaaggcaaattgtttcagttagtacggaatttatcaacaaaaggtatttggaaaattatactaaccatgagatcccaatcatatctactaagttcatcaggcaaatgtcgagaaacattttgatcaacttgtatagtatctttaacctgagacaagattttgatgtatagtgcaagtcaatgtatcatacaactctcatagaagcaaatgataaattcgccaggcagaaacggcaatggagatcaatcaaagctaagaagaagttgatttgccactccatgatatccatattaggaattgaatattttaaatttgtaatcccaatgagagcattgttatggttgatatcaacaatagaaatacttacaaaaaagctactaactccatcatgcctcttaaataatcctggaaacaacttcagccatgtttcatcaccaagcatcaccattttccaaccaatcttaaaaaactggctggtctgcaaaaaaaaaaaaaaataaacaaaaactagttctattgcaattacaggcatattcaggaaaaataattatggtggacaatgtccagtaaatttggatgaactaaccaataagattgtcatctaagagagcttgcgtgttaaaattaaaagccacgtcaagaaatcctccaattgctccagaaaccatagcctgaaagcatcagaggattagcaggtttacccaagaaagctattttcaggtgaacatgatattgtggtaatgatacccactttcaaacgaggcattgtaacagtaggaggtgcagcctttgcatgatacccaattgccatgccatttgctaacagtgattgagtatatggcatggcttccaccaattcccttcgaggagggttaccatccttgccaagcacaaattctgctggaagaccatcaataacctgaactaaagtcattgagagtgacattttactagcaagataattggcataaaccaatatagattgattgaaaagctaactcataaagtggacataccattagtattagcttatcaaatgggggaagcccagatagttcctgcattgcaagaacaagataactttacgaatttctctaaattcataacccagaaactgtaattactgaacaaaaaaaaaaaaaaaaaccagctttgctaaaatcataacatctctattaatttgaatctatgcattcaatgaagcaagaacctgatacagtgatctgagcttatcaggagggggaagtgccatgctatgattttgaactgaatcagacctcggtgcacgaaatgcctccggaccactgagattaccaataaagagggaattataaaaataaaaaataaataaataatagttggttttgtacatttgagttgccaaaatccataaaagggtacctaaaaccagagagagctggtttgacggggaagaatccgaaaacgaagagtgaaaggccaatgatttggatgagtactccagttaaggtgaagatggtgaggttagtacacgttaaggaagacattttcagattatttcataacccaaattgatgtagtattattagtattcagattttcgagcgtaggaaaacaaagaagaacaaacactcaacacacgtttacccccttttctctgccatttcaaagtgtttgtatttcttatttattttgagcaattagtctgaagaatatgtccaatatcccttgttttgtgatgtgagataaatttttttttttttgaaagaaagtatgtcattaatcaaatcaaatcagctgttacaggaggaccaataaatctatgacaagctcacactacaaatttgattggaaaatttgataaacacgtgactgaacgttttggtcgggtttgactcggactcgacccggccaacctgtttatttgggaaaatctattctctatggatgggtcaggtccaataaatctatgacaagctcacagtacaaatttaattgggaaatttgataaacacgtgactgaacgctttggtcgggtttgactcggactcgacccgaccaagctgtttatttgggaaaatctattctctatggatgggtcgtgtccaataaatctatgacaagctcacactacaaatttgattgggaaatttgataaacacgtgactgaacgttttggtcgggtttgactcggactcgacccggccaacctgtttatttgggaaaatctattctctataaatgggtcgggtccaacctgattaactcttttaggcgagtttgggtttgatttttgttaagagattatttcacaaatacacaaaaacaacaaataaattataaaaatatagtttcacaaaattttaaatatttttacgattttttatttattttatttacagaaagtacggtttttttatgttgtactattattaatttgatgttgattttttgttatatgtatgttattttttgttgctgttttaatgttatttagatactattttcatgttacttttacgtaatttttttgttattcgtgttgtttttatgacaaactacaaaaatgtaaaaaaaaaaaatatatattctttaaacgtaaaaatgtaatttttttataaaaaatagtgtcttttataattatcttttttgttaatctgtgggttcagattggactcgtacctacatgtaaacacgattaaaaaaaaaaattaatatataaaaaataataatgtattttgttatataaaattttagtaaaaaattgtatgtatatatatgtaacattggaagtaaaaattaaaatataaatataatttttttattatatattttatttaatagattggagaagaaaattttagaactatgtatgtatgtgtatattatactagtgtataactattattttataaatatttatgtcttatatcatatgaacattaatttataaccacttttttaatttggatatttttatagatatgaatatatcatatgtataaattatggtggacaataactattacgaaatgtatagatggactatgaagtatagactttaaatttttagtcacaatttattttgatacttttagttttattatcatgttcattcatgattttcgtgaacaatgaacatagatttgactactgatttgtttagttttgaattaattgatttacgtttctgctttggatttgaaatggttttctttttaatttgagtgataaaaaaaataaaaacaaaaagaatgttgactgagatgaccgtgtcaaccagttgactcggccaacctagtgaacccgaacctgtgagtcgaaagctacaaacccaaatcctttgaacgggcgggtttgggttcaattttttaggcccaaaactcgcgaacccaaaagctggtcaaccctcccgatgttcagccctataacacatggaataaaaataaactcacataataatcataggaaaggtattctttaatttcaattgggttccaaaattatccctctcatttctaattctccctatctctctaacttccttctctctcctctttctctcaatctctctgttctctctcttcaaaaactcgacccattaatggagccgaccatcaacccaaccatctcaatccccgacagagtcgactcattccacgcgaaccgaagccattcaactgaaaagcccccaatgaagtcgaacccacttgaactagaagtgaaatcaacgacccaagctaccatcggagatttgccaccactgataatgaaagaaccagttaaaggttagtttttttgtttatttttttcaatacaccataaattgttgttttgggtgattaatacatcgtttaaaccaataaaatttgtgattaatggtttgatttatactgttttctatttagggaaggatatgagtttcgggatatgacatttttatgggttttgtattgttttacaattgaatgatattgtgcaattaattatgccaagtaataatatataggttttattgtttgcaatattgtgcgattatttgtgattaaatatgccaagtaattatagttttctgggttttgacatgttttgcgattttgatatgttttctatagtgatttgcaatgtgtagggttttagcgataattgagagatatgtttgtgacttagtttgcgacttgtttgtgacttagtttgcgactttgatgtgtacaatatccaaatgtttaagcaattttggacattattttgtgattccttacttctgttttgcgatttttggtccattaatgtttgactttgtgcgactgatatttattttttcgctcatctttttttgtgtttaaaatgcagatggctctagagctgaatctaccattgtcagagcctttttcaaggtgtatcacatacaaaggcaacatgtactttaataaaataaagttgaagtttgaagtctatggtttgactaacaaggtgaaggcatctccttttgaattttttaggggtaatagtgcatcaatagttattgaggaaaaggaggtgagtgaggttaaaaacgatgaagtgtggttttacgtgggtaaaacggaggccagattcgggaggttagagttcttgatcacatgcctaaagatgaggggtgacccctcgacagaagaattgaatggtcaatgcaattctgattgaataccgcaagaccattttaacaataagaaaagggtgagctttaaaactctttggctagcttttgagaagaatgatattacagacgatgtgtacaagttggggttatgtacatttgttgaaagcgtattattctcctggtccgagggtgtgtttggacagatatgcttaagttagttgaaaatgaagataacttctacaactatcaatggggcctcttttcttattagaaattgttgtcttccactgctaaaaatatgttgcagtttatgcaaaactacatggataagttgtcgagtaagaaggataagaagaagaagttcaagaaagagaaaaaagtcattcaactagaagcaaagtataatgtgtacgagtatgcaccagccctacaatataaggtgtttgaggtcatgcaagatgtggggaagaagtagggctagtgcaaatggagcaaattccctcaaatgttgaactagagcactcccgattcaattacgaaacatgaccttaaaaaaataatgtggcaaagctgtttgagaaaaggttatgtgaatctttcactttctgtcaattatattctgctatatgtgttttgacattatttagcaaatgtttaagatgttttatgatattaagcgacatgtttgtgatttacaattcaattttagtgattctaccttatgataaacgacatgtttgtgatttatatgtaagtttttacaatttatatatagtgacatgcttgcaattttcgtgcaatttgttggttagatattgtatatttttgtgagttcttgtgagtttatacgatgttgtatcgatttttattgtgcgagtttacctttcaacctattttacaattattgtgcgaggctatgcgattttattcttcattttgctaatggtggttcattaaattttgtaccctcgaaattgagaggtggactattggaagaccaaatttgagggtgaagtccccacggtggagatgggtcggatgagatagaagaaatagaagttgttacataggatttcactgttttcgaaacccaagcaaaacaggtggctgaatatgtttagagtgcaaaaatcattccaccaacaccactggacaatccaacagagccattgacatcagccatagtgcccctacctcaaatcctgcagccaataacgccaactacctggggttagtgaagagattggagaaggttggggtacccaataatctacgattctagctggacagactgagatgaaagctacctttcaaagtagtcagaaagagatgaaggatcttatcatggatcaaattgcaaccatcacagccaacacaaccaccacagtcgacatgggatgaaggtcaatatcattgtgataacgatgatgatgtgtacccaaaagattgggaacccaatgtagatgaggttcatttccaacagatgtcattattcttgccattgatgatataaagaattaattaattggaattgataatcaatcctcgtgggaacgatactttatttatcattatattacttattttgattgtgtatacttgcgtatcaaatttaccgaatagtttaaacagatacttactacgtgtataagaaaaaaataaacatttgtgcaacaaaatatttaaattttattttaatgatgtaaactataggactgttaaaaaaattacaaaccattcaacctgagtaaaccgctcaaaccaaactgaataaaccaacaaaaaacataacccaaataactttacgaaaaattgatactgcccaatgaatatattggacaagttgaatattattctaacccgctcaaataactcgaataaaccgaatagaccgatttaaatattttttcctaaaattagtcatatataataaataaattgtttaatagttaagttatattacatttaaagtttatattttacattgtttaatttgaaatttaaaatttatagttgataattttgattgtattgaagttgaaatttataatttacatatgagtatatttttttattctattttttgaaaaatgttgttaaataatttaatattattcaatttatatttatttttttaacattaatttaaactatcccttttaatcttacgtatagtaatatatgttagaatttgaggaataagatgaatgaggttccatcccaaaactaattggcaatgggaggagtagccctttcatcttatacatcacaatttat

SEQ ID NO: 110878 - DNA, 3051 bp, Cannabis sativa
tatatgtgtttaattttcatcgttttagaagtttatatttaggatgttaaaaacatacttgttagtaaatttaggtcctggtaatatatattccaacacatacttgaaattttaaaagtgcaaaaatggtaatgattgttcccttgtgcctatatatagccgaggttggtgatcaacatgttttataatcaagggctaagatctcttcaggaaaaatacaaatttcaatcctacggctagggagttaaagggagggcattaaatgccgttactggaatcaaggcattttttatcattaatattttcctcgaggattgcatcaatattaagtagttgtcatagcaatatcccatacaatagacactttcccgagacgcgtggcatacacgaacccagaacatgaggtcacatatgaagtgtcagttgtattccaaacaattcttgactctttacttgccgagacccataaagggaaaaatacttccaccactaccagaagtgtccatgtgtccaagtatccaaggacacccgaaaggaagactgcaagtttctgccactcatgagtaccgaaagcttaggggtaaacgttattcgtgtttccagacgagagacacgtggcataacaagagataactattatttaaacatgggcctaagcctttccacatgatgaaacctagcccagacctaggatggggctgagctcgtcccacatccgaaggctttgcccccaaagatactgtccttccattatcagaagccattctagcctttcaagaaacagaacaaacaaagccctccagatgaatagcgggacacatccaaaggagaacaccaagggacactcctgaatgtcaactacaggaggaccctcagatgcctactgcaggacgagtgctagaggtctaccaaaagatgacgtggctaccattctgacgcagaatcagatattgtctcatgtgtcaggtcatggtagtgcgcacaccactaaaagtgtacattatttttgtccaacaacacctttgatattcttatctgcaagagtggcctccgtgtgacacgtgtcccgaatcgaacggtcccctatctacatggatccttcgacccacgtgctgaatacctgctagtgggcctaaaaatcatgtattatatgtatttaccctattagtggacctatttttacataaaaaccgaatggatcacgggtatgcacggatccaaactcaagcctatataaactatgctaccccttcatacaaagaggaggaaactctgcaaggtcactctaagcgttcttctttttcaagaaaaacttagagagaaaactccatagcaagagttagggttcttcaagattttaaaacttacttgtaataaatacaaagccttaaaggcaaatacactaactcgtggagtaaagttcattaacaccaaaaccacgttagaatctctatctcatttacttaatagtttatttaatttctcaaacctcttatttatttagttttcaaaaaatttggtaaacaagataaaaattacatacgtgcctatatgcccataaaagagtcaaacaaatgttcatacaatttaaattgtttaaattattatttctaacaattaaattaattttaaaatattttaataatctatagaagttttatttttataattgtaatgtataatatctatgattctatatggtggcgctgaattaatctctgtcatacactcaataacagctcaaagaaaaaaatactgaaaagagaaagaaaatattttattggtaatgaaatatcctttttagaggacttactagagactttctctataaaattttgtttccattataatacttagcatcaattaaatttaaagacatgggatagtatttaatggcaaatcgggaagattcttttctcttgtctatagttttagctcatcaactatatatattactatgtctatatatacaatattttgtggctctggcttgccctagagaaaatatggtattggttgtaatacatatttagagatttgcacacgtttgtatttatttacagatatatactacttgttttgtgtattgagtaattaagcttcttttatttgcatgcttttcaaatcctatttaattatttcttataaaatcacatgtctatatacaagaacaacaaaatcacgtgtcacaattaatacagttggagaaaataataaggtattacatcatgatgtctagacatttttactaacaatttaaaacatccttatagttattggattataagtcatataaaattttggtattattattactattattgtccaaatttgacacatgagatctcaagttgtaacctgtaaaattatctacacgtgctaattattataaacgtgtcttatataatcaagttgtaaccatttatcattttttttttaaaaaaaaacatttattatcttaattatatacaaaattagtgttttaatacgagttggactttttgatacgatacgaaactggcatgaacatgaaaagcacaagcatgactaaacatgaaaaaatacaagtttgagcacaacacggcatgatattataaattggcatgacacgacaaaaaaaaatatgtccttaaacatgacacagcatgagaagcacaaaaagtatgtcgcgtaagcacgaatagagtactagtccaaaagcacgaaatgacatattaaaaaactttataataataagatatgaatttatcaattataaataagtaaaaataataataaaatttaaatataatactgaatattataccaaattttttatttttacacttcaaaagttatttttttaaaaaaaattttacgaaaattcacatagcaactaactgctcataaatcacaaccaaaattcacatagcaacccaccagagcaaccactgatttagatggaataacatttaaaatgtcagtttccatctgaatagcatatccccagatggacgtaggtagagttgaatagctaagcatggaccaaactatttctaaaagtgtgcgatt

SEQ ID NO: 110879 - DNA, 7198 bp, Cannabis sativa
gtatttttgaaaaaaattccgtcccagtataaaagtaaaaaaattaaaaatttcggtctaattatcccaaataaaataaattagaaaaggtaacggcgtattgatccaagggaagacccagtaagcagaaagcccactagaaaagcccaaatttgtttggcaaggcgagggggcagaagccgagcagtgaatgtgatattttgacaggaaaactctgtgcaagaaaagtaaaaatgagagtggtggcgtcaatgtcggcggccaagctcttctccgttgctacctttgccgcaacctctcgtcttggggcgatcaccccacaaaaaatccccttttcgggcattagtacctccgtcaagagtaagaagaaaaaactcgaagatttgaaagctatggccaagtctaaagaagcacttgtcaaggagaagaggaggacgcgttccgaccgagagtttgaattggatgcggttcagcgctttggagacacagccaaccatatcccagttatgctcggagaagtggttgacgttttctctgcttccaaaacgatgtcgcttcgctcctttgtggattgcactgttggagctgctggtcactcctctgctgtctgtaattcatttccttactaccttttctttcccttctttttcttaactagctcagcttttgtgtatattcttaagaataattgtatgaagctttagcttagtttaaattcactatttttgttatgggtttcatggtttgtgtaatttgattgttcacggttcatgtatttcatgtctaaagattggtttttttttatttttaactagctcagcttttgtgtataattcttaagaataattgtatgaagttttagcttagtttaaattctctatttttgttatgggtttcatggtttgtgtatttgattgtgcatggttcctgaattcgtgtctaaagattggttttttttttttttaaactagctcagcttttgtgtataattcttaagaataattgtatgaagctttagcttagtttagattaactatttttgttatgggtttcatggtttgtgtaatttgattgtgcatggttcctgaatttcatgtctaaagattggtttttttcttttctgtgtattattattagataattcaagcccatcctgaaatgagatattatgttggaatggatattgatcccctggcacgcgagaaggctgtagctcgaatcaatgccctcttgcaaagtgattctagcatcccagctgagctgaaaacatatacatttttgaagaattttagatacatcaaatccgtgcttagtgaggttgatgatgagaatctcttggactctggtgttgatggcatattaatggatttgggaatgtcatctatgcaggtttgcttgtgataaaacttccttagtatgtgaaacatgattttcctgatattattttatggtgatgttgtatcgttgtgttcttcaggttaacaatcctgaaagagggttcagcgttcttggtgatggacctcttgacatgcggatggatcctcaggtatgttgctatccatcttttggattttaatgtttcagttaatataacacttttttcttattaagggcctaaatttgattgcttttttttcgacggtgatgttgatttggtaaatattaaacccaagttcttgtagtttgaaaaagaaaattgagatggattggagatgagtaatcaaacaaatatgttgtttttaaaaaagtgggatgaagacatgacaccgtgatgaatgctattatagttcgccttcattttctcccaccgggtgtggattaagagacatatttgtttcactagttcatgtaggagcaaccaagactacccaagaccactttcttagcacactagtattcttgttccctcatttttgtgtaatcctatctatattcgcgtggcgaatggaagtttttggacaaaccatgattcctgtagcctttctcaaccctctgtagaatcattttaagtttttgtttcatttttactgattggagcaggcctatgacaggcaagtctgaaagcagaagatattttaaattcctggccagatgctgaagtggggagaatcttgcgggattatggggaagaaagtaattggtactctcttcagaataaaattgtgaaagctcgatcacgtggtggattgcattctactagtgaactcgtaggtcttattcgaaattcaacttctgggagtagaggtatgtttactcgaatttctcctgcaatcctctcttttttttttcacaattactatgcatattaatgatgatttactaaataagatagttaaaaaaacacactttgaactttttttcaggaggcaggcaaggttggattaagacagcaacgagggtgttccaagctttaaggatagctgtaaacgacgaactgaaaacactagaagattcactctatgcttgttttgattgccttgcgcccggggggagaatagctgtaatatctttccacagtttggaggacagaatagtgaaacagacatttcttgacatcattggcattgataacgtatatggagagatggaaaaggatggtggaaacaccagaattgagattgatgagaaagaagcatggatcaaacaaatgatacacgggtctaaaggaacaattctaacaaagagaccaataacaccttctgaagaggaggaaaaactaaatcgccggagtaggagtgcgaagcttagagttattcaaaaacattgatcatagatggttcagcctctcaacaatgatcttctagatataattgcagttgggtcctttcttttttttagattttttttccgggtatttggggacttgctagttactactcaattcagctgaatatatggcatattcaggcgctcatacaagctttctaaaaggaaaaatggaaacaagaacatgcctctgtggtctttacagtttttatcttattttatacccaatttattttacaattttttatttttactttggaaagtgaatatatattgggcaattcacttataaaagtggttacatttacattttaataaaatataaaatattttgattaataaataaataattaaaaaaaaagtatacaaatttaagaagggtgtgtttttcagttttaactttaaatttctttcatgttggatttaattataaaaagattgaagagagaaaggaaaaaaagtgccaatagacactttttaaactaatcaaaattcaaaagtttactttctcgaaaatactaaaatacttagaaagctcaatcttgaggtgacaacatttataaaagagaaaaaaaacacacatcacaaattgcgactgtgtaaatacaatagagttacatgatcccacaacagaaaaacgtccatatgccccaaatacgaaaaaacatcagttcagcagatgatcttctctttcaatcttcacgagaactctcaacagctttgggatgacaaagactgaaacaaaatattaccttttagaccagagaacctcaaacaatacacttttctttttatatatattatataaataaagtcagaggctacaatttcagacctcaaccaatactttcatgcttacgaattagtcaatcagcaattaatcattttaatcttggaagcctagagaaaagtgaagccagaatactagttagtacactaccaccagatatatgcaacaaataataaaaatctagcaattattaacacaaaagtcacgtacccatactgtgcagttgtaagaaaatagaatcaatctcagcgccttgccatgtcatctttgcgtctttcataatcatgccttcttctttcacttgacctggaatcatcatatcttggtcttttggaatagtcgctctgcctatcccggtcaatgtctttatgtttctgttcttcatcccttctgtagcttcgatttccatggtattcatcgtcattccctcgttcataccttctatatttataatcatcttcatctcttccatgctttctcactctttgctcctcatcactcctcacatgcctctggcctccacgttgttcaaactcttgatctgtcctaccaacatgttgttcatcatccttcttgtaaattctactcctaggctcatcagccacctcatcattaaaacgtttggatccaaccagttctgaggatttcttaacatttttgttcggggactcatcatcacttgaaccacttatttccctcctcttttcatcacctagccctccaccagatctaaagtcatgttctggacttgttcgttgtactcttctactcacatcatcacggtactcaaccttactctcaataacagattttcttcgttggatcttattatcagcatagtcccgagcaccagtaccaaaatcactttcattatcttttgcaagagaatcatcactggtatcactgtcactggaaactaacctcttctcaactgttgtctgccttacaatcttactacctttcctaccatatcttgatcttgaatcaagttccacatcatcactatcatgcctcctacttctgtgtttttgtattttctcatcactacttgcatcagaattatcaaacttgtgatcactcttgccacttctctgacttctctcagttgctccatggggaggttttgttgacttctcataatcagattcagagtccacatcatgccttctgtagtcatttttgtttccatcagccatccatctattgcgatcctcaccatcagaatcgccattgtgtcttttgtacttatcataatgactcctctgctcttcaattcgatcattcttccttttattccgatcctcgccaccaaaagtgtcttcatgccccctgcggctaccatgttgattcgtctcttctttaattctgtcattcttcattttcatttcactgtcagattcactatctacatcatgccttctattgccttttccatttccatcagccctcctattgcgatccttaacatcaaaactgtcttcatgtctcctgtggctagtatgttgattcatctcttctttcactcgatcattcatcgctttcttcccactagcagggtcggactcatcctcagaatcatgtcgtctttctgttcttcttgtatgaacttttccctttatgcttctagctttcgacaaatcttcatcagtactagaatcatcatctgagtcatgcctcttgtgtgacttttcagatttcttagcttgctttctagaattcttcttgcttacatcatcatcactagtagcagaatcagtatcatcgctgtcattccttctgcttttcttgtgcttctgtgcaaccttatacttcttgtcttctttatcacttcctctgccagatcttcgatgcttctttcttactgctttcaagttccttgcactgccatcagtatcaaaggaatcataactagtagcagaatctgaatcatcagtgctactagaaccagaatcatcactagtagcagaatcagaatcatcactatcatgtcttctgtttttcttgagcttttttgcaaccaaacgcttcttatcaaaatcctcatcatcactaccattgctatgtttccgatgcttctttctaactgctcttgaattcctggcactatcatctgtatcagaagattcatccccatgcctcctctttctatattcttccttctttcttgtagattctttagtactctttttcaaaacatctttctcagatttatttttctcttctgtgcgtttcttccacccagaatctctgtccaagaaagaatgctcacgtttctggtgcttaccatcatcatccataccatttttctgactacttccaagtccatcatcaatctcaccttcttcttcttcatcaggttcagcatcacgtatgccaaaagccgctcttaaagtttccatctgcttctcctttctagcagcaatctgatggctctgggtatctgcaactctgctcaagccaaaagaaaataagtaaccaattaatattgcagagccataagtgttaaattaagcacaaattacaaatattataggaatcaactgactgtatatatctttcttgtaatcacataccagataccatgcaaaaacagtaatagtcacttaaaaaaaaagggtaaacttcagttatagtttctttctttacaaatcaaatcactacttatgaaatccaacatctctaaccccattcaagttgcactagaaactgcacattagaacagaacagagtttggtctttcaccgcctataaatacatgcttacaagtatacaaatcttgttttttttttatatggaaaagtacacaaatcgcgaaataattataagataacttgaccaaaaatcaatcaataagtttcaagtaccaactatatatgaaaaagaaaatcttgaataaaaaagtactcacttcttatcaagagaaaatacaccggtgtcttccgaagaggcagccgcctccagagtcgtcctcgcctcggcgagtttctcggcgatctcagcatcggtgtaaccctgatcagtcagtttgtcctcgagcactacgagtttgagctcaatctgacgcttccgatcatgctcgagaatatccttgttggctttccttgagacaccagccattccctgatccccctcgaaacctctggtgttttcggcaaccttgccggtcttaggcctgacgaagaacttgttgctctggatgtagccattggttccagatccccttggggtttgtaaacctattccgttgtacatagctttccagatgccctaattgagtttgagtgtgagagaaacggtggccgagcgccgccgtggaggtacttgagcgaagaattaaggtgggaagggttggaatcgggtgagagtacgatagagggagggtttgagcggctgagactctctctctgatgtctgtaacgggagattttggttggaggctaaacaaaatccaaatatataaaaagaaaatgtttccacatcaaaaaaaaaaaaagttataaaatgtatgaaaattttatggtaaatattattttcgtattttgtaaaagttataactctatgttaaaactggttatattttctgtatttattcatattaaaaattatcttaaattagttattttaaaaagggtaaatactatt

SEQ ID NO: 110880 - DNA, 918 bp, Cannabis sativa
aaaatcacgtaatacgcctatggtagttagggtgttacacaacactcgaatgatggtgcttacaggacgagattgaataactggttcgatgaggacattttaattagtacaagaaaattagagaagccaatccctaaaaagatatggaaaacaatacagaggatgcgattggttctagagcctctcgcaacaacttaaccatcataggtgaactgcaagtcagtggagattctaagaaagcacaagaacgctatgcaaaagaagtcaaggagaagccgttaacaaatgtaaaaaaattaagtgaaaaactagcaaagttttttaagaaagagtgcgatgatatcactttcatggaaagtgatgcaagatgggtacacaaccctcatgtagacgctttggtggtagttgccaatataggaggtgacaacgtccatggcatactcgttgacaatggtagctcaattaacctcttaaatttacaagccttctagcaaatgttacatgagaaagatttgatgtcgatgaatttaagcatctacgggtttactagagatacaatcgaattgaaaggaatgattaaactatgataactttagggacgacacctactactgcaaaatctatggcaaagtttgcagtagttgatcaacatttcacttataacgcattgataggttgtcccattttgaaagaaataaagatagtgactataatctaccatcttacaatgaaattccctacaccagtaggtgtaggattagtgagagaagttcaagaaaattcaaccgaatgctacaatactgcggtgaaaatcaatgaacgtgatatacgtgctcgaagcggtaccaactcgacatgaattgtaaagcccgcttagtttaatttggaaattagcggttaattatgattaattatgaa

SEQ ID NO: 110881 - DNA, 6565 bp, Cannabis sativa
gggggggggggggtaatcatgtgatgtaaaaccaagatttatgacaaatatgaaagaataggcatgggaaacaaaattaggaagctaactctcaaaaatcacaacactaaattccagattttgctctcattttacattccatgacctcatcagattgattatttagctataatttgacattgcaatagtttgttccaaaataaaatgtttaatatgaaccactagactgtagcaaactaagaacttcagttactgattagaacaaagaaaacccccaagtatagcagttcacaaacaattaataaaaataaaatatttccaaactctaaatagtccatataaacaagtaataataaaaagaaaaatcacacatcttattgcaaagtagtctcctttttcttccaagtaactatatttttctaagataatttactattattataccatgacacctaagatagttatattgtattgacttttaatatacaatgaaacatatgtaatataaaatatagaaaaaattatattaagattttattgtagtataaatgttaagtgtaaatacagaaggaacatgaaaatattttcattagtggggaaggacaggacctatttgccattttggagtgtgtgcaaataaaaacaaatgacccgacgtgacacccaaagacagagttccttattttcataatggtggcctatccatatcatagcttacttcaaatttacacactttcatttttacttttatcttatttttgtaaaaaaaaataataatttatgaaagggaatgaaatcaataaattacaaatgatataaatataacatattaatatggggttgggaaagaaaaaaggaaagtaatgcataaacaaaacaaatacctataggaaagatgaagtaatgaggaagcaaatgatgtaggggtcattgattacatgggccattaatacaatacaatatgggattggggaactgcggcccattttaattaatatttattaactgtacccaattatcactccctcttaatattactattttatttacaagaaaaacacaatttgttttatcttgttatttctatacttggtattttgttttccttttttgcaacagctactatttttggtattatatttatacgcaaatatacaagtaacaactacaaagtaataaaataaaaaaaaaatgagctgccttgatgactaacaggtagatctaaccacgtgaagttttcatgtgaaactctgaacacatcaaatttgtgggcccaatccaagtaattattctgtttaaatctccacgtacatatcaactataagtttataacacaacaatagcaacacctttacatactcatgcctcctatactttactttctcaaatcatactagtgaaaaatagatttatcacatattgctaaaaagtattaaagtaataataatattacaattttacaccaatagacccattgaatattgatattaaaatttgcaaaaataaagatgacaatttgaggggtgcccactaccaagttaggcacccgtttcttcttttagcttgtaaaaagcatctctttcttacagagagaagacagctagcaatttttatttttaatttgaggaccattaacaataatgcacaaagacaaaacaaaacaaaatataatataaatagtgctttattcaagctgaataataattaacataggatcaactttgattttatattgatgtgatatagagattgtcaggacctttattttactatctgcctaaactttttttcaatatcaaaccacttttttttaatctctctctcttttattaaagttaaaaagaaaatagggaaatatttttaaaagaaaagaataaaaaaaaaacttgataaaaagttggtatccaggaccaaactaagaaagaaatgcgtgcttagtgagcaggaaaatattttatatagtcaatgatctatttataatttactaaaatctacctatgaccatgtacacatatttgaccaaataaaaaatatatattttataatttatttcattcttcaacaacaacaaaaaaaaaaatgatttgatcagtatgaaattttgatcaatatattttaatttttttcaaaagtaaaagcaaaagaatggtggttggtgttcttttcatcgtattttaattaagaacccagacaaagttgtttacagacttatggcatctaatgaaattagctagaatatttagtgaactaaatagaaataaaaacataaacaaagactatatagcaaagaaagaaataggttctaaccttttctttatatatataattgatcatatctatgcaaacatgattcttcaaattccattaaacaaaaaccattttgaagatcagaacccgattctagtatctaacacaccaaaatttgatatggaaatggttgattcagaatctgagactccaaaaaacatcatttaaccagagacatcgaaaataacatataaaagatcaatatccatacatacatatatacataaatatataatatttatgattgatagatagagatgattaatcatatcagcaaatacatagtaacagaaacactggaatccgagttttctgattcaggaaaaacacaaaacagaaacagaaaacagtttctgataaacagagctgcaaaaagctaaaaccggatttactatttagaagtcacacactaaaaaaagaaaaaagaaaatatgaaacaataaatcataagagatgatgaggttggtgaactgagcttacctgcgttaccagagcttggatgattctggagctttttccaaaaggcgttttctgaatatttgttttagaaaaatgggaaaacggaaagaatgggcgagggtgatcaatgttatgaaggtagcaaattttggaagagagagagagagagagattcttatagaaggagaggaaatgagtccccactttagtgccatgtagggtcacatatgtggcctgtggggcctaatagccagcaccagttgaaacaatggctggtttggtcgccgaggtattgcccctagatttgggtttaattacggaaataacatccataataggaaactcattttatggtgtgctagtatatttggatgtagattcataacctcaaagaaagtgagatctactcttaataaaaacagatatgccttagatttatttatttaagataaattatctgccacttttaattctgatgtcttattttaatgttttaaaatctacttggacacttttttttttctttttaatggtaagattaaaatttctataagaacaagaataaattctaaattactgaattttaacaagttactaacagtaaatgtgttaacctaatagaagattttttttttctccttgaaaatgcagtagattactaataatttagatttgaccttcattattatgatgatagtggaaaaatactgtggtgcataacaattaaatgagtaagaaaagtaaaaataaatgagtagattttgttaactattagacaatatagcataaatatgttgagcttcatgccaaaatgcacacctactaaaaaattatgaatataatgatgtcattatcatttcagtgatttatttatttaggttgaatctaagagcaatgaatatagagagaaaaaaataataagaagaatattagtgttaccaaactaccctaaatggttgtagtttagggggagtcccatgtggaaattccaaaatgtattaatgtttaaaaatagttttattttggttgaaaagaaacatccaagaatgttatatcatatatttgagacaaaaagaaggtgtaattggtcattgaataaaagaaagaaaaaaaagtattgggatggctttttggtaacaaagtggcggccataatcgaccgaccaaaccgccctttcttcgagtgcaatgggagcatgacgaagcggactctgtctttcttcggcggattaagacattatatattctctctcttctctctttctctatttctatttacaaaaattaatatcatttttatggaaatttaagtttggcccacacatgtttctatattttatttaaactcttcttatttatccaatccctttatcactttggaagctctcgaactaccctattcctaatcactagtcactattcacaatttaatgcttcaacaaatttttataaccaattttgtcttttggctagtacaaatgatttttttttttcttttttcactttttttataataaaaaaagtttcttttttcccttgtttagaacattcattattggttaagaatgataaattcctattcaaacttgcacaaatctcacaaaataaataattcaagaaggtctaaccaaactaattacaatattagaaagactaaattgcgaggtaatctttaatagtgtcacctcactaacaattaatttttaaaatttattgtttgatgataaaattttttaaatccaagtttcgttagtatttaattatttttatctattttgacagtaaactgtaagttgaatgtctacatgtacatagagtattatccacatagatacaatgtacacatgatattattttattggcacacgtgaataaatatttaaaaataaaattatttatcgagatttttagaaacagaatataattatgttaaaattaaacagatagatcaaaaacaaagaacaagaaaagagattttacgtggtcaaagattaacgacctcttattcacgagtcaatattattatagctggaaaagtctttgagtattgcacaaatatttgtcgagtttacaaaccttagaatttgccttagcttgcaagaattcagattttaaccttttgcataaatgaattttcttatatttatagacttagagctcttgtatgtaaacattgcccactaatgaggtaaatacaaataatttattaatttcgagttcatccggtgaagctcggcccgtgaggtattaattttctactaacatggatgccatgtcatgttgatagttgtcaaaacatgtcctacttttgtagataataaagataatgcttgattggcaattatcttatttccatattgagaatattagactctcagacaagatcttagaaataatgtcttgatattgtgggagataataataaatgagtgggatactatgctcaacatatagatgctcattaattactcttcttggagcattgcttaatgctattcggagatgtgcttagatggatacttgtttgcatgaaccaatcatctgtccatcatctggatggtttgactccattaatggatttggtctattaccttaaatgggcctgcgtttgggcctgtattagctgaattaaataatcttggaatcacacgtgtccttccagaaacacgaataatatttagccccaagctttcagaactctgggattttgaaggcttgtatttttccttccaaatggcatgaggacatgtggatgcttaaaaggtgaagacctttttcaattctaagtgaacacgttgtggttgacaacttcttactttttgaaatggagtgacatgtgccattattttgttggctagtgaagattacgttattgaaggagcgcgcacatcgtggatttgcaaaactgtcgctgatcatgttagcgagtgtcccaagaagaatatcatcattcgaatatctcagttccaagcgatgcattaaatgaaaagctcgcagtttttctagaccatcatatatattttctattttcttggatgcaatttgagccattaacttaggggcacgcaaattgccattttggtcctataaataatgtggaaatcatctatttaccattttttcccatttttcattttgaatttgaattttttgagagagaaaaagtgaaaatttcttttggtgaatgaaccattactttgacgagtgtattcaccttcttctttgaattcgtgcacgagaaaacttcggagcaccacctatagttctcaccattgattctttgacgcagttggaaccattagatctttaggcagagatcaaagccctcataaataaaacttggtccatttgaactagggttgtgcatcttgatcaacctctcacaataagaatttatgaatgactgacacacgacgttcgaatccatcacataagtattttacctctttgatgcttgcttgtctttcataaaaggtagaggaataggatttaaacctttggggaagttctgaacattttttcaaaataaggacacttatatatatatattgtttgtagtcattgttaggttatgtaaattctgtctccattagtaaatttctggttgtgtagcaaacttcaacataatgcactcaagtattgctgaatgtaattcttccatctgagatctttgttgcctataaataggtaatgtggcttaagggaaaagatgatgatacatctcattccttcagtaaaattttgagcctcctttcctatagcatagctgaaaccctattcctctctttctctcttcatat

SEQ ID NO: 110882 - DNA, 2203 bp, Cannabis sativa
ctctctctctctctctctaccttgctcacgcatcattctctcttgagggtgattgtgttttttccaatcttattcatagtgtctcatgagttgagtaaacaatgttatcagaaagttatatattcatctaaattgaatctaatagcccactctattcctgaagtattgaggctgacttagaagatcctggtgtgaactcttcaacaagtctcactggattggatggttagttcattaatacgaaaagacaacgaggaaatcctgataggaaacaagaggtaaaatctctaaactaatagttagatttgtgttatgtataattgagatctaaggtttatggttcatattagattcaacaaagttttattattaagtcctattttttactcttccgccgggactctgatatgaacgctaaaaactaacaatgaaaagtagtgtatttatagtgatgtaaattttacaccatagtgaatgttttgccaaatttagcataacatttgtcatataacaaatttgcatcaccttttggcataccattggagtagatttttattaaatgagctatgttttaaccttgtatcactaattttcttctccattagagatgctcttcaggtgaaaaatttaatcccttttgataaaacgatacttttttttctcagtaaaaaaaattaattattattagagaagattttctgatcatataattaagctagcttagctaaatataatattatcttaaattttaacttaaattgaaatttgtatatttatatgtacatagaagttaatatcgaatatttatttcactatataaaaatacaatatattcaatataatggtattacatctattacgacatgtttactaataagaaatgtgaatcaatggtaaggtaatcatttatattagttcattttatttattaaatttaagaaatagagaacttgattaaataagggagaaaagaaagacagaactttacccaccaattttttaaagaatgtcattaagggtaatgatttttatttattttattttatttttaatattaaatttctattgagaattttatccattaaaatacgtcttacaaaataaataccatatattaattttaacttaaaaggataatttagtcaatttaagcatttctattatgttttctgataaagtaaacaagataaatcattaacgttccatttattccaaacaattttagtaaaaataatatattaattatgaatttaattattcttcatttatttagttaaatttttctattaatttattccgattatgaatattgtatagtaaacgtaaaattaagtattaagtctcatgattgaatataataatttttgtggatattgccagttacaatcaaaaattttttattttgtgggaatttatttattataaaaatatatttatacttttataagaattatttaaatttgaaggagcttttctattattttgatttacaattattaaattaagaaatttatatttaattttttaacagataatatttttgttaaagaactcccacattaattttaatgttccatcgctatgaaggcaacatttcctagtaatactaatacttcaacacaatactcttttatataaaaaaaaactaaaaaagaacttattaaaaaataaaaataaaatgaaaaaaatatatattttttttaaaaggacaaatactttgataatatattttgttcttggagaaataataagtgctaaaaaaaagttttttttttttttttgaaaaactaaaaaaaaagttaacgacaactcattcgtattaactttccaaacactcgtaattgtgaaataacaattttatatgcgaggggttggtttggttctaatatttgggccttttttcacgttatattgaaagtacgtaaatccaaatgaaaaccttgttggtattcaaccaattatatgcaaagctacaattatagactgtcagaaagtagtgtaagagtgtcagcacatacgaacgaatagcatttataatcggaggagaaagatatgcacttaaaatctacacattttttatttttatttgagatatttaggatgaaaatatttaaattatatatctattctatataaaatgtgcctatataactgaatttttagtttatgagaaattcatgggtgactttttatttatatttaa

SEQ ID NO: 110883 - DNA, 6064 bp, Cannabis sativa
tgtccagttaaactattacgagttttttttttttttctcgccaattagttcgaacctgcaacatacatgtgaaatttaactcaaacaccactaagctacaaaaaattaagagcgaaattaaaataagtattctggctttcacccaaatcaggagcaggcttcgaccttaatacttctctaccattatttcgttatgttattcattacaatgccatccaataaaatattatatgtttttccgaatccttgtaactagctcataccctatttcctacaataaaattacccttttctggaaaaggaaaaataaaatctaccaaatatatttcaaacctttacggggaggaaactgggttcagttaccagcacagtagtgcaaatatggcctttataatctccagaggttgatgtttaccattcgaagcctgagactgaggacgaacaaagtctactatgtttgtttcaagaatgctacagaataatagaagttagaaagttagaactgtcaccagacgtccctaagatatcgcccatccatctgtagtttcttcactagagactcggcctttgatgagtccacacattcctgaaatcataacaaaaagtttttgatatcattctttctcacaatggtagatttacagcgatactgggtaaaaaattaaaaattatcaactaaaatgctcaaaattaaatactagccaaaagttatcattttcggacaaataccagcctaaaagtaacttcgtttctaatttagtcatttaatgacactcaatgctcttaagtaacagattatttaacagtaaataatcgttggtaattgtcattaaatgcatgacgatgtgaacactacatcaatcgtcatggagatatttagattagccccatgaatgaataagaataagaacattgcagcatatgctatcgtaaagcaatgtctgtcattattgttagtcgcggatcaccggatcactgatatataagaattgtacatcgatgatgaaaaggttctagctattacttacgggtaattattatatgaatatttgtcttatacattggatatatatgtgtattatactattatataagtgatgaaagagtgactatttatacagtgacttacaatgatgtgcaccaaaacattacacacaatgacataacagtttggttcaactaatcatatttggttcgtatgaaacccactattttaagcagtgtcactgtaatttttagtccacaattttaatgcacatattattcttgatgaaatatggcagagacagaattatcacctgttcttgtaccatggtatgcaaagttcgatgaacatctctagccatgcctttggcgtcaccacatacatagaggtatcccccttgcgaaatcaagctccaaacttgagatgcctgatcatgaagcttaattaaatgcatgttaaaattgtgtgaacctcgtgaacagtagccactgtttttcagatgctaatacttactttatcaatgatcttatgttgtacatactccttttgtggcccttctcgtgagaatgcaacaatcaactctgacattgcaccttgttctacaaaattgttcaactcatcctcgtagataaaatcctacaaaagcaaagacaaattggaaaacaaaaggcgtacgagtacgatgctttcaaaagatataaacaacccaagaaccagagttactaccattctacgatttctacatccaaaaaatagaagtgcaggaccaagttgagcaccttcccctttaagagccagcctttcctgaagaatgataagaagaatactgaaactactctcttcctcgtatatgtgtacaaagaaaatataaggaattgaagtaatttcaaacctgcagaaatcctctgaatggtgctaaaccagttccaggtcccaccatgataatcgggattgaaggatcgtcaggtaacttgaaattagattgcctaataaaaataggagcccagctacatttttgactcttctcgagaggcactgcattctgagttaatccaaagaatgatgggtttagatgcctaaattgtctaatatgagatcctaccatgttttttgcattctacaaagcaaaactttttttaaggacaaacagattattttgacaccataactaaaaaactgttttatgaacaaaaatacaggtgtttggcattgtttttagaaaataatttttaaaaataaagttacaaaaaacagaaaattttgagaacaagaagttattttctaaagttttcatcattttcccttcaaattacttcatctcattgtttataacggacccttaatatttatttttctataaatatattaattaattttttgttgaattgttttaatataaaaaaaataaaaatctattttgtgttctcatttttttaaaacacaattttgaaaacaaaagcaatgccaaataggctcttagtatttagtggttcacaaaatgaaaaaaaaaagtgcagtatgttcaaagttcagcagtaccttcatccaggatgagcacactcctttgtgaattctgccagtgggacttggaccataaaccaaagcacatgtaacatggacacgatgaggggaaaacctgcatcacaaaggcgattaatttttagacgtttacatttcttgaaaaattattttggaatgcaaaggaagcaaagttgtcaccgtggtgaagaagaaattgagtagtaacgaggttgtaagcgaggggcaactgcagcaaaaaatacaccaagtggaggctttgctgatgggaattcagccattacctcaagaagagttctctgacttccaacaacccattttgagtactcgtcctggacattagaagcaagagccgatataaacaagacaagtaaaaggaaaaacagttcagaggaaacaagaagaaaatctgagacagggctgcatgtacaaccttcccctgaggtgacgatagaaacttcagcttttctgcttcacttggttcagttgcgtgtgaagccaaagcaattaaggccgcctgttggagaaagtaataatgaagtgataaatattctttaaagataataatcataacagaaaggaaccacataaaaggaaactgcttaaacatacttttcgtggtggggttaacaaatcagcatatcgagccagtgcactgcgaagtgtgcaaggtccaggaaatggaggaggtaaagagctttcaaggggagaaccatcctcattgtctgtgtggacagagaacagcaaatctagaggttgacctagcaagtttccagcttcttcacctatttcatcaaggttctctgcataaacacccacatggtctccagtttcatacctgaggacatggaagggagttaatcatcatctaatcacaaaataactaatacagaataagaaaaacttatagcaatttgatttactttttacgggatgtaagttaaaattgttttgtattcacaacaaagctcaaataaaaccttcacttctagaactatcttttacaaagtccaagctaaatgacaagccattcaatatggcaaaataaagactaacatattagtcgataagacattataatgaattagatttttccaattacattaactcctttcacatttctccccgtatgtgagcagcagttacatagtgcataaatggaacagggaaatgtccaaaaatacaaagctcaactcaagtaaaaccttcacttctagagctatcttttacaatgtccaagctaaatgacaagccattcaatatggcaaaataaagacttaacatattagtcgataagacattataatgaattacgttttgccaattacattaaactcctttcacatttctccccatatatgtgagtggtagtagttacatagtgcgtaaatggaaaagggaaatgtccgaatggaagaagtaacgtagcatttaaattgatgcatgaagagatattaaaattgaattatgcaaatcagcaaaacttaaagattgctgaccatcggctaaagaagtattcaaacaaacaccctttatacaaaatacttcttctataacgtaaaagggggcttgtataaatgcacttactgtattaaaaatgcaatagacccttttgaagtaacctgatatgttgacattaaaggtattttggtacattgttctaggtggttagcggtgtatgggtatatataaagtgggagggacagtaagttcattgaatacctgccattatggggagttagcagtatatcgaataccggccattttcttactgtatattcttgccatttctttaataaaactcgatgaggtttcatcatcttctttatctttcttgctggtttgttcttatattttctgtataagtttagtgatttctattaatatcttttaacagaagcattgaatatagatatgaacttacgttataccagttccaaatatatcaaactccagatgtatgcaggatctatcagactcaggcttgtgaagctccttttgtgaagcaacattaactctgcagaaaaaaatattgcgcttgaaacttagtgatggaaatattcatacaataaaaaggtaatatactagtaataaagaaaatatgtttgaaagaaccaaaaaagttcacgtcactccttacatgcacggatgatgaatgtcaaaagtagcattcccatttgccgtattcaagtagttatcctcaaaagaggtaacattaggatcatgaatcacaaccctgtattcaggaactgtagctgtatatggtgtagatacagtagctgtatcatcttcgtctcgaagtaatagatccaattcaggccacaacgattctttcctacataatagcgaacattcaaatcatgatgccaaaactcaatcttcctagctagtacatctaaggaaaaacagaagaagctatcatcataggaataacgcacataccaagcagaaaaatcatcctcaatacattgatcatcatcaccaaggccggcaggaatgagacgctttgctcctgcataaaaccagatagcaatttttgataaatattaaatactagcaaattcagttgttactaagaaaataaataactatgaacaactcagcttataatcatatacagttgatgacaataaacaaactaagagatgccaaaaaggttcactataaagttgtcaatgtcattccatcaacttcagtgcaacagaaagtatgtcagaggaaagcttggacatgctgatatgcataccacacagaatttagtaaatgcttattattcattgtcttatccttcagacataaatatactaacttgatacgaaagtgacaattgctattataaacacaacaaatcaaaacgaagacttaccaacctaatcccattattcagttaaaatatggttccttaactaatttagataacttgtaaaacagtaagcacaaatttttaattaataagattttaaacttgcagcataatttatgggcaacatttagggaatcagcaataatgcaaaaaatagacgtgtaccaaactagacataaagctaaaaaaaaatcaaatgttcgatagatttcgacaaacttataaaattggccaacaggtgaagaaatccaatatagaaaactttcatcaatgaaaactgaaaaaatttaacaacataatatataattcacctaaaaaattattttaaaaaaaaaattaccttgttcactgagtttttcatcaatcacaatcccaatctgttgcaaaatgggtcccataagatcacaatttcttattcttttctttttagaaaagagaaaagcaatatcaaattatattgacatattttaccttattgaaatgttcatattgccgattacccaaaccaaaaacaccatatctgagatgttgaagccaagcacccctgtctgttccctagacaagaaagcaaaatataaaaatatagcttagaatgcaaaagcaaccctgcctttttcctgaactgaaatatatcaaacacatacgcacaccacacccagagagagagagagagagag

SEQ ID NO: 110884 - DNA, 4220 bp, Cannabis sativa
  modified_base (3715)..(3741): a, c, t, g, unknown or other
atatgtatatttgtttgttgtaggcattgtcaatccaattccaaagttatgttaataaaatgacaatggctttaggagtggacccaaatgtgattcctgatcctcaccaactacttgatgatatggaagaatctctcaaactcattaaggaagctcttcttaatcaaggcctactaccaccactccaacatccttagctacctattttttttatacaaattataaataatttatcattctaaaaatagtcatttgtaattctatgcagacaaaaagtacaactcatattcaaaaaaaatgtttgaagtttcaaccctatttttagtaattttttatttaaaaaaaaaaatccctattaagaaaattgtacatcatcattaattcttcgaatgttagaagaaaaacatcatcctcaacttagctaaacttttttttgcttgtcatgttattatcttattaccatattaccacattgctactaaattttaaccttgtggtgaaattttaaaaatttaataaatactatatgtgtgattgaaatttatatatataaaataaaaaataaaaaacaaaacttattattatcttttagaagtaattagcggtgaaattttctttaattttaatttttatacacttaattttttattttattttttagtagcaaaacttttttatatttacttttttttacaaatttgagacatcaattaaatattattgttaaatatcaattagacgatgtacatctttgtatgcctaaaaataaaattttaaaacaaacatgataatctaattagtatttaatggtaatatccaactaatactttaaatttgcaaaaaaaaagtaaacataaaagagttttattgcaaaaaaaaaaaaataaggaattaagtgtataattacttaagttggtagaaatactaattaacatcaacgataattactcaagttaaatttagtaacaagttactcaagttaaatttgttgtagtgaaaaatatagtttcagaagctgttggaataaatggtgtcccctcttttggttctcattttaagcctgcatatttgttatagtcaactttctgggcttaatcctctttcgcaaagctatgcatacaatcaactaagcaatcgaaaaagaacttacaggtagaaaaaaaataaaaaaagaataactcaatgaaacaaacccaaatgctccttaaatcccatatggtgaactcaatttgactctgaaaaacacaccaaatattctaataatcaaacctaaaaagggactcagcacccaaagttgaagttcacataaatgcaggtaagtgtcaatggctacaaggctataactcactgccttgacctagattcagcacgcctggcttcatccggtgttgatggaaacagctctacatatcttgacccgatagtcattttgtccttccccattgctcgtttagcctcctcaacagagacaaactccacatatgcttcgccagtagcttttccatcgggtctgcaagcaatatgaatctgattttcgacaactttaaattctgcgaagaagtcagctatgtctgatttcgaggcggaaaaagggaggccacgcatcttcaatatctcggtgtattccatctggtctttatcaataaaccttttgggtcttgatggaggaggacttccatgatagtcattatcatatattccttcgtaatttatctcggctgcaatggcattataataatcttgcctcttgcacctgaaaacctccacatatctacggcccatgttctgtcggtctcttcgcagagcgaaattaacctgtaccgcaccagcaaagacgacaaaggcctcacctgaaaaccgtccattcttgttgaccaacaacacgtcaacaatatccaatccagcaaaaaacttgaatatgtcaatatctgtgcagttgaaagggagccctctcaatcgaacaacaggaaacggaggaggctgaaatacacccccgtagccataaggttgaaagccaattccgccactgctcactgcgaagtacggatttgattccatcattctttgtctctttgagccgacctcgtacccgtccgaaaccccccctcttcccaacattgcccttatacccagaaaaaagagaaaaaaatcccccactcaagttgttaataaaccaaacccagcccacgttttcttgatacctaaattctctaaatcttttatactgaaatgttttatcatatttaccatctcccatataaaccaacccaaatgcatttaaaaacataaagaaaaatgtatcacataaaaaaagtaaatccctttctaccaaataaagtctcaaaaactgttgctactgaacaaaacctacagaaaccagattaggcaaaagaaaaactagagcaagaaaaaggtcacaaaacataagatccattcttatgttgactaaattattatcaagttcaaaaatagcagcaaaaacaatgattgctctttaaaaaaaaacagaagaaaggtttgaacttcaaccaatatcctccactcaagactatatcaattacactctaatgtgtcaagcatagtttcccatgaactaacaccaactcaaattagcaatcatataggtaagaaaatcctttttcaaaaacaaagcaataaaattattattcttcaatttcagaacaggtaatagaaaatataggtttgctaaacttaggttatcttccaaatccgattaagaaatcaagttcacacagcccaaaagagaacaaagaaaaagaaaaccacaaaattttataaataaattttaatttttaacagtaaagcctgttatcaatattctaaacctaaaatcaactcaaaacatcgaaaatccaaaataaacctaatcagatagaagttcacctgttcgtcgggtttattgaatcaatcgggaatggctctgaaatttgatttgcggcggtgattgactgacataagatttgaattggaaaacaagaaaacaaagaagaaaaaaaatataaatttaaaatttaaaaatcggaataaaattgaagaaaaactcaccagttcaagcgaagtcttttggggaaaagaaaaaagagaatagattagattagattagatgatgggaaaattgaaaaggagagacgtagatgaatctgtctagggttagggttctgaatttgggagaagaaaggcgactgagctgagctctccagaaaattactaatttcttctaaaaataaatgaataagggaattttatttatttaaatggaatttatttattgaagaaaatgatttttttttcttttttgagtaattgaatagttttttcaactttaattaaaaaaaaataactaatagtatactatcattaaattatattaaaaactcaaaaataatagtaatactatctatttttttattattgacaattttttttgagcaggcaaaaatatattttgtattgtaaaaatatgatcaaaaaaaaaaaaatattgatttgcaaaattttaaatattttaacatatttgatttttgagaattacttcctatactatttttttttttaattttttattataaatttacgatttgaatttctaaagtgattttttcggtagtttctatgtgggttggtatacgatttttgattgttatttaaattgctccgctaattgcaattggagtttctatgtaaaatttcgtannnnnnnnnnnnnnnnnnnnnnnnnnntttgaagtgtaaaaataaaaaattgacgaaaatataaactgttttttgggatgatttcataaatacataaaaacaatcaaaaattacaaaaatataattctgcaaaattttaaatatttttacgattttcaaaattttataaaccgaaaatgcagtcttttgatgtattttaatgttatactcttgttattttgtacaaaccataaacataaaatttttataaaaatctcaattttttatcaataaaattaaaaaccataaacataaaacttcgggtgattctacaatgcacccccttaaaagagatgtaccgatacattcatgacttgtttcggtatccagaagaattttttagtctaattttttttcatattcatgtacgttatagctatataagataacctacaaaatgttgtgaaattcatactaatttacaatatagaaaaataatgttcaaacaatctattttacacgcgtat

SEQ ID NO: 110885 - DNA, 12589 bp, Cannabis sativa
tcgagagagagagtctggaaaagttgagaaaagtcgagaatcccaaaaatagagttaatattcttacaaatttaaagtttttttttaacaaaaatatggacttattttttactttgttttcgcaacaacatcatattcatactatattatttttatatttgtactatattatttttatgttgtttgtatgatgtttcataaaaatatagttaaaatataaatttataaaaaagaaatcataatttgtaaaaataaaaaatgaaaaatagataaaaataatataattttaagtaatttgtataaaaatatcaataataattaattctatgtgctccattaaactatttatggaaagtattttctattctactagtctatatgtttaataaataaaaattaatatcacatatgcatttatatgcaatcttttatacaaattatgaacttctgctcattaaaatttcttttatatatatttttcccgtgaaaatactttatattgtagcatttaattaaatcattaaatttgtttttgagtaaaatacgaaagattgctaaaacttgcattttattatccaaattgctttttatagttcatattagatttatttatttttattaaatcctattttatttacttcaattgcgattttgatatgaaccctaataaccaacaaatgatatcggagccatatactagtatccatgttttattcttcaataatgatctcatctcttcattcatggcctacaaccgtttcttgaaatcaattcttgttagtgcttcttcataagattcgggttctgctttgtccaagccagcaacgtatgttaaaacatatgttattatctcttcccaagcactgtagttgaacttctggtttggctttggagatctcttggccctatctcttgtgagttgataatctgcaaggtcttcgaggttctggtttgtcttcattaggtttcacttgaccagtgtcatcatttgtcacttcaatttttgcttcgtcttgttctttctgagtttgctccacctaaactgattccacttgaactaggtcaggtccttgtggttctgaaccatgatctagtctggtttgaaaattcgttgtgttacctacatggttaatttcagaattgaaacctgcactagaattggagttagtaacacaaggaaatatatcttctttaaatcccatttatactaagcatagttttcaaaccaggttttctcccttacccacaacctgtagcctttggttctcttagggtatcctaggaacacacacttcaatgttataggctctagctttcccacactttggtgtgcatatattgcacacccaaacacccttaagttagacagatctaagggcttaccagactagactttttctgacattttaaggttaatggcactacatgagaatttgttgactaggtatgctgctgttaacactacttcttcccaaaattattttggcagtctagcttgcattaagaggcctctgactttgtccgtcaatgttctgttcattctttctacatctctattttgttggggtgtcaacctaacagttctgtgtctataatttacacctttgcacaatacatgctaaactcatcattataaaaatccaagctattgtcagttctcagattcttaagtctcaaattagttaaattttccatgaggattttccattcaaaaaatttattgaaagcatcatttttcaatttgggtaaataaacccatactttccatgaatgatcatctactagagatagaaaataggcactcccatcatgtgtaggagttttctcaggaccccataaatatgagggtatatactcaaggatcttttttgtcttgtgagttccagttttgaacttaagcctatgatgcttcccaaggacacaatattcatagaagtcaaccttactaaccttatctttgcatagcaagttttggtcactcatgatttgcaatcatttctcagtgatatagcctaatctcatgtgtcgtggtattgccttttgatcctctggtgagtgtactgttgtgttgtggcattttgaaactagttctccttgcaagtagtacagacatttatgttttatacctttaataatggtgatggaacatttgctcaacttcatagttcctgtttcaatcttgctcacaatacctaagtcatcaagtacactaatagagatcaaaattctagcaagattaggtacatacttgacccctgtcaaagaccttacaaccccatcaaatatcttaaaacttatagcatctgatccttcaatttggcatgattgattgcttcccaagacaaatttttcacctttggattccctgaaatcagacaacaagtgtttattgttggtcatataaaatgtacatcctaaatataaaatccaatcatccgtaaaattagttgcaacaagatagacttctccactatcatatccatcacaattttttgcatattgttgatatgatctgaatctgttatcttctttctggttgcttgagtcttgactggatcccttgtaattgctacttttcttccagaagtaacaatcccttctcatttgtccaagttttccacaatggtaacaattatttggatccttagggtcctttgccggagatcttcctcttccattatcagatcctttacttggttctttactctggcttctaattctgtaaggctttttgtatttgttctttcctttattgtaattcaattcagcatttgaggagcttattctttcattcttcattttaagatccttagatttgagaggtgaaatcacctcttctagggtgattgatgttctaccatatttgatagcagtcttgacttccttgcaagattttggaaaggaactcaagataataatggcctaattttcatcactcaaggcttcattttctcctaagttttcaagtttaacatgcatcctcaagaactcatcaagattctaatctaggaatttatagtgactcatcttgaactcaatatcctttccttcaaatagatcttattggtgagtgatttctattgaaattgatcttctaatttcttccatattttagctggtgtttcttccttatctaccaatcgaataattgaatctgaaaggttgaagataatgattctgtggctatatctaagagttcttctttcaaaatcttggtaagatcttgtggccactcgattggatcttcaagcactctcaatagcttctgttgtgcaagaagagatctaatgtttcttctccattccatcaaacctatcaacatcaatctttatattactcatgttaacaaaatcaaaataagtcagagttttaagttgagagtattctattggatcattcaaatgaacatccattaaatcttcaatgtcatgaacttcctgctgaggatcaattttcttcagcctttgcttgattcttgatcactttctttagttgaatctttaaccaatatttggttgataccactgttgggatttatagactcaatccctacaccaactcaacatacacattagatcatcaaggtccaaaccaaccatagtattcaatcaaacaattcacaatcatgacataacaaattgtatacatttcacattcaaattataatcattgaacacaaactgaattaaacaatcttggaggattcaatttgcacacaaaaccagtaggattaggaattcaaacataagtaattatagaaaacataaagaaagataatgtaagaaagaagaagagaacaaacaaaagattttcccaaggttcacctaaataataggattacatccccgttgagctcgcgatagaactagttttccctcgtactataatcaatctcaaattacaacaatgttgtggaaattccaagtcacacactgacttgtaatttcaatatcacgctctttctctctcaatctttcttttacaaagtatttttcctcttaactctcttatgtttctctcatttgagaatccttatctctctagctctcttcgagctcaatcttgctcaggctgtgatctcttaatctgaaaggagagactttgctatatatagcagtcttggtagttgaggggtctgttatgtttgttataatagttttaagttgcctccagatgcaactaactgtaagtgagatgagtctagttatgttcacgtgtactgtaatcttgtaagggaatttaattccattaaccatgtcacagagacaagactaatcgcaatataaaaaaatgaatcacaatagcaaaacacaatcccgactaagctgcacttatacccagggaacaccgacgggccagaccgaagaaaaaagataacctcctgtagctataaatttaagaacatactcttatcatatataattaatattaactacaaaataaattattttctttcttaactatacgtaatattttctcgatatggattggagtaagttagataaagtggaaaaaatactaattatagataaaatatggaaatgtcattttatattataagataattatatataaattattattatttttttaataaaatagtttgtatcgaagatataatattgtttaatgataggatattgacagttaaaatacttaagattttacaattcaagcgcttaattatacctttttacgataacaattatgattcaaatacttttaatttttctttcttgtgggaaatttcaattattgtgtaaaatcaaactaacttaaaatgaatcaccacacaattagtgatgacaaaaataaaccaaacacaatttaagaattgaaagaataacaaagcagaacagagacgataaaactagaaataaatcgtgaaaataacactaagaattaaactagttcaagtctgatagatcaatgtgatctatagctctaatccagttctagagctccaccgaaacttcctttattgattgggcaagaacacaggtacaaatagttgagaacgataatctgtttggattctctcaaagtgttttctctctaacactcttcatgagaagtttcttcatctacaaaagctttccttttacaaaacccaatcctctcttttctctgtacctctctattaaaactctgtctcaaagaacttgcgtactctacttctggtgtttcctcattgttatctcaaatgaagaggatggttgtatttatagatcgaggatatgaattctaaaggtggtgtcatcaaacaactaagaagttaattcggttaagacttatctgtctccttacaatgagatctccaagtcagctctgggcatcaagctctctccggacatgtatcacgcttcctagacggacatcccaaactgttgaagcgcattctggaaggacgttccagatactatctgaaaccctttcctggaaggaatagctagccttctgaaacttcttttcagaggacgactagctttcctaaaccacatcctagagaaactacaagatccacgagacttctttccagatggataagttagccttccaaaactcctttccggccgactagctttccacaagactgctttcgaaactccttttcgaacgacgtataactttcttgaagactcgacttgagacattttcatttggaggaactatactacatttctcatagtaaaaatactaaagttgcaacaattcaagctcttagttggataaagaacaaaggatagctgactgtacttcttgaaacaaattgtttaatggtagttgaagtcattcctagtcatttaatgctaaccatttcttttattgtagttgctaatgatagtagacaattgattatctgtatgagcgaagtatctttagtgtttgtttatcgttttgctaacagtgtagctcattgctagagcttcttgttcttttctcgatttaatttttagcgggagtactgttctcgctaagtttatctctatattgttaaatgatttatcttcttaatgaatttcttttccttttaaaaaaatacctaatccatttcttttacaataaaaaaaatacttggtagcaacaatttgacaacttgttactttatgtatttttgagatttagatacacgcacttgtataacaaaaaacgaaattcaaacaatctatctcgcatgcttataaaataaaatatcctctcagtgtaacaaatctttttcacaatattttcaactcaataatttcaaatatttataatatacaccaatatatatatataggaagaatcatcaattacacttattttgaaaaggtgcatatagtaaaatttgagggtaattttcatatcattattatttgtatatttattatatatatataataggaataaagattagaggagcttgtttgcgtgttcaccaaatattaaaaaaaagacaaggtagaagatccggatgattgttgagcaaatctgtgggatcttactttccaaactgtcaatatttggtatcctatcttcattctcatcatgtctcctctcctctcctcttctcttcttcattttatattctcactttcaccattctttctcttcaattcttttctctctctctctcttctcaattttctctctaaaacattattatcatcatgggtttggctactaacttagaattggatcactttcatgtgttggctgtggatgatagcatcatagatagaaaattgattgaaactcttctcaagacttcttcctatcaaggtatttttatatatatacatatatttaacttttcatctccaaaaagaattgatgtattttgtttaatgatgcattgttgttatttatgaaattttgtagttactgcagtagattctggaactaaagcactagaatttcttggtctaaatactattcaagaagaagaagaaaatgaagaagtaacaaatttcccatctttttcttcaacaactgatcatgatgatcatgatcatgatattatggaagttaatttgatcataacagattactttatgcctggaatgactggctatgatctcctcaagaaagttaaggtaacataatttatataatattatcagtgccagtcctaatctgagacgaaggaggcggtggcctgaagcctcgcaccgcttaaatataattagtaataaaataaataataatactcttaatattataatttaattagtttaacaattcactattcaaatttcaattaatttagatattgttttttttttatatggtattgcaggaatcaaaatctcttagagatataccagttgttatcatgtcatctgagaatgaaccatccagaatcaacaggtaattttatctttaatacaaattaattaattacatataatctgaaattttgtttgaatatataaattataatatatataatgattactttataaaggtgtttggaagatggagctgaggaattcttcttgaaaccagttcagttatcagatgtgaagaaactaagatctcatttggtaaagggaataagatctgatcatcatataattgaaaatcaacccaacattatggaaaaaacccaatctgctgttgaattggaatttcaatcactatgaaaataaccatatgaatttcatatacatatgttgttttaattatttcataggtatttattagatcagatttagtggagagaaataacattattgatctatgctagtattattatattattcaaatatcaacaacattttttacaattatttatttttttaagtcattaaatttttgcctctattgatattaattgaacagggcaataagatttgaattgttttttgaagtcaaagatcttatgaaagagaaatgcatgatttcatttcaatcaagttgattggaaatattgaataataaataaaaataaaaataaaaaatagtgattggagaataataataattgaaattgttagctttgccacctcattcatagctggttccaactttattagtgtggtttttgtaaaatagggaaaagtagaaaaggtacaattttttatttattttataatactaataataataggaaaatttatgtcaaaagttctaaaaaaaaattagtttgatacaaataaattcacaacttaaaaaagtaataatatttttttttgtaggtaatcacttttttaattaagttgtttacttattaaaaataccacctattattaatctaaattttaattttgatttaatttatttaaaatcaaaaaaaaaaaaaaactaataagtaaaccattcaattaaaaaaaggattaatgaacttacggaaaatatcactttaaaaattattatcgttattttttaagattaaaaatttatttgtattaaactaaattttttgaaaacttttatcgtaaatttaaaagtaaaataagtttatggtaatatatctattagtctacttttctcatttgacacttattctttcaattgagtttatgtatcttttacatattccattcttgaataattacaattaggatctttttagttaaaataaaaaatattggaaatcatatatgttatatttttataaattgtatgcttccttacaaacaaaaaagaaacaataataaattgtatgcaaaaatacggttttatattgaaattcttaattatggcctatttgtttttttttttttaataaaaaataattagtttaagtcaagagtattcataaaataatccatggtataaaaaaaatttagtttaaatttttttgtggcacaattatagtttgtgtttattttttaaaattgtaaggtttaaaatttaaataagaacaatgatatgtacatatgttaatcataaacaaattgtggcatatatattgaagacaattttacatgtcctatggaaagataataatttttttacaaaaatattaatttatatatatttgtttttgctcaaaataatatttatatttattaaagtatatatatgtgcaaaagtctaacaacttaattttatgcgccaacatcgacttgttagattgacaagataaaatatgagttaactaattaataagaaagacacataataccatacaaatcacaggttaaaaccttgtgatttttagctacggctctctcaatattacaattgtgagaatgcatgttatagatggaaaatatgagaataacttagaagaacagagagacttagagaggcttaagctcttaggtgcgtgtgagaggacttgtggagaccctttagtgtgtgtagaatgacttaagccttgagagagtgatctaatgccttttatattgtgtagggcttacaaaatatcctaattcaaataggcaaagatatccctttaaaataagaaaagaaaacatattttatatcttgtatttgaattacaaaaaaggataattaaatccctaaaatataagactaatatcttaagggaatatctctatcttcatgggttgttggatctatctgtcccgatatagtaggtcagcttgagaatcctctagaaggttgttgtggaccccataattcgttcagccttttttgaggctgtttgcatgtgttggccaaccaactctatttttagggtctggccgacatgtaaggcttcattggccggccaggtatggtttctatacaactttgttgttcagcttttttgtacaactttatatacatcttcttcgtacaactttgctgcttaacttggccggacaaacctccttggttggtcagcaatggtctggccagggtttaaaaacttgtcttgttttacttggaagctgcacggagtgtacctgttcggttgttgacatgttgtatttcacgtgtcttttgttttgactatgtagacatggcacgtcatgtgaaaaaaaaatgggataactataggtgttcatccgatccaattcgtattattttactcatagtgcatctgatctgcactaagtgcagattttatattttgaatccaattcaatccatatagtaactctaatctaatccaatctaatccgtaaaagtgcggatttaatctgttattttagattggttacttttttaatattgaattatttaatatttattatcaaaaatatttttgcttacataactaataacaaaataaaataaattattgttattttatgtatcaaataaaaaattaaaataaataaaataaaaaataacaaaaattttttttgaggaaaacaaaaaaaaaatattcaaagcaagacgaaaataattatatgtataaaaaaatatttaatattgttttatataatattttccttgtaagtagggatgaaatatacatttgatatactatattttaaaatatatttgtataatatatattatatttttaaattattatttttatattaaaatattaattgtatatatataatttttttttaaatagatatataaatatgtgtagattggattggatcagttacttttacatatcaatcaacatctaattcgcacaagtacagattttaaattttccaatccaatctaatccgcacaagtgtagatatccgtattttgctgattggattaggtattttatgaacacatctagggataacaccaacagagatcaaatttcttttaaaatcatgtactaatcggacgtccttcaacaccatcgtgaagtttcaaccttacagttccaattcccaccatcttacaagacttgttatctccaagatacatagtctcataattttcagatgtaaattcttctaaccaagatttattcggtgttatatgaaatgaacaccaaaagcccaagatccattcagaatatgaattctcaaaggttaccagcaaagtgccagatgagtcataactgtcactacttattgttgcatttccttcagatcttgaattacctgtcttatgccgctttggatacgcctttctgagatgccatgttttcttataaatccaacatctaaaattcttctggttatcagattgtgctttagatttagattttttaaaaaaaaatacttgttctttagatctagattttacttttgaatctttgtgactttatcttttctcacttttgcccttacaatccatcaccacttttaaaaaattttgactcactcctttgattcagctctttcgaattcaaggttgattgcacatcatcgattgtgatcgattctcttctatacaacattgtatctttaaagtgtacataaaactttggtaaagaactgagcaaccacaaggctagatctttgtcttcaatagtgacaccaatattttcaagatcgagaatcaacttgttaaactcatcaatttgttctccaacagatttgtcttctgtcatcttaaatgaatacagggcatgtttcaaatataatctattcactaatgatttagccatatacaaactttcaagttttagccacacacctgcgattgcatcttctttagcaacctttctcataatcttatttctaagattcaaaatgatcacactatgagcctttgtaggagtctttttcttgtctttttcagatattaaatcaggaagagacttcgtattttgcagcaaccatgattacaaaccaagctttgataccaatttattgtgcgaaacagaaataatcaatgacttatgatttaatttacagtatcaacaaacacgcaacgcaatcaagaaataatataccaagacatttcaagattcaagtaatgaattaagcaataaaccagaaaagaataacaccaggtttaacgagttcgagccatgtacaatgctttacatctcgatcggaacaacaacaaccatatctttattgatattagtgtttacaaggttacaagaatcctcataaactctcagaaattacgagaacaagtttatctctctagtttagactctctctcttaaccttacattatcacgattttcaatcaaacaaatctggtctaattctcacataggttataaaaatttacaactatttatagatttgcattattgcctaaaatatatcctaaatcaccgtgacacatttacaccaccttaaatgatctagctcatcactagcaataataatccacgctaacttaaaaaacacactttcaattcgaacaatctggaagctttataaaacaagcctttcggatacgtacatagcttccttcctggatagatcttcaagactgacaataagttgtctgggaatgtatttccggattaataacaagctatccaagagagacattccatacacggtacaagcttatctagaagtaccttaagaattccataagaccttctgcacagtgcttttcggattcacactaagcttctgatatcgctctttcggattaacgacttctatcttagatgacaaaacttatagccataaccaacaaatacaattttttttttttgaaatgataatacaaatattattaaaactaacaaaatgtagtataaaaaatgaagaataaatcttaagaaaataatttaatttgatttttttttgttgataataataataataat

SEQ ID NO: 110886 - DNA, 7991 bp, Cannabis sativa
  modified_base (4195)..(4217): a, c, t, g, unknown or other
  modified_base (7673)..(7675): a, c, t, g, unknown or other
gtactagcaccctaatataaaatactgaaaaataatatcaaacaaattatgtttaaaattagaattattagtaattctctgtaattgtaggcgccctccaattaagcaaagtttttattattttcactttcataatcacaggagtactgaaattttgattttttttttttaattgtaggtaagttttacactgtgtattgtattaaattttcactatagttttacgattgttttttagttgttctattgttattttaattattttgttttgtcgttttacggtcgttttataaaaagacagtatttttgtaaaaaattccgtgtaacagtaaattgtaaacttttacccaaaatctatatacatgacatttttagctctctattagagacactcttaatatgtacatatccttaatcactttcattataattttaacttttttttttaattatacataactttttaagttttttttgtactaattacacactatttaagttccatagtcattctttttttgtattttctcaaactaaataagattatcatagtaatttatattttttttggtcatatttgaagttgtgtgttatgtttttgtaccagttactccattttcctttttaaaatattttttttaagtctttttaacattttttatcatcttttttcaattttattaccctttttttatttgtttattagtaaatacataatagttattatgtaaaaaactatacgagtatacatatgatattaatcattatttgtgttgttattcttcttttttttttcttcataaattttggttaattattattttatttttcttctaaactttgcttattagtagataatagtaaaataaatcacatgaacttacatttagacatgacgacttttaatcttagtttcaaaaagttaacttataccacactatgtccatgtttaaccataacttcttattaaccattgtttaaacataattgataaaaataagatatatgattataactcataaattttaacagggttatgtgcctatgacacgtcctgcaagcctagtatatatgtatagttatagttatataaaattcgcaacattggcattgcatttctatggtctgttcttgttgtctaggacattggagttgttgcctacttgattcaaaaattcatttgatgttccatatctctgttctttgtcaagcattagggccacagttttgccaccaaatcttgctgcaggttggggacgcagaagactcctcctcaagctctcatacaatggactcatttgcctgcattcgaagcgacccgggaagatttctcccccatatagcaacaatgccctcatttgcaccttgaggagaaggtgcgttaggggggttggaaaatgtgtgcaccaacaagtaatagaataaagagagtgagattagtctgagtagtgtgtggaaaattaattgggtgagttggaaactcttggcagagaagtcaggctcttgaaaatcctaattactatcaatacaatttcagttcggatttccttcagctattctctgtgtttcctttaattaaattgcagaaattacctatcaaaacgaaagaaacaaggtctttagttaagggttaaagttgaagtttttcgttaatttcattaatcacaaatcatttttctgaaaaaaatatgggatttacatgcacaaattgaaacaaaactaatatttgaacaaatacaaatctgagcctaaaatgattcaatttatagcaaaattttacaaatcctctttacttcaaccaaagtggaaggattatcatctctccaaagaatacatcacatgatgccccatgagtagtgtgatgatcattaactctgcttttcctccaaaagcctgcaacaataagagtgcaccgcaaaaaagggcagaatgagaagaaaaataaatggcaatcattccctcttatcttcttcggaatcatcttcctcgtcgtacctctcctcatccccagctttcttctcttttttctcttgctttactaagctgacatcaccgtcagacttccccctagttagagattgagtttcttcatcatcggaattttctcccacttcctccgaataagcgtacctataaaatacaaaacctttagagagtggaaatcagcattaagggcagcttgtgctcattgagacaatagttaagaacacgagcaaaaagggatttgcatcttcagcattggcataccagattcctaaaaggaagaagattcttgattttcaattatctgttcttaaatttgttttatgctaaggactgaagcatcatatgacatattgtacgggaacacaacaaaccacaaaaagcactgataaaagtaggcacatttcatgcttttagaagaaaaaaagagtagttattcacaaaccgttgagaactctgagatggagcccagagacagcagattacagagagtaatgcaaatgcaagaacgtcccagaaagcggtgatgatccaagcactctgccacctttcgttaaatggatctgttgctttgaagtatacctgcatgagcaagctcaccatatttatgacaatttaaagaatcaacccaagaacagcataaacaattttttttttttcatttaaaatataattaaattcagaagagtatagcctttcacagaaaagccaaaattcacaacaaataggagtgtactttaaccgaaaaggttcaactgtgatgataaacctctcaagtgatgatgaataatgatacatcagattaaaagtctcaaggaaatactggaacactcttaaatgttctacaagagacactacctcgagaggaacaataaattaatatcttttaattactgaaatcgggacctaaaatttgcaaaattgggaatgttaagaaagctattgctgaagtcaaagcattgtaaatgcagattacaaagttgcagaaataatacaggcccatgtaacaaaaagtcaaaaatttctaaaacttctgatctcatacaaatatacagaaagtattggcataagaagtttatacttgattaggataatcattactatatgatttaatcaagatcacatctactgagtgttgggcactaacatcatagataacagaaataatctagaacatttagtgactaatttgtcaatgaacatgaattactacacaattttcctggaagtaatccttatttacagtgttgtttttgaagtaagtagaagacaaagttggatgagtagtataataaccttgaagtttttaaagacgatcaaatcaaaatgtggtgccaccgaaagatactccatgggaaatgctcatacatgaacaagaattttatacctaaggtctatgacaatcagagaaatatgaacattgttttcaatagtttggctatatgctttccaaccctaaatgtaggtctgaatatgatctctatgcagtacttcctagttactgataaaatattggtaaatggtcagaaaataacacaggtagaatggttcaaaaaatcagggggattggtgggactgctgagcaaagaaagattcatacgaagaatatataaattgagaaaacaacccatgtaacatgatctgaggttagaagcataactgcagttaaatcaaccagaatttcaactaactgaaacttgctaaagacaaatttcacttttataatgtaattttaaatatctacatatataaaataagaaaaaacgaaaaagagctttgttaatatatttgtcttagagagttgctatatggtccaggtatttgacagatttcgagtggactcggttactcctaggtgcgtttatgcctcaagattttgatggatataataataagaagataaatataatttggaactgtggagtgtcagcggcgatgtacatggtttggctcaaaagaaatgatagaattattcaagacaagaactctctagattatctttgggttgcagtttggcatacttttattttttctgtctgttgagagattaaaaggtattgttgtaacttatttctgtgttgaagtttgttgttgctgtggtttcagtttaaattctggttgagtatgtgatggtgtgctgttcaagtgttcatgaaaaattcctttcttcagcggtataattatcctcaaaatacataataataataataannnnnnnnnnnnnnnnnnnnnnnataataataataataataatgctgatattttcataacaaataaaaatccatttttgtcttaatttggtttttcaggatgttaagaaaataagtattaaatgtagaaatgtaggaaaacatatgcaaacctcctagtccagtcaatgatgtaaaaatccaaaggaaacaatgtctttactctttcatgctattctagttttatatgtatcatatggaaaaggtccatgaggaaaccacacgtaatttctacactactgactacaacttacctcataacctatccatgcaactgagacaatcaccgtaactgccaatgcattggagaactttctatatatatccaactttacagaactcctctttgcctggaaaagtaactagtttagtttccaagagtgtaacacaaaactaattaaacttatgtgaaacaaatatactagtaggaacattttaaaggaacttgaaaacctaactagaataaggcatcattagggagattgtcatacctgtaactgctctagtgttttcgagagagaggtaaagatccacaatatcagaaatgcatccaaaaaggcattgggcaggaccaaaaagagttttgctcgtccagatatatcattgatggttcccacatactcagaaatattcagcaattcagtggcaaaaaagtatgttactccaagaacaagcaccttcgaggtaagaccaccaagggtaggtcgcacaacaccataacccattgaaacggagaggataaggaggcgagagattgtttttctcacagctccaattgtcacaacccatgttgtaagtacaactggcctcattccagtattattaaaatgtacatattcaagatgccaaagaatcatctcgaagaaaccaagagcaattacagctgtaatgcagtgttgaagttgcagaacatcattccaaaacctcacatactgagataaccaaatcaaactaagcaagaaataagcaagtgacatatacacgtagaatttcttgaaaggagccatcctaccaggtagaaaaccatcagggtttttccatgaagtttttccattcattgtaagacccttgagttttggatcgcatgctacaaaaaacaagttgtacattccggttttcgtgatggaaacctcattattttccatacttgcaactatagaattcccactaaactgtgcattcagaataataggccagttgatatctgttgcagaaggtaccctaatgacttcaccttgtttacaaccttcaatcttagccagatcaggggtgcagcatatagctctttgcccaccataagctgagccaccaatattatttcgatcagctgcctcaaaaataataatttgtaccaacccagtactgtgttccatatctgacttctggtcagcagaagccttgctcctccaaaatttaatgttttcaaatctatttgaaggaaaatgtcagaaatgaaacttaaattggtaataagagattgaaagtgaatcaattaaataaaaacaacgaccactatgcaaaagccaaatgcactcactctaccacaaacgacaaaatatacaatatcctttcacatagaagttgcacggatgcatccagattctctggatatagagagttaaagaatccaaaaaagagggcatatgcatcacgagactaattcttatataaccccaagggatggtctagtggtaaggagtgttggtaggcatttgttcaaaagtttgaaactcccattgactaaaaaaccttggagccactaggacagtctcccggtcgaactgccaaaaaaatatagaacagataaaagagaacctaatacttatatagtgataaatctcttttgtctcaggaaaataaatgacctggattaatagtataaattggaaagtattgcctctattgccactgttaaaacaatataagcaacatcaacaaacaagccaaagtgggtatttgttggttacacgggtaagaggttatttgaaaattaagtttccattagctgaaagggactggttgaaatttacactctatacattcacatggaattctcacaatgtcaaaaaagagtataatcccatattaaacccttctcacaattattctcagcatccacatttcagccattatttagttatgaatcacagaaaatgattcctaaaactacatgtcctattaatttctagattgcatcagatagaagacattgaactaaagttaaataacagtaaagaatatgatgaaaaagcttaacaagagaggagcaacaatagcttttaagatcatcatttatttatttttccttttatttgtctatgcatataaatatatacatataacaactccaaaactccattaactattatagaaatcaacacaaaacaattctgcatcacttctaagcaaataaaatttcgaatcaaaatcagttaacgaacttaaaaacagatctagaacaaactcaaattcaaatctaacaaaacacaagagaatccacacaaaacgaaaacaatacctgatataagaccgaccatcgtggatcgaagacgggtcggactcgtcggcggcggcggaggtgagagaagcagcaatgccttcgctaccgccagagagaaggtaagaattgccaacttctctgaaggtttcgttgttgtagacgtgaattgaggcgtaagaagtaatggcggtgaatgagagcagaaagaagaagaagagtgcgtagccattgttgaaccgtcgggtgtggagcctgagctccatgtttgagcttggtgggaggttttagagagagaaaatgcgaatgagaaagagaggaggaagatcgggagaaatgaaggttgaagaagaagaagaagagttagttgaggagggagattgtggaagaagcaacgtagctctcagattcagtacaacaatggaggaggttaccctttacgcgcgctcttcgcacgtgctctacaagtacttacacatgtgaccgctaagctgttcttttcttatcattttttaattaattaattaagtaaataatatctttattatggaataattatcttcttctcaacataagactgaaaatctcgctatagaccaatgtcatgtataatagtcaactgtaatcgctggattcaattgtactctatatttaacaaaataagaaataaataaataaaatagttagactcaatactggaaatgcttagttgatttttatttttagttatatgttatttaagcttaattgcttgattggtttgagatttaaaagtaattttatgtttttaaaaacttaaaatgtggggtttaccataagaatacttgattgatttaatgttttcaaaagcgaaatttaaatatgattttgagttttaagttaaaaaataaaaacaataattttatattttttttttatgttttcaaatcattaaatctaaaaannnttcaaatactctcttacttttttattttgagattctcaaccaatcacaactccaactttttaaaactcaaaaatacaatattattctacaattaatcacatttttaaaaataattttttacagacaaaattcaaatttttgtttttaaaacactcttttagaaaacacaatttttaaagggaaatttgattaaatatgcttacattactttaaattttttctcctaaatttatacttaccaatatttttagcatatgacaactttagtgttattcccaaaataccctccccatttacatcaactccctctctcttc

SEQ ID NO: 110887 - DNA, 11238 bp, Cannabis sativa
  modified_base (40)..(52): a, c, t, g, unknown or other
  modified_base (11120)..(11140): a, c, t, g, unknown or other
ctctctctctctctcaatatatctatctatctatctatcnnnnnnnnnnnnnatctatctatctatctatctataacttcagttccattacacgtatctacaaatgctgttcttttcccaatttgttattacttccaggtaactctctcttttcctttctctttttctttcttaaattcatttcgtgcattattcttcttctttcttctctttatttggtctcttacaaatcggagaaaactgagaaatacccaacttctcttttcgtattcgctcttcctttcatgttgtttcggtcctcatgagttcatattatttgtttgttttatatattcagtttaacttgtgcaatttttttttttataatttaacgtcttattatggtgtgtttgttgtgaatctgtgataaatattgtaacttgatgaaattcctatgagcagaaaattcattttttttactatgacctttagtttcattataatagactgcttttgttatggtgtaaattttgaaatttgcagtggaacttttctggttaggttcttatgagtttctcagtaaatttttgtctttggattgtgataacattccaatatagttagatcatacctggaatggttgttgattggtttcgtttatttattgcaatgttccattgctctaatgtctttctgggtctggattttatgtaaaaatcagctttttgttcaatggaagaaaagacccataaaaaaatttcttagtgagctttctttttgtggtttggcctcccgcagtagattttggggatctcaatgttttgggtccaatatctcaatgttgctttccaaaaaacaaaaaaaaatccatctatgtccacacttgctgacccttttcatgttgtcgtctctgttttgaaataatctttattgattgctttttgtttgaatttctttactctagtttcgaccaatgatcccaaatcagcaaggacaaccatttcttccatcagcttcgcaacaatttcagccagttggacagggtatgccgcatcctaacttagggatgtctggtgtacaaagtcagccaatgcatttttctcagcctatgcaaccgtaccctcctagaccaggtcaaggtggtcatccgatgccttcatcacagggtttaccaatgtcgtacattcaaacaaggcctattacacctggaccaccacagactcagcaacctggtcctcctttcaataatcagatgcctggtggtgccgggatgcctttttcatcaccatattctgtaagggctaatattgtgtataagttttgcatggttttgtgaagtacatgatgcaaaaaacctgacatagttttatttgtttgtctcagtttgcaccttccttcgtccaaccacaaaataatgccaactcaatgccacagttccagtcaatgcctcaaatgcaagcacccattccaggacaaccttggttgccctctggaagccagagtgctccagttgctaccttagtccagcagactggccatcaaccttcggctgcttcttccacagatactgtaattaattatttattcatttttgtctgctgaactttaatgattaaaatagaaaaaaattattaggtcttgtctcttcttgttgtgcatattttgatgtactttttcttctttcgtgattcctatcactatgttaattacatttccatacatacgttatggttatacccaataggggtagcttaaatttttaggcatgtggtttgctcccacaaggtatgaggttcaagtcctcctgggcacctacattaaaattgctatagtttattggtccctaaatatggtagggttaggtggggagctttgtttcagaaaaggaaaaaaggaaaaagagagcatacattatgataataaatagggttgaagtgactttggtgacctcatcttttgttttacaggcaataaatagccttacacagccttccttatctgattggcaagaacattcatctactgatggaaggaggtaagttattagttcatctatcactcttgtcactttttcggtgataatactgcaatcaaaatactttgattattgtttgaggatcttggttttctttaatgatttcttataacaaactctttacttctagtttatgtcatttgaggttgttttcaattattttgtttgaactaaaattgctattgaatttcttgtccctacagatattattacaacagaagaacaaaacagtctgtttgggataagcctttggaattgatgacaccgttggaggtgagtttaatttgctaatatgtttttcttgctctaatttatatgccatctccaattacgtgcattgcatgtgttccttgtttgctatgtggtcatatacttttactggccctttgtggatgttgctgactgttgcacttgctcagagttttatgcgaattcttcttttatttgcatgtgcttccactgatttgtagatgtcatggccagtgtggagaaaatttacgacttgctctatatgctcagtttgaagacgaggtttcagtttcacaaagcaggcaataattgctatttacagcttatttatgaagtagttggatgttctagtaattggcatatgtagtatagttgccttaattatttcttcttcttctagttataacaactaatagcgcctcttttctttccttctttcatactgtagctgaggtgttgcaatatattaatgatgccatttctttttactatttgttacattttcttcttgtttgagtctcttcttgctgtttagtattaaacccaataggtactcacagatgcacatatgcattcattatgttgttaatggtgtccagacatgattgatttctgtaatgtgtttccaaatgtttcttgttatgtttttcatcaactgcatatgactcgtttgatgtgtatatgggtatagaggtacaggcatggtcatgctactgattttaaggatgaaaactgtaaggtctatggtacttcctgtatggtgtgtacctcatcctaatttgaaatgaacattggggtttcgattcatttgtattatgttgtgtttccttttttctagtggattacccgcgcttcttctatggaatctgatggtgattatgtatttgattaattttgatacttcatcttgtttgattctttgttgcttttttccgcctcggttgggaggacagggcatgttttctacaaggacatgcatatgtactttaattccccattttttcttttatgtacatactataatgcgtaggttttgcttttgacagcaactattttaagtgtttgatttgagcatcagcatatcatatatctttattgtattatgtcaaggatttaaatttaatccatttttttttctttttcgtcttattttgtgatatttgcattgttttttaagggaatttgggtaaaaggtttctttctctgtagttagttacttgtaattgttcacacacactttttcatgttcagtgatagacttagacatatcttatatattttatttttggaattcttctaacttattcctgctttttgttccctaagaatttgtttgacaagtttgttttttcttttcactgcaacagagagctgatgcatcaactgtttggaaggaatatagttctccagatggaagaaagttagtatagcatgtcactatcacaacttagtctcttgtttgttttgtgtaaatctaatatattagaaggttagaatcccaatgaaaatgaaaagcccaaaacaatctgaatataacaccgatcatttgaaaccatcctcgctgggtttcaaaacatagagctctgaaacctacacctcagtagattgaggtgtaggtttagaatcaaacattcgaaacttaagactcaatactttttttggccacctcaaacgaaactggttttgaggtgtaagttttaaaattttttaaaccatggttactatatctaatattttgtatgttaatttttttcttcttatatcattaagctgattttttttttttttttcttttagagcatgtttggtagaagggaatggaataaaaatttgtattccattgtttggattttaagctctagtaatgcctttccattagaaatacaaatatctattccactcttcaacctattgatagaaatattcattactaaataatttttaaaatccaatgaaaattactattttagcctttctcactcttaaatttaagatatatgtatgttgaattttaaattatatacatacaatttagtagttaaggtattcatccatattattgttattattttgcttaattcaatatgcaagatcatttttattaatattttagacaaatatttctgttaatacatctaaaaagatttacagaatttatgagaagttatttttagtctattataatttaaataattactttttattatacaaaaaataataattcaaagtgtctaatattgttaaagtcataattctctctcttttttttctatttaaatttctaatattttaaaaatatatataaaaaatgatgtaaagatatttttgtcaatatactatttatccgttccatttcaaataaaccaatcgtcatgttttaatttcgattctttttccattgcatttctattttcattaccattccaattccattatgctaaaccaaacacaccaccacagtattatttagtttttccatatggcagaatacattgatcagatctaatttgataatcaggtattattacaacaaggttacaaagcaatctaagtggacaataccagaggaactaaaggtatttctcatggctcagtattcattatgtgtgtgtttaagtatgtatatagattctctaatgagaaacactcgcttttagctggctcgtgagctagctgagaaagaaggtagtcatggatctcagttggaaactagtataatctctcatggttctgcggctgcggcttcagctgaaacccccccgccagttactccggtggccttaactacctcttttgcactaactgggattgcattgagcccagttgctgttacacctgttgcttccttgcctaattcttcagtggatgtttctggatcttcagccacccctacttcacagtctactgtaacaggtagtgttggagttcatcctcctatggtaactgcggtttcctcgactcctgtaatttcaagaagtacaggagtttcatcttttttgaccaatgccaatgctacatcaatgtatgtatttgtttttatgcttttcacttccactttgtgatgattttccagatcttaagtagagttttagtttgaatgctcttcctaatgaaacttgctaaatttaggagcacatatgagaatcaagcatcacaagatattgcaagttcagtggatggagcttctatgcaggatattgaggtgttgtagattcacaattggaatttctaaagttgaacagttcattgaagtttaagatggcccatatgtctgaataatatgaaaactcctgagagcagtctactatctgatagtgattattcatttatttgttgataaaaaattatttgtttttggttaagatacatttatgtgggggcttgaatccttaagtaccacttatatggactcacgcacccaactactttagctatcccatggggcttaagaaattttctgatataagttagtaacaatatatgcgatattgaaattttctaatgtatatattattattattattaaattctggttttcaaaatacttaatgatatattaataagaaacaagttactaacaatttctgttctatagattttcttttctagtcttctgacactatagtatggagtttactagttaaggatgctcttgttgagttcaactgattaaactttccattttcaggatgcaaaaaaaggcatggcagttgctggaaaaatcaatgtaactcctatggaggaaaaattagttgatgaagaacctttggtttatgccagtaagctggtatagcttcatattattttacatttctgttcatttctttcaagtagcatctgcctatttcgactcccccttaactattattttcctgtttaggaagcaaaaaatgcattcaaatcacttctggagtctacaaatgtacagtctgactggacttgggagcaggtaaactggttatatattttgtgtcagcatattttgtacaggccgttgtctaagataaaaaactttttgttagacaatgagggaaattgtcaatgacaaaagatatggtgctctaagaactcttggtgagcggaagcaagcgtttaatgaggtatttgtttttttcttgttttgtttttataattagtcttacagaaatgatcttgttccgtttgttgacatttgaatggtataaggcttgtaatgatatactctcttttggctggttttagatggtatcaattttgttttgacataaagttatctatctttattatgttatagtacttgggtcaaagaaaaaagcttgaggctgaagagaagcgtacaaggcagaaaaaagccagggaagaattcacaaaaatgttagaggtatgtagattacagctttcttgtagtagatccttttgtttgataatacatacattgcaacttatttctcttctattttgttgtaggagtctaaagaactcacgtcatcgaccagatggaggttctcttctatccatgcattgtcatgagtagtttgatatataatgctattctattttttaagtcattattatattgtttactttaaaacttcttggaattctgcaaatatcctaagtgatttaaattttaaatggcttaaatggtactttgtttctttgtgtataatcagcaaagctgtcactatgtttgaaaatgatgaacgcttcaaggctgttgaccgagctagagacaaagaagatctttttgaaagctatattgttgaacttgaacggaaggtaacagtctggtgtttaatatattgtagatttcatatcatgagtatgagtgaatgtaaaactcctagtatgtaggtgctgaaattactgatccctatttgtgttaattttattttatggatgcaggaaaaagaacaggctgctgaagagcaccggcagaatgtagcagagtacagaagatttttagaatcttgtgaatttatcaaggtatttaacatgttgtaccaagtcgtttgttactattggttttgagaatgtacaatcacattgtctgtcgatttcaggtgaatagccagtggcgaaaagttcaagatcggttagaggatgatgagagatatttatgtcttgagaagcttgatcgcttgctcattttccaggtataatactgtatttatgattgatcttgtgcatcatcttacaggaatgtggaaaggtaaacaattttggggatgtttattaagattatttttgtggcaggactacatccgtgacttggaaaaggaggaagaggagcaaaagaagattcaaaaggttaaattcatattttttggggcttgaaccctagactacacactcttccttgggcttagccctagtggcaataaccataaatgagcttttgtcttttatatgtctacttattttatttgtaaccaatttcaaggaccatctgagacgggttgaaagaaagaaccgcgatgagtttcgcaaactcatggaagagcatattgttactggaattcttactgctagaacttattggcgagattactgtttaaaggtggtcaacctcccttcatttttaggtgcaaattgaaaaaatgttgcagcatattagaagctggaatcaatgaagttttttttatgtcttgatatttttggattttaggttaaggatctgtctcagtatcaagccattgcatcaaatacctctggctcgacaccaaaggacttgtttgaggatgttattgatgaattagagaaacatgtatgtatttgtacggttttttttattgcatacttgtcctggtttagagctcctggatttcatcttttggtttgtcaagttcatttgaaagaaaagtcatgatgcagttgttgtttctcttaaggtatttgcaatcttaatgagcctttggtttcatgtctaacaacatccgatctgtttatttaacagtatcacgaagataaagcccgggtgaaagatgtactgaagctggggaaggttggtttcatgaattaattacttaagcttttgaagtataatttacacagtttattattcaggtttcgtttgctgccacttggacatttgatgacttcaaggaagcagtcttggaagagattggctcccctctggtgtcagacatcaacttaaaggtagattttatttgttgttgttctttttctgcaagacactgattatcaacttgtgccctatctatttttgggtttccggtttccagtttccctgattcgtgttttgttgaagcttgtatttgaggatttaatagatagagccaaggagaaagaggagaaagaaactaaaaagcgtcaacgacttgctgatgatttcactaagctattatacacatttaaggtatacaaatctgtggattgaggagtgtgacagatatcttaatttgcattgtcaaacgtactctgtaatattgatttaagtatatttattatttaggaaataacctcaacttctacttgggaggattgtaaacaactttttgaagagagccaggaatacaggttcttatactgcaataactgtttttttttcctttcactctttgtttgttcatgcattgttgattataatagtcttattactgaattattttattttcagatcaattggtgaagagagcttgacaagggaaatttttgaggaatatattacacaccttctggagaaggctaaagagaaagaacgcaagcgtgacgaagaaaaagtatgtgcatttgtttatagaagttgtaatttgttaattattctatgctgtttaccttgtagaaaccagctgttttattgttttttgttttttaccattctcttaaaaatttagaggtacaaagcaagattatttaagataatgtttggttaaaggaaaaacaattaggagatagaaaattagaatgatataaacgaaagtgtatttcctttctagctgtgtggtacttgtgaagggtagaaagttggtttattgtaaaactaatatatcatcctcttaaatattattattattatttttgtataaaaatatgctagtttttacttatttttatttatatgaaacttttctctctattattctttcctatttgtataggaaaaagtttagtggttcaatctttttctcatccttcccaccgaacaactcatttttctcttttccattactttctctttagtatcttcttccccttcactttccttctctaccaaaatctgatgaatttgctaggtatgagaattaaatttggtcttaattaactttattagcaatttggtgttgcaaattatctaattagattgggactaaagggccatttcttcagttgctagagcaggacactacgcaatttagattcgactgacacaataagtgtgccttcattgtttttattttgcaggccaaaaaagagaaagacaaggatgacaaagagaaaaggaaggagaaggagcgaaaagagaaagatagagataaggagaaaagcaaagaacggtctaagaaggatgatacagatagtgagaatatggacattagtgatagtcatggtcataaagaggagaagaaaaaggaaaaagacaaagacagaaaacaccggaagcggcatctaagtggtacagatgagatggggtctgataaggatgagaaggatgattctaagaaacgtaaacatagcagtgaccgcaaaaaatcaagaaaagtatttatatctttatatgctgaattgcaatttctgtttattgtaaaggtttctttcttatgttcattaaacttttttgatgtttattggcagcatgcacattcacctgaaacagacagtgaaagtcggcataaaaagcataggagagagcatagggaggcccgtagaaatggtggacacgaagagctagaagacggagagcttggggaggacggagaaatcccatagtttgttttctgtgaaataataatgctaaccttcatatgcgttgataaggtacattttatcgcctgcatgctaagggtagaagacgcattcacttcagaaagttgtgatggttattatgcaagaaaactgtcccacagaagatgtgctgctgctgttgattgtgaaagtaggactaatttaaattgaagcaattgttttgtttgaatggcttgtacaagttaaattggattttctttttgggtccccagattaggaagtcaacttgtgtattatgtaggaagagaagcgatctccttacatgtttatgcatcaaaagttactttttttctagacggattgtttaattttctattttccgtaacttaacaaattatggttattaggtcgtgttgtattgtattatattaaattagattatatatcatatttttatttaatattattaaaatattatatatttatgtcttcatacaagttaataacacatatagttttatataaaattattgcataaaatacattttaagataatattaaatacaataccgtgtaatacagcgtaccatataaatcctaaatatgtatttatataggttctttatcatgcaactattggtgatatgatattttaaaatctctttaattaatattatttatgttttctaattttttattagttttataaatactaatgaatataaaatatgtaattatttattttctctttaatttttctcattttttttgttttattttttttttttaaaatgataactcttaattatcatcaaaaacgtggccttctggttttgtttcttttttctttctaaattaaaatatttaaaattgatattttttttttaaagaatcacaactcctaattcatcattacgtattcttgacttattggcttttttttttttttttnnnnnnnnnnnnnnnnnnnnnaaaaaaaaattttaaaaaaatttttttggcaaaaaaatgataaaaaaaagttgaattcgacttaaatattttacatataaatgtattttttatatagt

SEQ ID NO: 110888 - DNA, 5274 bp, Cannabis sativa
gtagttaggtgtaaattttcctattaaaaaaccaccttgatataaataattgttatgattgttgaaggtgaataaaagtccttaactatttatataaatcatgattgttagtactattatttcttcgttgttttatgttaatatttaattttcatgtttgaaaacaagatttttcaatgattattaataattcatgaataatatattaaatgatactttttgtaaattcaatctgtatttgtcattatactgtagtaattggtaaatttaataagaaaataattattaaatttgttgtgacatacgacatacaccacgagaaacatctttagccagtggccacatttttcttttacaaattcaaatcacatcaaaaattgaatccttttgatgttttttctagtctcaaaatcaaacaatacaatcaattagtcaatgacagtttacgtaataatatcaaattttacgcccttgacgcaaccgtatatttccaatgtcagttaagggtttcttggatggcccctgatggtcattcttctcagaaggctgctgctcaaggagtgcattctgaagtagcattgtgccatgggaagcaatctctggtcctgatgagtcatcattcaactgaagtggcaattttactctattagagcacttcgaagctatgcagccacatgatgccccacagctcccaccattgctccgacatacacatttggatgttttgcacaaagatttcttgctacacgagcagcatgtgctcgattcattcttgtaccttgcagctacacttggtatagaatgttcggattctgataaactggtgccctcctctgtggacagattacttgcaacgactgtagaggaatggcttgacacaccctaatcatatgaatcattgaagaaaaagtgaatatactttaaatactactattccccactccatgtttggaaagagtcttaaaaatacactaacctgtgccttgttgacttgttctagttcttccttttgcaatcttaattctctaaacaaaccactaatgctaactacttcttccttcaactcatttatgtcaaaacccttctccaaggaaagagtttctctctcctctagttggtacctttagacagcaggcaaaaggttcaactgaaaaggctgaatgccaaaatatagtaccaaggaaaaggactccaaaatgttgcaggaagcacagataagctcaccttaaattctcttgcctcagttcctcagcttcttcctttagcttatcactctcctcatccattctaataagaacaacaagaaaaatggattactgatttgatgtatgtggcagataaacacgttccatttgacgttactaagagagagtagaaacaaacagtcaaaaaaacttacacttccatttgacgttcatattcagcacacaaagcatgcagtgtcgttagttcagagtcatgccccaagctctgaaatgatattatgttttattaataaagttcttagacaggagaaagagtgaattggactgatatcttgagagaaatgtatttcaaaattgtacatcaatatcatttatatgttgccaaataaataaataacgtacactagtagaggaccacgtgtacttggcaagagaaatatttgtcatacaatatgaactcaaacgagacatcttaacataaagagctctactgaatattgtacgagcctgaatcattactaaattagtaaatgtgactaatgcccaaaacgtttccagtttgatttaatacctgaattcctgcattagtctcatttctggtacctacatcagatttagcgaagggagaatgtcaaacaactgttgatatgcctattctgattcacacgtgtgcatgcatgtattaacaagaggaatttaagcaatatgcttcttaccagcttttctgcctctgcgtgacaaagtttgtcgagattcaagcagctcttttagccgtttggtagccatggaagcttctatagtcttacgttgcacaacctatcatacaagatcaaatatgagaggaaatgtcgtccagagaatacatggtgccaaaaaaaccaaactattactaggttcgttagagtacaagtaccatctttaatctccggttagcatctaaaagcttattcatctgaaactgattccttgtatactctctcctgagctgataatgcaaggaaagaaaattccaaaaatttaaatgcctttccaaaataacaatttaagatataatagaaaaattacttctagaaatactacaaatagaggaaaagcacagcgagtcactaatgcaaatatcaaaatgttaaaagacgatacccaaaaaaaaaacaatggccattatctagcaatacctgaagaatttctttttcatgtgaggtcttgtttaaccttaactgcagagactctaccttcagcttacattgcagttgaacctagatagtcataaaaataaagaaattgctgatcgtgactaaaacacaataattcaacatgagaatgtatcactgaactaagtttcaccttttgagccttcaaattctgaatctcaaattgcgacctttttgttgcttcatcgccctttggtctttggactgagaattgagacttaatttctagcttgttctttaaatccgcaacctacacaaaccttttatagtcataaatcaaacagttttattccccaaaccaataacaccaagtataactaaatcaaacctgatcttgaagggtggtcaacttttcaagataatcctctttgaccttcatagcactatcagtagaaatggaaggtacatttgcaagcttgtacttaagctcttcaatctccttctgttaaataaacccaaatccaaaagttgcaaaaaatttacaacaattagaaacagttctaagatgtgatgtcctttctgaacatgtcaaaccaagaactaattaacattaaggcttgaaaaaaaaaatccaaaattttcaattgaaatataccgcattgctctttgaatcgaaacaaatatttttaacgccaatacaacattaacccaaacttaaaaaaatctgaaaattaggtttgccaattcttcttcttttttttttattctctttttgcaataactttcaagaatacagggaatgaaatcacatctaatcgagggaaaaaaaaaatagaaataaataaaaattatactaaaattaggtttaccaaacctagtgaaaagaaaacatcacttcgtccttgttcctttttacttgaacattttctaaccaaccaaacacacttccaaaagaaattgaaaaagaaaaaaaaaacctgaaaggaattgttctgttgttcgagctcacgaactctggtctgacaatcttggtgattatcaagggcagtggcgggttgcttagagccgcaacgtttgatcttcttcatcatcttcggaggatgttgagggaacacggtaacttagggtgggggattggcgtttgagatcggatctgaaaggacaacaacaccggtttttcgcagagatggggtccgggggactatggctgcagctataatattgtttctttcttttatggtgttggtctcataagtggagggaaccctcttttgttcaattttgccacgtcggatcaagtgaacgtttaaatttgaattttgttccaactactccaacttttttttttttttttgtcttttccttttgaaatgaaactacattaatgcccctcgtttttatcaaatttacactaaaattaattgaaaactttgatgctatatgcttatgaatatgccaatacttaccacaaaaattgttgtgaaacaacaattctccatcaagaacaaagagatagctctctttggttagtaagtccttgataaaatttatgatatcttagattaaatgatgactactttctaatggatgcttttgtgtaacaaacttcctgacagtcatgggttcaagatgttggactacctattacaaaggtcttctcagattttgtgttactagttttaacattggagtcgtcctctgaatatcagaatgagttggggttatcttttctactataaaagtcttgttgtcttgctttccaggagtgttttccatgttagtcgcaacgataatgttgtggcacatggattggctaggtgtgcccttaagatcaacagtgaggtctcgtggatggaagatgcttcttcacgattccaatgaaggcttgtctttctaaccttcaggagtttaatttgagcataaaaggaatcggacaataaggttatgctctcaacagtaggacctttacagataaattattattatctcgtcctattagattcttttacagttttattatttaattgttttaatacttatatactttttctcttgcagttttgctagcgggacaaaaactctacttgaggattcttttctgatattaaagttttattgtctagcttttcaagggcgtctctttcttatgtaagttgcaatgtttaatgttgcgacccatggattagtttagcttgcccttaggatagacaataagcttttttagatgaaagaatctcttcactttaccttttggtatttctcttctctaacgtataatggttacccttaaaaaaaaaaacactaacaaaattaacaaaaaaatcaatgaggcaatgacgggagaattaatacttgaaatatataaagaaaaataacacctaaattgagtagattgatctatgaaacaatgagtttcatgatcaatactattggagcaaagtgaaagctttattgatgaactttgataaccaatgtagagagaattcaagaactcgagctccctagactaacctaactagtttacaaatcaatctcacatgagcgaagctatttcaagaatggacgattcctttaacatccctccaaggatccttaatatgtttcttgctcaaattctctctttctcaattctctctgttacaaatgagtgaaagtcttaacttgaaaaatataaagtgtttggctatttataagaggattgataggacaaagagtaactaacatagttagttagttagtttggttgctgatgtggcaaagttcgtgtccaataagccttaattataacaatttccaccttaactaaggcactataatgagtgcatatcagctccaaatatgactcataggttgtgacccatctttctgttgggttttatgcactaaataaaactcctttcaatataatcagatttact

SEQ ID NO: 110889 - DNA, 3253 bp, Cannabis sativa
agtaaacaattcgttcacggcggagagaagataatactaaattttaattttattaaaattttactaaaattctactaaatttatgaacttaatattaaaatacactataatatgttaatttttataatgcttaacatattaaggtgacaaatattttctcatgattttaagttttccaaacattaatttacttgatatgatctctttaaaaaagtagatcattattggagatcacactaaggaaaagaaagttaataaacttattactatgtcatgggtttataactttttgttttttcttaaacatttttacccctaatcaattaattgatgctgctaaagaaaagctagataagtattaagtgcagataaggaacaaactaaaaagagaagaaaagtggaaataaaaaggtgaggtccttaaaacttacggctacctttctttggatttgtttcagatattgaagttattgacaattcagtcttctcttatacagtaaaatttctatttaaaaatattttattgaaaaataatttctaatttgctataaaaaaaaatcaagtctcaatttagattaattataaataaaaataacttttaaattataattagttatatatacattttctaagtctcgagtatacttttatataagaataattatattttaataaaatatatgtatatattttgtaaatttatttacgtaaaattaataattttatttcaaattataatacatatataaatattatatttatttaaaagtaattttgttatgatataatattaatatttatttattattattattgttacatttatatattttagtattttgaatttttttctagtttaactctatttagttataacctctcaattagaatataatttacttaattctaataagtgtatttttagataaagattctactgtataactattaaggtacgggataagaatccaaagtgagatttagagtaaagatcttcttctaaaaggatattttaggatgctgtcccaaaaaaagacaatttaatcattgagagagagtgcaaattcaatatgatttagatgaatgcaagaatagttaaacctaattatttggatggagaataaaagtacatgatcagtggcataaagcaccacatatatccaaagcctaaaatggtgaaagaatgaaagaaaaaatagtgtagcggtgaaagaattggagcacaacttttcaacttatttaattatttaattttatatgtttaagaatgatatgcatgtttcgtttcttcttctggtgaagccaataataaaatcaccacttctcccatgcttggcctttttaatatgcacaagttcaacataaagctagctaggttccttagtttagtttagacttgttttgttggtggaatatgataagtaattaaatgaagtgggaatcttgctaggtcatagtattatatttatggtacatgtatatgaaatgaagaacatttcaagttgcttttttgctaaggaaaatggaagatgagccatcgacaaaaagaactttgtagtctttttttttttttttgtaaaggatttttggagttcttaattatcgttgttgatattttcattgtttttttcttaccatcaaatagtgatggatttttcggatcttatcgtatctaacaagaaaaaggctatgtttcccaaagatttctaatttgatatggcttttggacccaaattctataacttttaatttttgctttaaaatttttatgatttactatgcagtgtaatacattatatattaattctgttgtattttaaaatataaagtgtgtttgaatatcaaatagtaattatatgtgaatttctattatcatatatgtttgacaaaattgttgataattatacaataaattaatatactagaatatttaatatgaaattttttaataatatacttaaaatataaattatttacaaaaatactttaataaatctcaattataataatacattgctacatcattgaaaaatatcttaattctaatataatacgcttgaaacaaaattaatctcaaattctattttttttattattatttttttgagttttcaaaagtaatcttttagttacttgtgatgttgataagaaactaattagttacttttacgtaaaaataattattttaaaattatataatttgagatacattttttttttacctttaaaacattatttaaaatatcttaataatcaattagctatttttaagttatattgtgctatcttattatttaaaatatatttaggtaaccttagagtttattttcgaaactaatgagttgtcatataatataataagctaccatttttatataccaattattttatctacctttttgttactttaaaacttatgtttttatttttaaattatattaaattaatttattattttaaatacttttaggttactaatatattttgcttttgtaaaaatatttctgttacttagtctatttaataaactaaaaaaaatcacataacttactagtaaaattggtaaacatttaaattgctaattagtaattttaaagtcatatttttaattacctttttgagtttacagtagaaaataattacttttcatacagtataacaaataaacatagatatgaaatagttttatttagtatactttatagtaatatttaaattaattatgatttcgataatatatcaattggttatttttcataaaatgatctactttaaataaaaatatcaaccgtagataatataatctaatagtagttaattagtatatgattggtagtatgtgtaactcaagtgtttgttttatttttaaaaattgataaattatatgcttcccacatattaaaatgaccatcttaaataatagattatgattgtaattttcttaaacttaactgatcaataatataaccaaaataaattttcaaattaaataaaaaagagatagaagaaacttaaaatatgtattttcacttaaaaaaaaattataaaagaaacttacaatatgtatcaacatatataaaagggggaagaattgctaaaagagaaaagtcaaaagaaaaataaataaataagaagtggcagacaacatttaataaagggaaaatgaaaataacattcggtactattaattccaatacggtataaaattagtaattaatttaaatctgttataaatattaataattatgtggat

SEQ ID NO: 110890 - DNA, 5365 bp, Cannabis sativa
  modified_base (3673)..(3698): a, c, t, g, unknown or other
tataattgtaattttatcatcaaacttttagagaatggacattttgttaattttttataaaaagggacatttattaacttaattgttaaatttaggacaattttttatcttggcccataagaaaactctagtacaagcccatgtgtaaggggcggctagaaagggtttcctattcttgtattttatttttattacttgtttaatcaaagggagaaaataggcgattcacttgcctgtaaatagaagataactaatgaagattaatacatgagaaatgctaaaaggcaccagtggtgccaagcaccctcctacgtgtcaatatcgctattggtctaattaagtattgggtcccatatagtttaatataatagcgtttacgaagtattgctagccaatcgcaagacgacatgtcttaagggtgctaggcaccactggtgcccaataacaatgctcttaatacacacacttgagaatcgagaaattcttaaaaaattgttctcctcactctctctaacctagtcgccactctatctctctaattctctctttaaatttagaaatcttagtgttatgtgtaacacttgcctacactattatgtttcaacatctagatcactgggaaagattgtgaagaaattggtagttgaattcaggttctaagaagattcggattcaatgactggtgatactctgctatagataggaacatgagttagatcactaaatgggaggagacatattttgatgtgtaaaactctgtattgtattatggactctataagtgaattgcatgttataggtaattaatatttacgttaaatatttgttttcatgaaaattaaatcaatctgctggcgtgtatttcctacaattcgttcatggacgaactctcgttaatagatgaatattagaaatagcttggcgatctgtcgccaccttggttccgctcagtgagcccatatccgggatgataatatgttggctatcaaaggataatcctagcctgtcagtcataccccggtccttagaacttcaagcccagggattatggctttaagtctatttgaccatgtcttactctgcatggtgacatattttaaacagacattaaaaattgttggatggagagaaagacccaaatgcacctaaaactaatccaccaaagaatatagaactttcagcttggttggttctatgtgactacttcagttcaaaaaaacagaaggtatgcgtaattttgaagtcaattgaaatcttatttactttaatctaataatttaatgacttcttttttacagcaattatcagagaaaaattttgctaattgttcagtaatgccatctgagagtcgacatggatcaaaatcttatttctctcatatgaagagcaaggtaatatgataaatatttattttatttttatcattttaattttatctatatttgtcatactaattatttttatattcaattataggaggatccaaccacaaaataaatgcccagtttggtggacagttttaaaaatatgcactagcatccaataaaaaagtggataaaggaaactgcaagtgataaatttgtaagtttgaaatcatgtctttgtttatttgttatgtgtgtcattgcatcaaaataataattattttgagagaagatagaaattaactatcaagtacaaagtttgttctttgtttttatcttctgtatagttgtttaagcaagaatttattgttgtgttctgctcagttgctattgtactgaagctttaatcgataaaagtatttgagtttggttgttcttgtgaactgaggctcaagaagagctgaaacacgaaatttttgattttttgtgtactttattactgcattagtttttatccatttgtttatgagataaattatttgtttaaatgtttattgagaccacaaatctagatgtctttagggtaatgatgagaagagatatttatataagtgatgagttgtaatgctaagagctcatttaatgtgtattagttaatgtaaaagaacttttgagttgtaatgctaagagttcatttttgtttctcatttggagtctgttctttttatatatatttaaaatacttttttttatttgtgtaatttttagtttggattattgaaattgcaatatatatgtgttgctttataaattttcattttatggattaacaaagagatgagattcatgggtttgcttttacttttttctaatgttgcaaatagagatggacaacttgcgttctactcagagaacacatgttagtcagcttattggttctgatgttactgttgatcagttagatattttatctgaagatcagattgttgatatggtattgggaacccgttcacgttataaaaaaggaagatgtcaaatgcctaggctgaaggcaattggtagaacaacatcttctaataactctgtttataatctatataaagattaagttgctaccattacttctttcacacaaaagttaatagagactcaatataattttgaaggactttttgagaaattgaagaaatatttacagggtttcaactatctgccttctagtaatgcattttcatccaatatctaatatgtaatttataaaacttttgataatattgtatgaatattatcacattatatgaatatttgtgtttgaacttttaatatgttgggttgattctctaattttgtctagttgtatttgagaatttagctaacataataaaatgttcttacactttgtaaaatttacaaatttagacaaccatatcatgtaatgaacattttaaaagaaattgatgctatattaaatttacaaatatttgtatggaaataattagatttataaatattagtgttgaaataacaagtatctgaattgattttaaaatatatattatattatataaatatatattatttttataaaaatacttttataggtgctttgaatgcttctacaaaagtattaacaatttttttgtgtgggtgaattaaaagtgcttgcaaaaatatttttaagaagataaaatttatttctcaatattttttctaggcgctattgttgcgcctacaaaaaggtattttctttccgtacgctcttgggagttgcgcttgcatgactttttgtaatagcgcaattgtggacgctagagggcgctcaaaaatttgtctgtgatacttttgcaggcgatgtatgggacttttgtaggcactaaattgtgcctgtgaaagtgttaatccttatagtgagacaaaacactgcaaaatagattttattatggttgactttagataaaataccgcaaaataaattttatgattgacttttctttatcgattattatttggtcatgatctttcacaaacctcaatcttggatgagctgcttttcttagtaaaaaaagcatttacacgtgcttgtacaaaattatatatgtctttttctttcgttgttccttctctttgatactattttatcttttttttttctttatttaggtataaatacgcaactaaaagataaacttaagtattatcaccgtgaattactttttaaattattaatttatctattttgtttctaaatgttttaatgatttttaatgtgtaaattaaaaacaaaaaataaaagttttattattattatnnnnnnnnnnnnnnnnnnnnnnnnnnttattattattattattatcaattgtttatgaagattacttattgtgttagggaaaaataaaaaaaaaattaagaaacacgtcaagattattgactaagaagttgttcaatgatgtacaaatgatcatttctctaagttgccaacttattaagataaaattgtttcaatttgtaaattttctaagggcaaaatttatgtaaatttattatattagtttttttccacaatattggtgattatttgtagagagagggtgtgatttttattttttttacttgtactgtataattacgtaatttattataagtttgtcatcataataaatgtcatgtttttatataaagtgcaaagtgatagagcaatagttataagtatcgttagaaccactcatgatgtacaaggataagaagttaattagaatcactcttaatgtggttgaggcatgtattgaatttctattacacttcttgatacaacaaacattaggaacactaatgatgtaatagagaagattggtaagcctttttttttttgcattttctaaaattattgtgttcttatattgattctgaagaggtctgttcatttatttttttttctttctcctcacattcctttattagttttatggtactaaattaggtacgcaatgaaagatttgtatatctgattatcaatgtaccatagctccaatggatctccagaggtataaatattaaatcaaaacataaattacatgaaaggaatgtttacctcttgattactattaagttatcctcgaaacttctcgtaaattgaatccttttgggttgattagaaactcacactgtagtcttccaaatggatccaccacgtataaggagtagtgtggcatactaggataaagtgtataagtgttcttaattaattctcaacacgtgagcaagaacatttgagagaaaaaaaaatagttttccttttctccaagtgaatttcaaaaatccaatgtgaaaagcttcttctgatttataaaatcaggcttctatttatagtagttaatttctcattaattaaatcatatttaattatttaaacaaatatctataaccgaattcagttactgatattttagatgagggaatctctcaactaactttgaggaaatatctcaactaacttgaaatatctttaaccacttttcaaattcaaatatttatctatttgaattaatcaaataattaattaacccaaaatgataaacctaatagggacaccctactatagggtaggcgcctaccttgtcacaattaagacaaggatagtattttttgtcctgataacttttgtgacaagaattcttgtcgtgacaaattttgtcttcataacttttgtctttttcctatttaattaatttgaaaaaatatttatttaatataaaactaaataacttctatttttctaattcaaaatcgatttttctgaataacagtatacaattctttatccctacccttaatagtgttttaaggtaccaattccgggaccatggacctataattctatgctacgataaactagattatttagtgagttttatcaaccaaataatcctgtttattaattccatgattactccactataaatataaaattgaactcttagtaattatagaattatatttagtga

SEQ ID NO: 110891 - DNA, 2877 bp, Cannabis sativa
  modified_base (54)..(61): a, c, t, g, unknown or other
  modified_base (1345)..(1347): a, c, t, g, unknown or other
  modified_base (1397)..(1404): a, c, t, g, unknown or other
  modified_base (2846)..(2848): a, c, t, g, unknown or other
aatatttaaaaaaagaggtaaaaatgataaattttaaaaaagaaggtaaaaatnnnnnnnnacaatataaaaagggtatagaatataatttcctctatttttcctctattaataaagaccaattctagctatgggccttttggatgtatagttgggatactatatctttgtaaaaaaaatacatttctaaaactatataaaaataacatctaaataacatcaaaataatataaaaaaataacatataaacaataaaaaattaacaacaaattaacaagagtacaacataaaaaatcatattttctttaaataaaattaaaaaaatataaaaaatattaaaattccgcagaaccgtatttttgttgtttttgtgtatttgtgaaataataacctataatccctatatagttagtgagtaatttgggataaattgaaaactacctatttttattacacattagctaaatataacttcaaaataattttaattgataaatactctcttttataatcaaagtactaaatataacctcatataacttatcaaaattagagttatcaatgcacataatagggatatgacctataaaattgggtataaattaaagaatagtaaaataaaagtaaaaattaaaataaaaaaataaaaatgtgggtatagagtgtaattttcttgagtaatttctcaaagttgggttaataagctggcagtatgggttttgaaaagataaggggcgttttcaaaaatacccttgttatatgttttatttataattttatgacctaaattttttatttataaaaatatatttttaaagttttaaaattgtaaaaaatacacgtttctcggcaaaaagtaagaaaactactaaaaaataacgagaaattaacatcacgataactataaataaactataaaataacctcaagacaaccatactacaactataaataaactgtaaaaaaatggtttattgctgtactgaagaggtatttttataaataaaaaactgttcgtgttgaagtattttcaaatttttggtctattatgtaaaatttttaagataatatactcgaatctatagctgtaaatacatgagtgtcgtgtcggtccgggtcatatttacgtacacatatcattagttatacagtagaatttctatctaagaatactatatttaataatattataaaaaagttaagttccaatttaagtcatttataaataagaataacttttaaattgtaataattatatattttctaagtcatgtattaaaaaaatatatctccatataagaataatttatcttaataaaatatatatagtttataaatttatttnnntaaaattaataattttattccaaagtgtaatatatgtataaatattatannnnnnnnaaaataattttattatgatataatattaattaaggattatttattgttattttgatatttttggtattttaatattattttatataatgtaatcctatttaattataactttttaattaaaatataatttgtttggtctgaagtcaatttttaaataggaattctactgtagaaggtgttatagttagttagatgcattaattcaaacctccttaaagacattttgtttttatcaacaagtggaagacttttttgtttgttattttcctttggacataaatattatctacttattatttgaaaaaataattttggttttggtatgtattggtaatagttatttaaatagttttatactttttaattgaagacacataaaaacgtagacaatgagaaattgaactttggatcgatatatattttgatgttgattattaggcaggttgcccaaatgatagaaagtagtctttgagtgcatggttattatgtgtatatttatttggtgaaacatttgtgtcttggtcctctatgtagttaagatcaaagaccgagtcagaatatagctcaagcttcaattaaaataattttgctttaaagttttcctattaatatatatatatatctggtgtaataatatgagtggtagtgctcttcaacctcaaatatcctattcatcatgccacaaaccaacatattaaattagatatatatatttacttcattaagtagcttagctagcagattgacaaggtcggagtaacagctttccctctttgggttgaggggtgatgttaattaagaaacaattattagcaccttataaatatattaatcctcttctatttatatacagttattctaacagtactcgttttaatgttttgcgtaacaataatattatatatatatgtggacacttagtccttttattcttttggtaatatcactctctttaattatatatctataaaagctactgactgactggtcccccagcctctaattgaggaaccttttcttgactgtccatttatatatatatatatatatatatatatggtgagtaatgtcttttatatggagccacactaactaactatgtgtctccaaaaaatgatagtgtgtcatgtgtattaatataatttcaatatcaaattttatatattttaatttaatgaatcatattagaaaccattaactaattataagatatcggatgcatatagtattagaggtatccattataaagaatcttacttttagtcacaacaaaaattgtgattaattataaatcatgattcctatgttgtgattaaaaagtccgtggctaaaccaaaattacaatttgttgtgactaaatatatttttaatcacaacatttgttgtaactaaaactaaatactatgttttagtcaccagtaacattttgttgtgactaaaannnacatttagtcacaaaaaaattatactgtg

SEQ ID NO: 110892 - DNA, 12099 bp, Cannabis sativa
  modified_base (11787)..(11804): a, c, t, g, unknown or other
ggcttcgaagagcaaagagagaaccggtcgaaggagacagaggggaaggaaggtggttaggagaaggagaagcaagaatggtcgaggtgtcatggtctccggagctatgttaatcgaagtcgaaaccgttcttcagactcaggtaattcatcttcctttttcgtttgttttccgagaaaatgagagaattttggaatgtttcttggaattggtcttaaatggtttttgtaaatttgaatacttttttggtgggtatttgtaaatttagtatttttgcttttatatctatacagttcaggagagttgtatctggttttataatggtgattcaagttcttttggtttatatttgatagttcatatgcataaaaagagtacattacgttgttcaatttgaatctgaattatgttgtgggaggattgaaagcttaaatgtagtcaacaattttcttcaacatattctctctaatgtctattagaacatgttgcttaaattacagtaaacatgtggatgctagtgttaatcgaatgacaaggaacacaattttcatcttaggaacctgtaataaaaccgatgtggaatactttcactagtagtgttagcgggatatggaagggagttggagcagtattttcacccatcactgcagagatggagccagttgagattgggagtaagaatgaaaacttgttcgatttctacacgacttctcgaatcgaggccattccatcctcatccttagggaagacatctcagattcagaggaagataaattgggtgactctaaatccttatggggaggtacttgagcatagtggtgatagtgatggagctagagaaggcaaggagggtggtgaagatgtatctgtttccatagggacaatgacaaaatctggtaaatatggagttcttccaaaatttgggtcttatgactttgagaaatgtgatgtgatggaagaagacattatgggaaatgaacctggacttgtttattttgaggtataatattccaccttgtctctctttactaaatttaagactttgttgttctgtgtaatttataagtatttattggttggtttgaactgattctaaagcagataaagcattgtttattctatacttctacaacaacttagaattgatttatttatcccttgtgtttcccttccaggatcttcattactactttaccagattacagttctattttcttgtttgtcttagccactcattttatgcttcataatttacaggatggatcttattcaaggggtcctgttgatatcccagttgctgatgtggatgactcaaactattacctttcaccaactttcaagtttgaacaagtaagttttcacgtaggttgtggcactcaaactattttgaagagactatattaagctatattgatgtaggttgtggcactcaaactattctttccccacatcattcaattttcaatgaatatcaagcttgtattttctccatgtctatgtttttttagtttgtttattgcgcaatcttgcgctcaattaacgaaaccactttccgggtgatattttaatgtgccaatgcttaagtcaagttattttacttttctcatttaaatctgatgattattattgatttggtttctgattttttatcgtttagtgcttggtgaaaggttgccacaagagactacggattgttcatactatagaattcagcaatggtggctcagacatacaaatattgagagttgctgtttatgaagaagagtggattagtcctgccaatactcatgacaaaaggtacccttcaatttcgattccattggctctgaggtttgcctataactatgctgtgtaattcattattatcataactccacaccaaagcagttgaaacacctttatatcaaccactttttaggaaattaactggttctaccatgagccagagggatcgatatttactgtacaattttgatccaggccattgtaacctgtcaaaacgaaggaaatgcaagaactcaattgtggccattagttggctggctcagacacttatgtcagcaacaacgattaatcacaataagtgatgattattacgaaaaaaagaaaagagtaatgagaaatagttggtaaaccgagcaatctcgaatactcttggggtccatccatcatcttagcttgaaggcctagaacctcaatctaccaaatatttctcatcgtcacttattgttctggcttgattattgaactttgttacagacagtgacttagcgttagagtttcttgctcccattcaagctcttatatttcctttgttttgacaagttactagcagcccaaatttttaattgtaggaagagcttacatttatgaaatatctttagccttaacttaaggtgatctttgctatgatatatgcatatacacttgcccttcagttggtttacactgcttagaagcctttagcagcctagaacttgattcttagggaaaacttctgtaatatcatattctttaaaaagatattttctggatactgatattttctttttatccataaacagtgatatggatttcaatgcagtaccattctctcagcgcaaacgaactcagccatcacatctaacggggtcctggaaggtgtttgaggtcaatgctactccagtgttcggtgaggagtcagtcatagaggaaaccaacggctccccatacgtctatctttgcacagagacactaaagaagcggagcttgccagagagtgctatccattttggagaggaagagatactagacatgcaggatgtgagcatgctttggctaccgggtggtgtcactgcgtatgtagacgtaaacaaggatggcactctttgcattggagttgggtggtactcagatgaaggaatcaacctggttatggaaagggattatggtgtagatggaaagctaaaggaggttcggtgtaaatcagaactgaagaggaggtggtctgatccactccctgtatgattttttttcttttcttttgcttgttgaattgaaaaactgcttttaagtattgtaagttatatggtgttgtggtagagagcatacacaaatgttcaaggtttgaattctgtatataagagaattctgcagaatacaaaaattaacctcagtgactgatagggtcattattagatatcagattagtcagatttagatcatgtttaaccacagtttgtaactatgttaaaatttaaaataatggtaaaattcaaggagttcataaaatagtcaatccaatccaatttataaagcgtggatatccgtatttgtttagattggattgaaaaatttaaaatctgtacagattggatctgattgatatataagtaaatgatgcaattcaattcacatatttatataaatgtttaaaaatgtaaaaaataataatttaaaattttaatatatataatataaatatattttaaaacttaatagatcaaatgtatattttgatttcgtgctttattcgaaccaacccgttttttataaatgggccaatctatttttttatatgggttagaatgtatgctccacttttttattaattatttttacaattaatgagttaatcactaaattatatatatttttcagtgggttgtgtcatgctaatattttaaagggtaagttcgacagggcttgtaagctcatattttgatatcgtgatcggactcgtgtcgtgttttatttgggtcaatttttttataaatgggtcagttcattttcttacacgagtttgagttcaccctccacttttcaactatttatttataattaatgaattaataaattaattactaaattatatatattttttatagttgcaattgttttatataatttttctaataaactttacacataatcataaaaaattaattagaattattaaaatttgaatatttattaataaatacacatccattataattattatcaaattatatgaatttttaacatgttgcaatattagactagtttattcgtgtttacgtgttgtacctttgagattgtcgtgtcgtatcatgtttaactttatttgttcatattgtgtcgtgctaatttataacattgtgtcgtgctaatttataacattatgtcgtatcatgtcgtactaatttgtaatattgtgtcgtatcttgtctaagcccatattttttcgtgtcgtgcttatatcttccaaagtcaagccatatcaaaaaatctgactagtatttacatcactagtttcaaatacacacatatcattggtttaaaatagcacatttgatttccaggtcctttctatagaatacataatgtcatttgttgggaaatggttgagagaacatattactaatcagtaacggtcttcttttctcactcaacaagcaacattctatttctatgcgcctctcaacttagctgctgagcagttttcgcaaactgccaactaatccaaaataagagcctgaaataccaagatttaaattttgtaatatatactcctaagaaagccactacagtaaaatttctatttaaaaataatttttaatttattatgaaaaaaattaagtctcaattcaaactaattataaataaaaataatctctaaattttaataacaagataataatatctcaacaaaaaatatatgagtagtttataaatttttatttatgtagaattaacaattttattttcaattataatgcatgtataaatattatacttatttgagagtaattttattatgatataatattaaaagaaatttgcgattaaagtccctaaaaatatcgctttgatgcagattagttcccaacctctagaaataacagtgatagtctccaagatcatatttttttgtaagtccgtcaatacctaatttaacagctctattaagtgctaagaagaataccatatgtcaaagattttttagtccacatcataattttaattgaaaataaataaaaataaaaatataaatataaattattaaaaaaaattaattattttttcttcttcattttcttattcttcttgctgcccaggaaccagtggaccaccacccacgtcccacgatccaaaaaatgaaccagccacaccccaactctgacgacagacaactatgcttcggccaccctcgctccaaatggaccaatactcaattttccccatgcccgagaacacgaaaacctcaaattcttttcaccgccatatatatatctaagaagcattagtcaccagttggagacttactccattttccccatgcccgacacaaggtcacaccaccatcccatcagagacttacttgcgatcaacacactagttaccagttgttggttgagtctctagatggaatcaaagaaatcagagagaaatatgagctccacaaggccgcatatcaccaaagggttgcacagtacttgaactccaaggtgcgcggtaaaaaattcaagctttgaaatatggtactaagatgagtatttccggctactaaggacgcatcagttggagtactcaacccatcttgggaagggccatatgtcatctaagaagcattagaaccctaaacttacaagttaacccactatgactgccacttaaatccaatgttggcaccaaggtattggaactgtaatgttcccgcttcaagcctccgttgggccctacactcacgaaatgatgactcttatacacgagtatgtcactctcgctgcttcacggattgacgactggccctatagaccaacacaagtgtttctaacatgctttatcttcactcacacactttctggaaaaacttgacataggtagtaccaattaatccatttaagccctcttcaactaagtagtctcatacctacacaatctcagaatcatcacacatgaccttccctaggaaatgtgggattttacaattcccggtctttccccttcagattataaggctctgactgtcacaatcatcacccctttgggggtttgacgtcctcgtcgaccacactttcagctgggtcaaggctttgataccatttgtaatgtcccctcttcaagcctctattgggcccttacacccacggaatgatggctctcatacacgagtatgtcactcaggctgcttcatggactgacgactgaccctacagactaacatgagtgttttcaacgtgttttgtcctcactcacacgcttcctgggaaaatttcccatgaggtcacccatcctaaaattaccccaagtgaagcacgcttaaccatgaagttctttcatgatgggctagcagataacaagatgcaccttgttgacataggtaataccaatcaatccatttaagtcctcttcaactatgtaatatgatacttacacagtctcagaatcatcacacatgaccttccctaagcgataaggattgtacagctctcggtctttctccttcggatcacggggctctaactatcacgagaacggagagcatctgcgatgttattaacaaaaagcatcttatgcactagacaattttcttcactgtttactaaacagtaaaatcactttgcccttggcaaggggatcaatcgactcttaaaccaaatagatgatgcataatcattttgtgacactctccctttagattaagaaatccatgaccaagtcatggacccaacactactagtcgaacatggcatcaaggtagtggggattgaattagtattctttaaataaaattgtaaatacgctaatgatatttatttttcactattggaattagctaaagatgtgccaccccctcaaccaatgtaattgtatttaaaatatgatgaataaaattacttggtaaaacttattggtacttcatttttattaatcaattatagttcacagaccattcgaaatcgacaaacgtgaaaagccagtctgatatcttgaggtagttttggttatctctttagtgagtaaacactgccaagccacgaatctttaaattagtggatgaatgctcaatatgtggcaaccccctaaggctcgtgatcaaagaaaagctcatgagatttggtatggcatgtgaccaatgaaggaaattctttcatcacttgggggcatatccaccgaagtatgttaacatgagcataaaaaaaattagcacattagtactagtattgtggcacttttattgtttacacgaatgtttacattaccattattaatcgagtttcttaaaatataaagtactttgcaagtgttagacatcatgtagtaacagataacataaaaaccaaaaaaattgaataaagtctaattaaattggattgaattttgataaagtttttataaaatactatccacactataaaggtcgcctgtgatgaccaactaacacactaaactaaatactaaggaaagaacaatgaactaaaaaaaatgtctagagaagctaacaaacatctgtctgctatggcttcaatggtgggttcattttgtcctattacatttgaaggcaagacatctgatggagcaaaaataactaaaactcgacactaggggttgtaaccttcgacctagagagcatcctcatccgtaagagtgaggtttatatcatggatcaactcctcatccgtgagctgctcatacttctccctcaaaagcttggcatggatagttgggaagcctagccagttgaaactggaggtacctccattggctgaccaagaaagatatatgacctcaaagaaatagttatcataagtaactgtgtttgctattgctttctccacaaggcttatgatctggccctacaaacaaccaaccttgttccatcttggtaacagtgaggttcctctcatcaagaaaactatggagagatgcttccacctcggaagtcttcttccttaaagccttaagctccttcttatggctatcctccttgtcctttgcgccattttcaattccctagaggttagagacgtcggtctcaagctcgtcaatagctttctctagctcagctaccttctattctacctcggtaaccctttcttcagcagatgatagctgctctacaagctggactactttcttatgtttgtttcccatgacataagtaaagtccatgcaagcctacaagtgacaaagcaaagttagtaaacttttgaaggtatagaagaaaggtgacaaaaagaagacaacttaccctgaaaatatcactgaagcctttttgagcaatgtcgtgacggggtttggtggacaccaactttcctaaaggcttgctctctgccttataagaaattagagcttccccaagtgccaacaacaaagtgcccaatgcacataggtcatccacaacccccgagtcacccgaagcttaggcacttgacccagcattgtccacctctttcagagaggccacaacgggagaagcatgagggtcttcatcaattacaacaaccttctctttcccttttgtgttaatcccgagatggtccagaagtttcagccgctttgaccttacttctcttcttggactttcttcaaaggagctgaagaagcaacaagaatggcatgcatgacctcatgaataatcgattgactagacttagctgcaggcttcttcttctaggtacatctagccgtagcctcgaggaaacttattgtcactacaaaagaaagaaaaacaagtggttagtacgtaaaaataatacaaaaatcaaaataagtaaacatcaggctaatgtttactttaataagtggtgcatcactaacctgctgattcaccaacttcttcaggcacttaagcctcggggtgacttgaaagcttagtctcactctgtcttcactactatgactgagagacatagatattctccttgaatagtgtaggtcatcattagaagaattattctcttctgacatctcttcggagccaaaaatagtgccactcttcccactctcatcatcatcaaggggcatgggccaagagtcatttgtgaaggtgtcatcgatgtaaactgcccccaggacgaagtgtgattttttccacaaataacccaaaaaatgatccaaaaaatgcgattcgatctcgaaaattaacgatcatcatctgaagtcataattgagaatctcaaccaatctcaatctatggtcaagatcaatctagatgtaatatttgtaatgttgtattattattttaatagacattcttgcctatgaaaggaaagatctacaagctcatttaacacattcatctaggtccccgtaaggtcaaagcttgtctcatgacacattcaatctctctagaaactgagatctctctttagctaattttccttgtaattctcgtgagaaataaaaactcgaagtagacatagctccattatcgtcacgacacggggagtgaactactataaagttctggtgtccttcttttattttacttaactcattactcatctcaccattctagtcagacggtgttggccagatctatgcatcaacaaaagtaatatgattctctttaaataaaactcatagaattagtggaatctctcaatcttacatttttttatatgtcattaaattctaagtttgattctaaattacctctctcaagtgtgaaatctaaaatctcaatactaattaatggtgatcaatcattaacaatataataattaacacaaaattgcacaaacaaataataagaacatatacgagaataatctaaaatagttccataaatactctagaaaagagtgtttaattcaaaatgacaaacataatcagaataataatcatgttcataattaaataattaaacaaaaaataaagaagaagaagaagaagaagaaaatgactctaatggttaatgatgatgattgcttggaatctcttgctcttgctcttcaataagttttctgatctaaaagtttctttctgtctctctctttcaatccagaagtcaaaatatacaattctatttatctaccgaaaaagatagaaaatataacgttttaaaattagggtttaaatttagaatgtacgacaggcgacacgtcacctgaattatttttccgttcgattcaacttttgttaacgtgccaaaaggcatccttataagttggatgacatgtcacctaacactcaggagacatgtcgcttggcacccagacaacatgttgcctgatacccagtagacatgttttctagaacagcaactcttgtttttggcttctttcaatcacattttgcttcccgactttgacatatatctttattatcatttttatgcaccaaattcatagtattattgcctttaaattcaaaactgcacaactataaaaacacatcaaatatatatatatatataaaattttagaaataaacactaatttatcaaataaatgaccatgaataggtgtacaaatgtgtattcatcagctagccactacaaaagtcactttttcttacattcttcgattgaataaataattaaaatcattgtaatgtactttttaaatcgagtccaatgaatataacatgaatatatttgaaatctgaagttctgaagccttaattacgatcggtggtagtagaaattggtgtactagaaatattttcaaaaataggagtggtacatatcaaaatgatcacatcaatgagtagatcatgcccatatcaaccatttataaaaatggtacatggtatttccagaaagttatcgtaaagaggcggagcttcaaaaatatcactaaaaaaagtagcaaacttggcaaaatggattagtaggggttgttttcctcaatgagctaagtttagcagtgaaaatggatagtcaaacagacatgggagctaaccaaaaaatgcattcaaattttgaatctcaaaactttgacccgtaatcttggactaacgacggcaaatgaggtgataccgcttgagaagtatggtcagtagtaggcagatagtacaatgatgctgcttgaggggtatggtcaccagctatcagaaagtacaatggcttggcacatagggttagatagtgatcggaaagtggtcaccagagcttggacagtggtggtggtgtgggttcttgatgaaagagaaagaaagaaagaaagagaggggagagagaggaggaaaaaaagaagagagtttgattaattaaaattgagagtccaacccactttatgtaatatgtaatattttttgttctcttattttcttttttcttggttcttcacgtgtcatgtcgagtcatgcttaatcttatattttttttgttatgtcatgccaatttccaatatagtgttatgacgtgtttaaactcatattttttgatgtcggatcatgcttgtgtctctcaaaatcgtgttggtatcgtattgtgtcaaaaatgaacttgtatttataatacatcatagcactactttttaaatattaggtctcaatttaaataaatacaattaatttagaaactatttgcagtgcatatattaatttaagtgtagatttaattactctttagtcaataccattttcaatgagagatgtataaattgtgctatattgatataagaaatgactttgtatatttgcattaatgtttagtattgtgctccaatgcacaattacaaaactttgtacaaaatttaatgtttaattaatattttaattaaaaatttaaaataataagtttattattaattttagagtaatttgcgacataaatacctaagtttaatttttggttacaaataaatacctaagttnnnnnnnnnnnnnnnnnnatacttaagttatatttttgaaaatttgtaagtacttgaccgttaaatattaagtcattatctaggtgtcattttcttattcgtatatttaaactaatttttttttaaaaaataaaaagttaacaatttggaccaatcaggaattaccatgtggtaatttacttaacacttaacaactatgtacctacagaggtttcagaattataacataggtattattaccgccaaaaattaaacttagatatttaattacaactgggagttaaacttaagtatttatagatcggaagagcgg

SEQ ID NO: 110893 - DNA, 5669 bp, Cannabis sativa
tcagctatcccattacagaaaataaagggttctattaggtgacaatgttaaaggggaataaatccattaaggacacaaacacaaaggaggaaaaaagacaaggcaaggtgttgaaatgtaatgttttcatcaatatatgacttctacgtgttctttctcttgttcttacctgtaattgaaaaataaaaataaaaatcaatcaattactaaaaagatcaatacaaaaacaagattttcataataattccattttaattgtaatttgccaatttccaagaaaataaaaataaaatgagaaaccaaatagacacaatgagatatggaatcgtaatgtaccttttctgcaaaaatataattggaagagaagaaaggagtaaatatgtaatgcccaatggaaaaagtctagatcacaaagatgatatacaaatattaggttgtttggtgaaatatagaaaaattgtttttttttctttctttcttttgttttaaataatgaaagtattggtaattttgattgcttctaaaatttcacattgagggaatcaatgatcaattgacattagcacaacaatatatttaagacttgcattaacaaatttccaatgtaatacttaaaataggttacattgacgaaatctcaagtaaagaatacataggagatttggaaattcaacataaccaatcacaaaacaaccaaaacgacacataactcaaccccaacaaaactaaaactacttagtgaaaatagacacaaaacgacagcaacctatttatagctttatatactcaatcatactcattactcaacagtcaatagtttgttgcatttccaaacacgaaatattgaactttcatttcctccctatgaaacactctttaatcccatctcaattgaaacaatgaattggatttttgaagtcttaaccaacttcagaaaccacctttgggaaattcaaacattacaaaatctggggcttctttagcactcgactggagcaccccaaatattcaaaactcaccatagtaggaggccccaaacccaagaagcagatagtttgtttagccatgaagttgttaaagctctatgaaattgattcacctttctgcttataggaacttacattggacttggtgtaatttgacaatttgattgagacaatatcaacgcaataatataagatttctaaaaataaaaaccaattatactcaaaataggttccattaacataatcttaatatagaaactttcaaccacaaaaacacaaccaaaacaatacttaactaaaacccaagagcttctgtatgtagctaaagcaaacccaagagcttgtgaccgatcaggaaataatgataaacaccatagataacttgtttcatctcctccttagaaaatgcaataacatgttggctcagaacaagggacgtatttggtttaacatcacaaccaacttcagcacccaacttttccaattcaaaacaattaaaaaggtgggacttcttcagcactcgagctgccaaatgctccaaacccacctcagtcttgcatttaattcctctatctcctactataatagtatttgtattagcagagcccgttaatcccacgaagcagatagattcgtcatccataaagttgagaaagctttctggagtcttcctataatataatatacggaaatcaatcatcaggcattgactccctgaacagagtagcaaccattctcctgtactaccacgtgttcttttgggtccaatgtcaatgcccacaagacgtctctgtgtgcctatgtagtttctaaactcggctatcttctcattaagtaaaccagcgtggtctatcaagttcaccttcaccgtaactccaccaaattgaatttggtagcaacctatttttgaaaggagagccgttggtatcattttggataattttctcttaatttggttgatcaagtccacatacaatacactctatttatatgcatatatgcgatttggttaataagtaaatattcataaatttacaatcaatagaaacgttatgtgatcactactgtcctttgggatattttgattattatgaatttatgatcatgaatgatgacacgatatgaaacgataggtcatctcggctcggctctgctgttattttattaggaataaacaaacagttataagtaaaataattaagtcacagccgatatcgtatcaaaccatcccatttcttacttctttcctttgtgtttagaatcatgtgtttccatctcaaaaccaattggtaatgagtggagtagcccatgttcttatatatggctaaatacttttacatttaatccatgtgggacaatattttccaataccttattatgtcgtttctcttttgacattggtattaattactacttgttaacataaatttttattaattaataataataataaatgataagaggatatttaacgtagatttttgttagattaataatccccacgttttatatttacatcacatagaataatgacaaataacttttcataactattcttttaactttatctataaccagttatgctgactatgctccatccttctcgcaataaaaattctccttaagatgctttatcatagttcagcgcttaagtatacgtcaagtagtatttctcgcattcttctattagtattgagtgaggcatacgcgagacgcttatcaccatatgacaattgtgaggtgaaccattttttagtctttcaacatactcatgaatatgtgggtcaatgacctgcgagctctttcgataattcattatctaccatttccaaatatttttactgttgtgtattctatgtatcccaagatggattttttttttgttcgtctcgctgatctcattagtcagtagttattattcatgggtcgacattatcttaaagagggtgagtttgaatatttctatcaactatacttctcgaggcgagttgtctgagtatttattattgcattatccgggttagttcatattccagcttcattacacgtgtcagcaccatattgctgatcgaaataaaaaatgacttcttaattacttaaagggtacaatcgtatttttccatttaaaattgcacgctttattttagtagttcaaaactttgaagcacacatcatttcagcatttattacattgactcccatttttccaatagttgtaatctgtctgatcaactatcattgtgatagaatggttttcattatttgggtataaagtctgaaattcctcttattttgtcattacaatttcacgaagttctcagaattcaaaaaacttcaaaccaatttgctccttaaaattgcatgccctcataatcccttacatattttctccgagtatcaagtgatttcgcttctcaaacccagaatcgatgacgttcaggttctttgcaccaaaaatcttcaaaaattcttcgggacttaactccttacattgaactagtaagtgacgtttcttcatttatcttctgatttcttcttgtttttcttcccatacattttcccttttgtcacttatttcttgagagggatttacatgaactttttaataatctagggctagaaattttaaggttatgtaattcgtaggttttggatttcaactgtgctctgtttttccaagaactttttggggcattatactttgtgacaataccatttcccattctgatccagaatttgcacaattaggccccttagaatcagactatcctcatttctaagttgtagtttttaaacctcaaactcataaaccttttaagccactaaggctagcttagtggtgagggagggatgggaaaagggagaggtcatgggttcgaacccaagacctttaagttataagctattagttgattgtaagaataccattacgctacactaaaaaaaaaaaaaactcataaaccctaaacgatacttgaaataactgatgaaaaaattaggcaacacaccactaggagcaatcaagaagagatatccacttattatattttacatgtattggccccttattaaattttgggatggtatcgccattaggtgcatgggtgcacctatgccctcggacggacgttgtttctcaagttttctcttctcctcttattgatgggtgttttctctattttcgtctgttgtagacaactcgtcgatttgataggtgatggaggtgctcactctggtctcagagtgaactaagtcagggacgttgttcatggtggattccgattagctttgggatcttgtttgaaggggttgttagtttctttgttgtgggcgacaacactattgcgacttgggcctgatgctctattcttcaaggtggattggatgtggttgtgtcctttgaaggtttttgatcttccccgatcttggatagtaacgtttctaagggttctatgttggcactctgtggaggttgtaatcattggggggaggtcgtaggcatgcccttctttagttggggggcattacaccccaatgttgtatcgtctcctttctagatagttctctcttagttaagtgatatgttctcggtcttattgtttagaaggttctggtctttttagtgttggtcaagaataggagttgtttgttttctttcagtttttttgtgtaataatagtgtttatcatcctatcctttgtgatgctgattttgttaccattttgtgaggtctcccctgtgtgtctgctttgttgtgttagacgtttgtcaatgtggggtgctattgttttattatttcattgtgagatttgtgcggtcttaatttttttcctaatttgtacagcttggtccccgttccgctaaatgtatgggtgacaaaatgagtttcgacacaacacacgaacacgacacgacacgacacgaattttatgggttagggtcgagaaaattagacgcgaatcgaagaacgagttgacacaacttgacatgaaataaaaacgggtcaaacatgacacaacccgcttaacatgaatttaacatgtttgacatgatttttttaaatataataaaataaaaattattaataatgatataattatataaaaatatatatttagtgattcataagttaaaaatttaaatttaactttttctaatataaaattaaaaatattttaaattttttaatttttattatatatgtaacaaattatatgtacataaatgtatataagttttctaatggaacctaaatttattatttttctctataatgccagcttcaataatagcaaaacgggtcacaatgggtcgacaagaacacaccacaatttttcacaggtcgagttagggttgagaaaattaaacacgagtcaaaaatggatcaacacgcctgacacgaaatataacagttggtcacataaaatatgacacgaacacgacacgatgacacgttttgccactcctagctaaatgttaatcatctttaaaaaaaatcaattaagaaaggataatgtgtaacgcaaatacctaaatttaattttcaattataaataaatgcatacatttaatttttgatgataataatattaagttaagtgtcaagtaaatggtcaaatagtaatctctaattagtacaagtaattaaatttttatttttaatttaaaatttatttaaatata

SEQ ID NO: 110894 - DNA, 3227 bp, Cannabis sativa
tttttttttttaattttacaataattcacatgaaattatttaaatcgtaacctaaattgtaacctaaattgatgtgaatgtttttgatatctttaaaaaatatcattattaaagatgctctaataataaaaactttagtaattggttggcattataactaaaaaaaaaacttttttttaagaataagtaagaacatttgacaatgttttcaaacaacaaagttacaataataatgataatcataacactaaaaaattgaaagaaaaaagaaaaacaaatgtttcatgtcaatattttttcttcttctactttctcacacatcatatatatttatttggggcagggttccactttgggtttcagtattattgggtcatggtcggggtttgggtcttgggtcatgctcaaggttagggtctagtctcaggtcaagatctacaatcggctttgaggtccaactcgagctcatggtcggggctgaggtcaaagtcgaggttcgaggttagggtgaggattggggtgggggttggtgttcagggtacgatcgcgagtcgaagcagtaatcccacaaggccattcttttgacccttttcattgaaaagcaaacactatcacctccacaaaacaccttgaacttactcgacttctgaaagcacctaaacatattcaatggcatccgatccgcttcgtcccactccaaattctccaaatccaatctcaaaatcaatatagtcgaacacgacgagttcaaagagaatcaagatttcaacccaccaaccataacgatttcttttccatttcccttctttttaagatatcaaacacgtcaccccactcgtgcctctcgagttgattccatgtttgcaagttcttcatttatgcaattgtgcacgagaaaagcttccattggctaatccacgttgaagctaattcagaaagtgtagactgagtaagaaaccagaatagggcttctaggtttcaacgacaaatttgaagagaagctcaaccattggtttgaacccgaaaagcaataaagcgcaacgagctcagacaacaccctgacttgacttgctgaatcaacaagaaccgaaccatgacactaccaagctgaacctagttgagggaagacgcgaaattgtcgagtcaaaaggtttcaaacgaaagcgacttgtcaaggcaacacgatcccatggtcttgttggaccacctacgatcatggacgattatctggcctggccattattgcacttggaaaatggaagagagggagcgagggaaagatggtgaggaggagagagggggtcgagttcttgggtttcaaaatcaaagaattgggtttcagggtcctctgggaccatcgacatcaacaatggctgattttcggtctttccatgtcgtcaagcaagagagcagagagagaggaagggagtgaagagagagaaaggaaaggttgaatttagggttccacaattagaagaagaagatatttttttttatcattgttttatttttttaaaattttaaaattattttcttataatatttaaacaataaatgttatgtgaaccattaaaaacgtaccatgcgtaaattttgtgcattgtggcatgttctacttggctcttaagaaagccttgtggacagaattgtaaagatcaaaacaaaatgtgagtttggtaggttttgccgtcaaaaatcgatttatgtggttaagtgtcacaaattgtatagttcaagtaattttgtcgctaatatccctatatagaaatgtgcattctataaactgatctacaacaaaaaatacatattttccatatctaattgtggcttcaccaacaaagagaacccatatccaacccactacctccatcgacaaagtgagtctcatgcgacgatgggtgcaagccactgcaagagagcaactaagaggggcgacgtacctgcagaaacagaagggagagagaacgagatggaaggatattggggttctgcaaagaagaacgaaagaaggagaagatgaatagaaggttccaaataataagaaagaaaaataaaagagaaaagggaagaaaaaaaaagatgacaaaaagttttgtaattttttactttttaatgattttgtaaaaacgttaaactattttaattttatttaaatattaaaaattaggtgggccaatcaaaccataataggtgtccacttgtcgacatatagacaatcttttttggcatttatcaacaattcactaatgggtaaatagcataatagaagtgagatttgaaggattttactactaaaaatcaatttgagaggttaagtgtcacaaatgatatagttaagttagttttgccataaataaattaaaaacaagataacattaagttataaaactaaattattttaagatgagtaatttgtggcataaatacttaagtttaattcacagttgcaaataaatacctaagtttaatttttgacagtaataatatctaagttacatttctggaactctgtaggtacctagcatgttaagttattatccacgtgtcatttttttattggtatatttaaattatttttttttaaaaagattaaaaatttaatgatgacttggacctatcaagaattgccacgtgacaatttacttaacacttaatatctaggcacttacaaaagtttcagaattataatttaggtattactatcgccaaaaattaaacttaaatatttatctgcaactgagagttaaacttaaatatttatgccgtaaattatttttttaaaattaaatttttttaataatagtcattatatatattatttaatttgtgaacaatatacataaattatatgtatataatttgtaaattatatatattatacttattacaggttattaaagtatatttatttaatgtggtatttattatgaattgttagagttgttattttaaaattaaaaaaaattacaaagaaagtaattactcaagattttagagatgctcttaaatttcaaaatttaaattacacgtgtgaatataactttttcaatttagtattggaatattggaaaataaaacgtggcaaagaggtatatctttcgaaaataataataataaaaagagtaatttgcagtaaaattccccaactatcaatttacttacaaaaaatcatctaacttcatattttggtggaaaaaccctccaaagtactgttccgtttacatttt

SEQ ID NO: 110895 - DNA, 1362 bp, Cannabis sativa
tcctcctcctccaccaccaccaccgccttcattcgctttaggacagcttctcgccatgtgaccgaattcaccacattgataacaaccgcctccgcctccaccgcttccaccaccgttattgccgcgatcgcaatccctagccatatgaccagtatcgccgcaattataacagcctcctccaccaccaccaccaccgttacgacgatctccacctctccaaccaccaccaaaaccaggaccaccacctccacggccacctctacgaccaccaccgccgaaactctccttcttgttaccctgcaaagacgatccatcaggaccggtcacatcaacggccttagttttcccatcttcagcgagaacaacttgaaactcaacagcttcgttctcagataagcttcggaaaccatcggatttgatcgaagattgatgaacgaacagatcttcgccaccgtcatcgggcttgatgaaaccgaaacccttcgaatcgttgaaccaacggaccgtaccagtagacctctcctccgccatagctcaaactcgatgatgatccctataggaataagagagatagtatcagtggaccaagtggctaatggcggtgtctgtgtgtatatatatgtgtatatatatatacaatatacacgaatgtataggagagagaatttgtgttgaataagctttttttatatacgagcgaaaccctaacacaaccctagactcttcaatctcgttctctaggccattttcttttatgggccttacggcccatttaaatgatttataccatttattatcacttttatttgaattatagcacttcttaagtaattcactactaaaccaaatattatacatttttatttggataataagataaaatactattttttttttttgtaaaaaattaaaatttttacgttcatagattctgttttataaatttatggtgttttataaaaaagtaagaaaaatatataaaagtaacaaaaaaataatatcaaaataacaacaaaaactaacatataaataacaataagtcaacaaaagtacaatataaaaatacatcaaaagaccgtattttttataaataaaattataaaaataattaaaattctgtacagtcgtatttttatattatttttttgttgttttgtgtaatggtgaaatactccttattttttttgctagtaaactaaaagaaatgaaacaaatatttaatggggagttgtatttgcaaggtccacaaaatgataagtatagtctaatattttaaaaagaaaaattaagtttaaaataatttttaaaagggtaaataccattttagatcctgtgttttgcaaaagttacagattggaccct

SEQ ID NO: 110896 - DNA, 4809 bp, Cannabis sativa
tcccaaccgtttaaaagtttaaatatattacaagttttattttcactccgtttaatttaaaagtttaaattctgcgctattttgattaataatcccgaattaggggatttggattccataagtattttgggtagcgtgcctaattatttagggtgttacactttctctcgttggaacattttatctcgatcaaaggttaaattttacttttcttggtccgaggttgtctttagttttctcgatgtgagatcaggcttacccaatctcgattttaggcggttctgcttttcgtccagttcaagtattgctctggattccttttggtccaatttatacttctaccgttaaaaggtcttttcggctatctcggttgatttatggttttagtctatctcaaacttgggctttctgagcctgccttgggatgtgttgtctcaggtttttctcgacagatttatatctaaactatttttaagcggtaggtccttgttttggcattttcctagttttattataattttgtcattttatttcttttgtctttttctgcttcttgggcttatatttttgtttaattctcacgggccactttagcgtatctaatttcttaggcctttccatatttagttcggctttagttattttatttttgtccctttttctccccatacactacttcccccagttccatttatgctcgtgcataatcaggagctgctccgaattatcattgcttgtatggtattgtgtcaattattattcattttaaaatcaaatttataagtttttttttgtaaaattgcagtttgtgtgatttgatcgtggcacatttataaatgttttttgttattcatgtatcgttaatttcttaacttctcttttaatttttcgacggcacactcctttacataagatctccaattttaaaaatctagtgcgtgctctctctgatgttcgtttcaacttctttactctgaatttccaaccttttgtgtaacaatggactcatttttgatgcgaccgtgtgcctcatgcacactttcgtctctcaaacaactcccaccgagtcatcctcgaaagtatccatgagtgcatccacgcatcgaggctctctagcactgatactcacactccataggttcaaattatgataaggaaaatcccaacatcgtcgctcacctagtcactcgtgacctaggtagcatgtatggcaagatgccagcacgtagccgatgtgccaacacttctaatcatgccccatttgatactctctgaacagtctgcttcatcgcccaagcactcccgtatgtccatggtctaatcctcaaggcaccgtgcctccacgcatgttggtaggtcctcgagacgagccaccaaactagaagcattcgttagacctctgtctctttccagcatggtgctttcgtctcatgcgtgtatataaaatagcccacgaatgactacctgtgtcatctcgtgtcaagactcatggacaaggcgcaccacaacatctcttggaggtttaagccacgtaggcaaatcttcctgatctcgactcctatgcttactcctagcttcatccaaatacaatgtctgcagttgtctcccccacttcattttttttcctaaatgtcctgctctgaccaagatctcgatcttgccttttaaataacctcactttggctaaatatcccacctgtcgtgatattcacattgcttctttaagtctctttagggattttgccacttgagcatctttagtccatattctttcttggatccttctaaagcctcttcccgactttggtgtttctattctcttttgtcccaagagttacccaagttctgtcccagaacatctactttgaaccatctcaaaaccaccttctacctcgttcgtgttgcaccgtactcagaaacgtgggtttgtgtaggtgcgggtatagacacggagggtctgcaaatagtcaaagtacattgggttccgggaacgagaattggtgatgtgaatctgagagcgagactatggctagcactgatgctagagcgacttcagaagattattggcaggtgtcttccaaattgataaatttcttgggccgttgacataagctcggacaatgtttttactcttttgctctgtttctcacaccccaacagggagtcgactgttgtaggtctccgggagtgtagcttttgtgaccttttgatgcaaggctctaagtctccatcgtcagaattggtgagggccacattctatttttccaacctttcgatgttactgcccatgaaatcccttccatggaacttaacagtcaaatggtcgtggaggtcactacctaatagccttgcctttccaaccttttcatacatagtatcatggtaccttctgaggtccatcatgaaatacctgtcatcataataatgttcccttgtgccattgtcctggttgacaaaatcactagggcggtcttcttagcccctgggttcaggtactttcgtacgttaccctttttgtgtggttgtgcctctatgaccagaagggcatccaggctcaaaagcactggtggccttctgcatctttaaagggcttaccggcttgattcatgtatgtccaaaaaggtatgggagttgtgggaactttgggattgcctacctttgcttttcctatgtccttcgcaggagcagaggcttcggcattggcagggccatctctattattcttaacaacgtattcgactaaaagatctttgcctaaaccccctatggctagatctccagtcctggtatgtaggcaagccatgatcttcttcattttttaagcaagttcctcttgactggtcaacctttgctgaatcccgaataactccttttgaagttctaactattttgggattgtgctcgtaatggtagtcgttctcctttttttttgttaggacaatgataatagcaacactcgtaatttagatctttcatcgctctcaatgaaagcacaaaaatatttaccgaaatttttggaaactgaataattagagcataagaaaaatataaaacaataaatatataatagacaaatagatttttacgtggttcgggcgttcataatccctagtccacgagtccattgtattagtcttgctgacgaatgtttaaatattacaagtatttacaatatgagctgtatttcacttgttcttctcgaagaagaagatcttatagaaattttgggcaaagattctctaagttaaaattgttcatcccttttgtacaagaaaagtacgggtatttataggtatagatacgggtaagggcattactcttttaccccttagggtttcttactcaacacgccttaagggtagatactacaacatgaggatccacccgtctatttggtaggtaaatattccatcgtatggtgcacggaggtagagtccagtactgtctgaatcaggggtacgtgtgttgcccaaaagtctctccttttagaaccaacctctagacaggccactgggcaaaggacgtatacagtggtgcgcatgtgttgtactatggcctggcacgaggaacaagatttgaccctgtgccaagaaaaagcatagccgtcacttcggtgatctgacaggcgcaaaaaactgacatccctaatactgcatggggagcaatatccattttaagtctttccactacctatatgaagagagccttctcgtgagactcttttgggtctggaagagacatctttcctttcacgtctaggagggggggctaggcgtaatgagtttctgcgtgcccttttattgtagaggatgcttctttcggtgaaacccttcaccaatagagcaatattagggagcttcaatcacttgaggattaatttgactttctccatttgaatccacgtgttttgccttataaaaatgtgaaaaacataatatatcactattttttattttacccaaacatatttatgtaatatagttctttcaaaaacaatgtcacgttggttttaataagaacattgttacgtcatatcttagtaaaatattaaattaatgtacaacataatattaatatactaaattaatatacttgtgatacagataataattataataagaaaaatattaaagggcgtgccaaacaatatcaggtataatatattattattgatgtcgggttttatatattttaatttaacatataatataatttataatgggccgattcgacatagtattgagcatcattacatatctaataccaattctcttatgatatatagaccaaccatatacggtggacatacagatataaatatagagaaatattgtaaaacggcacatacagtgaatatatactacttcagattcttacattaatactattgtattgaatctaacttattttattatagaaaatataaaagaagtcggcactaaccatgcaatatacatacacaaatatatataatataaatatatacatcacagttttgacagggacaaaacttcaccttaacagaaaccagagtaagctagtttggtgattgcgtacgagaggcttcaacttataacacgtcggcagtattactattcctcactcctcatcacatgcccacaagaaaaaaataaaaactttttttaataaataaactacaaaacgccttttcagactcatttagacggttaaataatatcaatataaatgtttgtaattttttttttctcaactttgacatatattaaatcgtgttttttgaattttttttgccgttaaaaattatccccgaactattgagattgttaa

SEQ ID NO: 110897 - DNA, 5389 bp, Cannabis sativa
taatgcaagtatggttaaaagtatttctcagagtccaaatagttgaaatagcatgactatcagactatgagtatgagtggacaatccaggatacagaataaattgactagctacagcaggccaaataaccctagttattttacatatccaaacatggtaactagtacaacaagcaatcctcttcacttctttataatcaagaaacagataataaacatttccataaatatggaacggaacataatgatacctctacaatatacaaatttagaaggaaatgatttaattatcatattactatggatgatgtccaaaccatgtgtaacacaaatttctttagtaataagtatcgatcaggttactaaccacaatctctcgtccagttccagttcctggttctgcattcaagttcatgtcaagattacatgttatgttaatacaactaaaaagaataggtaaaagaaaatatttgaagacacaaccaaaacttacctaattttgtttgttcaggagtcctctgccactgtatagtctttcgctgaagagctcgttccagtgctttgcgtttcttctcgatggtttctttttcaatgacatgctcaattaatgtatccccttctttcagcttctcttgagcaatggaccatacctcattaggtttgggcaagtccaaagttctaaattttgaagttagggcttcagcaacatcaacctttttcggtggaaactttggacggatagtgtgtatcctccttgctctccactgaggtatctctctacgaggaccgtcacttagaagtttccacttctttgaatcatcatcactcaaaagatctatccttccaccattaataacatgaacagaatctttactcacttcatctattggactttccttcaataacaatgactctgccagatttgccctctgtctccacatttttgaagcatcttcagatgtcttcagtgacctctgaagtgcttcacatcttcttagataggcattatctctggaatgtgtagtttctttggcagccttaatagcagccttgatgctttgtaactcagccttaaaagacttagtggcaaccttctttctttctgaggcatctttcctcattttctccatcaaggacatgatttcttcctctttctcgagagttcttttactgtttgattcctgaaattccagtaatgctttctcggcattgctagcacgagcctcagatgcatgtatctgtgtgtggacattttccaactccaatttcaacctatcaacctcacttcttaaaaccaataactgatattctaaatcagttacgaccctatttaactttatattttcagattggacgaaaacaatctcatcaacttgatctaggccatcagtaaatgcagacaccgcttttgctacgtgatcaccagctttctctgccacatcaagagccttctctatggcatctttagactgttccacaattgacaatatagtaccttcagtagcttcctgaatttgcttttctatctgataggctgcttcagcagcagaagtttcggcagctgaaactctaagttgagcatcttctagtatgtgagaagtagcctgctgaaaagcaacttctgcaaacttttctacttgtactgcaagttcaacagcatcttgttttgcaaggaccaacttagactccaacgagaacctctcctccactgattcctgcagcttctggtggaacaaagacttggctgcctcaagttctttaatagccagttccttatcatgcaatatggtagcaacatattcctgttgtttagccttagaacgggccaactcctctagcagttgatctctctctttttgaatggctttttgtcttgcttgggcatttgaaagagcttttctagtttctataagttcaacttcttctatccctaatgtttcacttctgtctgatgaaaaaacatccctcccatcgcccaagtcagtgatagtgtcactggaatcatcctgccatcaaaacaaaacagataactactcttttactcgcttgcctttctggaatatagaagacacataaatcatgtaagagcagttaaaataagccgtcttcttttccaactttgttattttcctcctagaaaatgaccctccaaaactctttcttcctctgggcacattgtttcattaacacttgacaattacgctaaaaccattttgaataatacttgatgattgcatcatggcatatagtgttacatttttcttctcatattggaatgaacataaattgaggtgagaagaatcataccatgcttgaaaaaattctacttcctgatttacaaacaatctgatatttgctagaaggtctgcaggaattagatttttatcatgatcaaaactcaaaactttaaatgacacaacataggcgtcattatagtcaaaagaaaatgggactaaacatctccaaaacaaatttccaacatgtcaataagaaaagaacaattgtatacgcactttttccttcttgaagcagttttataacaaacaagatgccgcccaatacgtgaacccgaaacacctctgcaatcagcacctggagaacctatgacatagcggggaagaatcccaaatgccatggaaggcaataaagtagcacccatttcttcctgttaaacaatcaccatcaaacaccccccaaaacaaacactctcactaaatcaaatatgactaagcaaataagtcaatataaataaattattaataagacccagattcttaaattcatcagatcaacataataaataaaagtaatacgactcagattgtgaaataactccaccagaaaatcccaaaacggatatgtaaatgtaggccataaaaaaaaagcagctgggtaataaagagcagatgaatttgtcaatgctcataaagtcacagtctacagagctagaagcttacttgaattatccaaaaccagcaattctcaatctgtactcgaaaacatgaatggaatgatcaacacaaacatctcaaatcaaaacacaaatgcgcctgtgaaattcgacaaagtagttgagtgaccacattcatgttgttccataaattacatatacaaagactaacaatagcaatagaaatctgacctgatcctatgattgaaagcactttgtagaaactgtgggtgtggtttaacctttatttggtttttttggggtgagtgaaatcgcaactcgtaatgggtaacgtacaaatcacaggaatgggagctgtagtggcggggagactcaggtggaggccttttaaaagggcatttgagtttgactagaaaaacaaacaaaaaaataatggtaccttttgagctttgagattgcaaatttcacactttttagtctttctttttcatctaaattaaatggtttaataacatcattagtggacgtaaaaattgaattaaacacacgagtgtaggtttagtctggggtttggaaagtaagtaaagttatattaaaatagacacgtgttttagttttacggtcacactctcaccctcacctcacgggtactgcccaaaagatccaagaaagactttgctcaaatctttgctttttaaacaatgcacgagagagtcggagtcaagaggactcaagagaagagaagagatcaaccgtatttatttatttatttttagtaaatactattttgtgtatgttttataaagttactaattttattgaatttaataaaataaattttatattttttaaaattataaaaatagaattttgaactcaatttttaataattttatttttgtaatataataatttttaatacgaacaaatataaaaaatataactaattttgtcaataatataattattattaagttttattttgataaaaaattagttcgggatcttatttgtataattttaaaaattacaagatttattttatcatttaataaaacggaaaatacaattaataacttttataaaacactgactctaaaataatatttaccagttattaattattatatttttattttttttaagatttgaggttacacaaccttatatattcaacataagacgcataaataaaaccatgaaaatgaccggcaactatttgagatgttccaagtgattatgtgtggttcaaaaatacactaacataatatatttaccaaaacaacgtttgtcttcactcttcataatgattgatgtaaatgtatgaaaacataagggtctaaaagctagcgtttctcatttcgcctccactctggtcccatttactatttttttcttcttctttttcttcattcttcatgtaatatatagagaatttctacggttgtaatatcatgtgatttaacgcagaaaaggtatccaaaatatgtttagatgatatgatatgatttggttatagacacgcatataaactaataatgttgggtgattttggatttaatttgtgtagtgatctacacaaactttattttttaaagtcaaagtgggtgagaacatgtcacaagattttgtagttaaagataagtgatattactcttgggataacatgtcgttccaatgctaggcgggaggggaggccatatggttcatcttgccaattttgcactctacacatgttttcgtggtgcaacgaattagaaggtttgtttaagttaacatttacactattattttctttttagaatcgaaatgtattgatcggacctaaaaactatctttagatctctattaaaccttcaaagactcaattcatatcacaaaatctttttttttttttttcgatttgttatttttctagttcttcttgttatttaccttgattctacttcttacctttatttttatatatattttttttttgttatttttgagtatttattaaaatatctatttttatcttgggttttgcaccgttattagaatattttatataaattaatataattaagtattgtacactcaatcaatgttagtattaacatataatgataactatataatcgacaatgcgtggtattaccatcggatcataatgtactaacatactcgggcccatggacacgctctaaaacgtatttggtcaacctatttagctaagacaattaatactcacattaggtatgtaggctcaattaacccataatttctcataaaagggatgtgctcttttattggtgattaatgtagaatgtgtgtggctaaaatatgtggagtgtagaagagttgtgttcataaaaactcttgcatatctttcttctcttttaagtgtagattttatgattaaagaagtataattgatgatgtatgaagacaaccataggtaatatgttttattcactaatgttttgataccttacat

SEQ ID NO: 110898 - DNA, 3385 bp, Cannabis sativa
gatactcgggatcccgattcatatagttataaagatataatatgttaaggttaactttcgagtttagtaaatataaaatgcgggcgttacaaacttgttcacactaatctatgggggccaacccccattgcatccaacataaacgacggatattacatacacttccttgacgatcatagcagatttgcttggtggtatccactcaaagtcaaatttgaagctctagatgccttcatacaatttaaaaatttggtggaaaacaaatgtgaaaagaaaattaaaagtcttagaacagattggggtggtgaataccaacctttcactgccttggttcatcaacatgtgaatgaattccaacactcgtgtcctcatgattcagcttaaaatggtcgtgttgggcgcaaacacaggcacattgttgaaatgggcctcactttgcttgctcaagcccaaatgccactcaaatattggagtgatgcatttgacattgctgtctatttgatcaacaaacttccaactccaattctaggccacaaatcaccttatgaagtcctctacaatcaaaaaccagactatcttttcctaaagacttttggtgctgcatgttttccatgcatactcccataccaagcacacaaatttcagtttcattcgctgaaatgtattaatttagaatacaacaactccaacaaaggctataaatgccttactcccacaggtcgtatttacaactcaaggaatgttgtgcttaatgaactcgagtttcctttctaaaagggatctctcaacaactatcaaacacctccacctgtcataattcacaactcatcatggtctaatcttcctgttacaacattcgataccactgactcatctaaacctggtcctattaatccaactgctacagccttctcagaagcatcaccaagctctcctcaggtacactcaccctatattggctcttactcagctaacaacagccttatttcaggtcatccaggggaggaatatgatggtcattttgatgatcattttgagtttggcccttttgatgattttgtcatcgaacctactactactgagcatgtacctgaaacagatcctgctgcattagattctaaaccagatttggagccacaaccaactctagccactaccttacaacccacatacctatggtcactcgtgggagagttggcatatttaaaccaaaaacttacctcacctcatccaaagcatcattagttcttactgaaccagaatttgttgaacaagctctccaacacccaggttggaaaggttcaatggatataaaggtaattcctctaaagaaaaatcgtacctggattctagttcctcctgctgcctatcaaaacttaattgacaacaagtggatcattatgaatcaaattgaaagcagatggcaccattgaaagattaaaagcgaggttagttacaaaagggtttcatcagagaccatgaattgattatggtgaaactttcagcccagtaattaaagcctcaactgtgagaattgttctcaccatagctgttttaagaggctgggacataaggcaattggatattaacaatgcatttcaaaatggcaccttggaagaggaagtttttatggttcaatcacaaggctttgaagaaaaagggaaagagaattgggtttgcaaactaaacaagtttctctatggcttgaaacaagctcctaaagcttggtttgacaaactcaaaaatactctcattgattggaaatttcaaaactcaaaggttgatacttctttatttttccacaaaaatgagaaggtttttatccttctcctcatctatgttgatgacatagttgtaacaggaagtgattctaagttggtggcagaattcatttgcaaattaaacaaactgtttgccttaaaagatctgggatctctacacttctttctgggaattgaagtgtttagagatatcacaggcatgtacttgacacatacaaagtatattgaggatatttgaagaaagtaaacttgaataacctcaagccatgtcctacacctatcgctgttggcaaacctttatccataagtgatggtgaacctatgtaggatccttcgatattcaagagtataattagatcacttcaatacctttgtcacacaaggcctaacatagcttaccctgcaaacaagctaagtcagttcttgcaaattctaacatctgttcattggagtcccgttaagagagttttgagatacttaaagggaactgaaacattggaattgcatatcagctgcagcaaaaaactcagtgtgactggcttttttgatgctgattaggcatcatgtcctgatgacaagcgatatgttgctggctactgtgtatatctgggtgagactttagtgtcctagtcatctaaaaagcaagttgttgtctctatatcaagcatagaatctgaatacagggcattagctcatgttgcagctgaaatatcttggatagaatctctgctcaaagaacttaagttccctctcttgctgccttctatcacatggtgtgacaacataagtgccagtgcactagcatccaatccagtatttcatgctaggacaaaacacattgaaataggtgctcactatgttcgtgacagggtcctgtagaaacaacttgaagtcaggtacattccctcgcatgatcaggtggctggtctattcaccaaaggactatcgaatttaagattttcattccttgtggacaaactcggtgtgaagccttccccctttcgtttgaggggagttgtcgagaaatagagttttcttttatctggtgcaggtccatggtggtgaactcagctcctatcatcagttgattcctgcttctgtttaggacaggtgtcaacctgtatttgtggtccaaactttagggagtaataattagcctttttccaattctattagaatattcccttattgtaatcatccttggaaattggtcatgccacctgtaatagaaccattgctcttatcattattttgtaacaacttcatttctctataaaagaaaagctctggcttatcatgaaaatgagctgagaaaattatttactcgattctctgaatatacatatatatcattcaatgtatcatatgtataccatatacacaaattaattcttataatatatatactataatggtcgaaacacatatataatatattcattaaaactaaagcccacaatattgtggcacaatattattgaagaaaaaacaaaaccctaattttaaaattcccaaatttcataaataaaattatcagatcttcaattaattcaacaaaggtggctctggtaccacttgttagatttataaaacactcaagaaat

SEQ ID NO: 110899 - DNA, 1646 bp, Cannabis sativa
  modified_base (1582)..(1588): a, c, t, g, unknown or other
tggtagggtgtggttgtttgggggaggcattgggcgtatcatgcatgatccaaactagtgatggcgtgaggaggccgccatcgatggagtcaggtgaggtggtcgagccaagccataacacaatacgcacaaggcccgaggcaacttaatttccaaaggcaaagcggtgatgaggagagatttatacatatttttggcaaacagcgtgggaagtgaacaaaagggtaggagtgggagagtgggaccctatcaccacaccactttgatcatcatcatgatcatgatcattatcattagagatcatcatcatcatcattctgaatcagctttgtttaatttagtttgggacaatacgtggaacacggaggctatggaccccacaaatgatgattgggtaggggaccgcattggacctacttggtctccttgtcttcaacccccgtgactccctcattggcttctcaccacatttcgtgtcttcttgtaatcccactgggataccacctgggcccttatcttttttttatatattattaccttttctctactgctcatacacaataatttattattattattattagttggaattgaaaaaataataatagaataattctttaatgacatgatatcttaaatgtgtgcatgtcacacgcgtgtgaatcttcataatgttgcaattttttctatattaatttatgattattatgcaatcttaatctatctactttatcttctttgttactacttgctttcttgtgttcacaatatatatggttcttttagatagatggttgttagatatttcatgcactttcacagtgtaatttaatgatacacataaattgtcttgaccacttgaatttctaaattataatatgcatagacacacacattcaacatgacatgctcttgctcatcctcataccattttatttatttatttttaaagtacaaatttgcatcatttgtttttcctctaacgaccattcatggatgaaatttctatgatgtttccctaattgattttatgtatcttcccttgttagaattttacatataaatatatgcatcaccaagtcaaacttaaatattattgaacgaaaccatgtataatgtattgatttttaacaaatttgttagaccgtgaatgaaacgttttcctgtcaacagttatttctttataggaaaggaaaccccgaatttacatcattagattagttagtctttttaaaagaaatatttcacggttggtagcaagttaaatatagcctattgagaagaaacaatacttttattatataaatatactaagggctagtttggcacaatgttgtggaaaaaatagttgtagttgtacggtaaaaaaaaatagttagggatgcacatttttctatagtaatggccttgcaaggacccgcccctaatggggcaaagattccccatctaaataggaatgggacagggacagagatcattttttatccccgaatattaaacgggacatggacggggatggcactccctgccccgatggggacctattttatttattaattattttttttattaatattttatnnnnnnnaatatgtgtttgtattttttttagtatattaatgatatttttataattttttaagtta

SEQ ID NO: 110900 - DNA, 3173 bp, Cannabis sativa
taattagtaatcccggttaggggattagggtttcataatcatttttgggtagcgtgcctaattatttagggcgttacaatttcaagacatatcacaatgctattttactcaatgttgttcctttggctggccaaaatccaagcatttagagacattcatggttcagatttagaaaattttggcttaatgactctgaagccattgatttaatactgcaaaattggaagagaaatctcactggttcggcaatagagaatttctgtaccaacattcaagcttgcacaagttctctccaaaggtggcataataaaaaatatgggaacatgaaaaaaaaaaagatctcaaaggctcaaaaagaagtgaaggagcttaacaatgcggctgtccgaactgatgcttctatgtttgagctgaaaaaatttgaagacactttggaggaactactagcacaagaagagacatattggcaacaaaggtcaaggggcagattggtttcaacgcgatgatgaaaatacaaaaaaaaaaaatcacgcttatgcctcttctgggaagtcaaataacaccattaagtcactgtaaaatccatttggtggtagcaacttcaaaggaagaatggacagaaattatatgtttttattttggtgagttgttcactgctacgggtactgattttgaagctttgaacagggttctttactcagttccaaccacagtaacatatgaaatgaatcaggctctactgtgtccatttacaaaaaataaagttttgaatgcacttagttcaatgagtccagataaaagtctaggaagcgatgggatgtcagcaatgttttaccaatacaattgggaacatgttggctcaggtgtaacgagtgtggtactaggagttctaaatgaaggccatgacataagtatcttgcacaagtcaataatcactctaattccaaaaataaaaaaaccaagagcaatgggtgattgcaaaccaatcagcctttgtaatgtcatttacaagctaatatccaaagtgttggtcttacgctttaaagacgtgcttccttcagttatctttgaagctcaaagcacttttctttctaactgctcatcacagacaatattctggtttgcttttgaacttgttcatcatctcaaacacaagaaacaaggtagcaagggtttctttgcgctcaaactagacatgagcaaagtgtttgatagagtggaatgagattatttatctgctgtcatgcacaaaatgggggttgatcaacgatggacctccttgattatgaggtgcctttcatctaatagcttttcttttcttttaaatggagaggttgtgggtaatgtttgaccaataaggggtctaagataaggagatcctttgtcaccttatctctttctgatttgctcagaaggtctttcaagactccttaatcatgaagaacaaatggggaatttattaagtctgaagctcactaggcgtgccccttcggtttcacacttactgtttgcagatgacagaatgccgacctgtgagtgccatgaatcttaccttggtctccctgcctattcaagccatgataaaaaagcattgttcagtaacgtcaaggaaagaatttggaaactcctacatgcttggaatgagaaactcttctccattgcggtaaagaagttctattaaaggttatggtccaatctattcctacatacgctatgagttatttttcgattgccaattgggttttgtaatcaaattgaatctatgatggctaacttttggtggggttccaacaaagatgggttaaagattcattagaaaaggtggaaatagttatgcaagttgaaatttgaaggggggatgcgctttcgctccaatgttcatttcaatcaagctatgtttgcaaaacaggcatggagaatatttgagaatccacactccctattgagtcggcttttgcagcacaaatacttttcaagaaactcctttctagaagcacaccttgaacacccaccttccttaacatggaaaggaatacattagggaaaagaactgctattgaaaggcctttgatacaagataggtaacgggtttcgagttagaagttgtttggatccttggattccaagacataacaaatttaaaccaatcagttacactagccaaccaaccttgtctgtatccaccttcatcaatgatactatggaatggaatttttctattacaagagaactttgctcaaattgatattaatcgaattatcaccattcctttaagcttttaccaatctcaggatcgactcatatggcaccataacacaactagggtctactaagttaagtctaggttccacctagcgaattccatctcagaaaaaagtgaagaatcaacatcagataatttcaaaagttggtggaagtttttttgggctttacaattaccaccaaaggtaaaaaaatttgcttggaaagtcattcaacatgctttgcctatagccactgccttgcacaaaaaaagatttattgatatctggaatgacaggaataaagtgcttcatggtggaacaaaatgtgatgcctcttctctagcaacacacactataagttacccggataattatcgatcagtcaagcaaagttgcaaaaagaaacaacaccctaatatgtcacaccagcaaagctcctcagcccgtgcggcgttgcaccaacaacatccttcatagtccgtgttacaccagtaaacacacatacgaagtgttgtgtcaaaccagcaaggctcgactcagcatgatgcttcagattacaacgtaaggccagcaaatgtgataccatggaagcaatcagatgtcaatattcttaaaatgaatgtagatgcgactgtcaatattaaagataagatactgggtattggagcagtggtttgaaattacaaagggaaagttgatgttgcattatccaagctagtccaaggctgttttagaagcgatgaaatggatgctcatgcactcttttatagtcttaattgggctaatcaacaacaaatcacgatagcatatgttgaaagagatgccttaagagtttcctcgctttgacttcttctcatacaaacttatcttgtttttcagatctaattgttgatgttcgatgtcttcggtccttttttttttttttttttt

SEQ ID NO: 110901 - DNA, 2828 bp, Cannabis sativa
gattgaatcatcggttatttattttggttggatcggatcggttgtttttttaatgataaattatttaacatttcatatgacaaaaaataaaaaaaaaatattgtttcttaatctccaataataatttatttccatctctatttatatataaatcaaaccaatatacatatatgtcaatatatatatactcatctttaaatttacactaaaatatatgtattcattactaaaataaataaattagtatatacatttgaatttacgtgtacgtgtcaatgtgaataagaataatttttctagtattactgggtctgcatgttaaaatggtattactgcgtctgcatgtgcctatcaaatgtccatatgcataagtttcattgtaccaaaccaattattatataataaatacacaagtacccacaatgcataccgtacaaacatcaaatgccttttagtaaatccatcaaattactgttgatggtaagtagggtacacaacagcatagacaaacaaaatccatagagccatacaagcttggcattatttatatattccacacaccaagggagaggcagatttcaagctgcagcatttatagcattaccaccatccttttccacaaaagatttcacatactccttcctgcaaagaagaaacttatgtgaggaccgaaaccgaacaggaaagaaacatgggacaacccgctgttgaagcaaagaagcataccgagctggaagatggtcgtggggacgattgaatggagtccaaactgggtcaccaacaaaaagcctcattgcctgcagagtgtatttttgtaatcattttagtggacaataagataatttggtaaccaaataaccaataaaacacatggcacaaacttaacaaagtatagataatccaatctgagactacattgtgatcaactttaacaataatttattttctttctatgatttcccaattcagaacttcatgctcatgtttagataagtaacagcataaccaatgcttagtagttaacacatgcaaagataggatacagcacccaaaaacatcatgcacgcaacaattgttttctacatgttcatgtatggataaggaacagggtttgcgcactaggaagttttattttttgggctcttagtacaaaggaaatacagtaattttaaaaaataccaaatgaacatgtatattttttgcagttatttttcaagtctctaggctaagtgggccttaggtgcaggcccggtctaccttagaccaagatcgggcctgataaggaaagaagttcaaactcagcatgcaacaatacttattaatgcagcgcaaaagtacaaactttgaatcttttttttttattttagaaaaatgtaccttgatataattgtttgtgtccaaagtaaaacggtgataaattccagcaggcaaaacaatcattccacctttcttcacccatacacggatccagcgttcatcacggtctctcacatcaaaataaccttcaagaaaaatataaagaatcaacaactagatctagctggtgaagtgaggacaacaaactgaagagtgaccaaacctaccacttcctgccacacagtagcggatctcttcatcagtgtgaagatgttcctcaaagaaattttttatcttttcttcgtaatttggaagcttctctgggcaaacttcacagaaatccttaacaaccgaacgaagaaaaagggctcatcaaatcaaagttaggaatcaaatgtccaagacacattttaatgttgcatgacactgactaagctatactagatctcaacaagctaaaaaagaaagggtgcatctttgctattttaagcatttactaaattcacttgtaaccaagaaattttcaggagatatattaccaaataataattaaaaaaaaaggctataagcctataacaataaatataacaacaataataacaagatataacaacagtagaaagaccaattattacaagaaaaaaaaaacagttaacactataatcaatccttataatcatcatcgtcttggtaccctgacatgtaaacgataactaccaagccaaggagtaagaacacttcttgaataaattacttttagaaaaaggaaaacaaaatttgattggacgaaccgtgtaggagtatccacgttctgtacgaatcttcttcagctcctcatctgtttcatagttatcagcatcaagtctccagctgagcactccaagctctacaagaccagcaaaattgctccaaatgttcaaatgttggacacattaataaccccattataaaacatagtgtgtgaaggggtgctcaccagcaagttggtccaaagatacaaattcctttggttcccgatgatgaggaagtctctggtcttcatcactgtcatccatgaaccatgcttgaagaacttcctctctaggatcctggacctgtagtttagaactttagatcaatatcaaaacataatgctatcacactttcccactaaaaagaaaaattcgttctaccattatttcctgggaaaatttgacctaaacaatagattatagtattcaaatatgcgctatctaaaccggctcatgcagacatggagtgataaaaaggtaaaaatatagaaagaaaaacagattatttcttaaaagtcaccttatgcaatgtgtttatgttcaattttaactcattctctcagaaaagcctgggaaaatcaattacatcctcatttaaaaatttgtagaacatttgcaataacaattaaagttgcaacttacaaaatacctcgggtatgataaaaaaaaaacaaaatatat

SEQ ID NO: 110902 - DNA, 5383 bp, Cannabis sativa
  modified_base (41)..(44): a, c, t, g, unknown or other
aaaaaaaaaaaaaaaaccccccttttttttttttttttttnnnntttttttttttttttaatggaaacacaaggtaatatattccttattttacatttacaaagacaaacgagcctagcccccttccaatctgtttcttatttcaaagttaaagccacagaagacattagagaacaaacatccatggcggcaactacaactacctcccacttctatccaccctttcactctcattcattttccaatactgacactcacagaccttctcattcgaatctctgttctaacacccacaaacccttttctgcttccaagatatacccctccatcattctctccaggtacacaaacacaatctccaaaccctctaacaagctttatctatcccttttccttttctccattatttgtactctaattcattcaaaagttcaattctttcttctttttttaggtcaagtaccaaaatttcagcaccaaagcatgtatacaagtctttggtggtttcagggctggtaaatggaaactctgaaactcacccagaacttgaatcaaccgtttcaaactcggtatgtggtaattagatactatcaaagctcatattttgttggaatttctctcttttttttttttttaagttggtaacaaaaagtttgagttttgtttactgaattatattgcaggatgcaactattgacataaagttaccaagaagaagtttgcttgtgaaatttacttgcaatttgtgtggtgagagaacacaaaagcttgtaaatcgactagcctatgaaagaggacttatatatgtacaggtattggtttcttctctatactatttgttattgtttgaagatgactaaatgtgttaaatttctatcttttcttacttgttttctactctaagtattcttttgattggttgttgtggtgggcatctatagatgtatataataagatacttatggggcactgattgtgtttgtgctgctcataaacccttatttttgaatataaaaattgtttgtgaagtaaaaattttaaaaaagaaaaggtgggtgataatgatacaatacctatgaaaatgtttgtataggtagttgatattatactttgaaacaaaatgcttgcatttgtatagaagagcagcaagtttaagctttagccttttataattggtatgtaaaatctttatggtcttaagtgagagcactgagttagttcagttaatatggtgaatttatataatttgaaatgctggtgcattctatgaattggaatgatacccaaaaaaagaaaagaaattgtgttccttttacctaactccggtgtattcatcagtgtgtagggtgtcttcagtatcacaagttagtcgataatctcggccttgtggttgagtatgacttacgagaagaaattagtgcgggcgagaacaaagatgaagtttgaaattttgttatgttgttttgctaagttggatcatgattgtaattcaaactcatcttcataaatatattaaccatgaaagaattgaagaaatacaaaaataaacaaaatcgaaaaaaaaaaaaaaataacatcattgttgaatcattattgatgtctacttctatgaatttttctttttatatgtaatatatatatatatcaaacaatcaattctttgtaagccattataagatttctaggcattgtagcctattgaagccaccagaactagaatagctaatccagttcttatcaacatgtctgatctttctccttgaagacgcagcatatttcctccattctgagttaagaaagtgaaatttcattttaattgtcttgacacttaaaatttagtatgtactgaaaaaaaggttctagttaaggacattaccagagttggtgagggtgctggtgctgtttcttcattagactcttccgctgtaggtggtgctggaggactgtggtgatgaacaacaggtgctggtgcgggttcaggtgcataatgatgatgtctcttatgtttgtgcctgtgcctacttttatgtttgtggggaactggggtaggtgatggcccttcaactggaggtgaagctggcggtttgatctctggcgttggagctacagttggtggtgcctttggtgctaagagtgcaggggcaggagctggaacttccttagcaggtgctggagctggtgcttttttagcaggagctggtgcctgtggtgctttagctggggtcggtgatatctttggtgctggcaaaggaggtggcaagggtggtggtgaagccgctggaggtggtgtaactggtgacacaactggttgtagtggtaccgaaggtggttgtgaaggagtagaaactggtgagactttcgggggttgtggtgggggaactgttgggctcacggtgggtgctactttaggggatggtgaggcttttggcgtggctgcaacaggcggttgtgttgctacaacaggtggttttgttgttgcagctggcgatacactaggcgttgatggggttgtggttggcaaagcgacgggtgcagctgctggggattgtgcattgtttagtgcaacgggaatggcgagacaagctaagaacaatggccaaaacattgcagcagccattttttggatgtgagaactagtaggtggattctatggttaaatatagacatgggaattgagaaaacttgaacataattgtttggtgaaagaggaggaaatgtaatattcatgagattgttacgtttcttctaatgatttgggcaaaacaaggttgaaatgttattaccactgactaggcttgatttgatagacttagtagtgtttgatggactgttattttcaataaggttgtttggagcttggtgtgattttaggccaatacaccaaccttatttaatataacaattactgtcattaatagaaaccatggaaaaaatagagaaaatcccatgagagcttctgttcatctgcttcgattgtgcaacacgaaaaaaagcctttcattttccttttttcttgttggaactttcttttccattttaagtaaaacaagccattttctttccaaaaacacccatcatccccaacctttctacctgccgaaacgaccacggcgaccaccaccactggaagaaggcgaaacgggaatggggaacggcaccgattgcgtggtttgttcatctcaatctgtgctttttttaatgcaattcaacctctttcttcttactagttttgagttccatgtgaatgcattattaacacattattaattaaagattaaaaactatgttttattagtaaattatgaatacttgaattaatgtttcttttaatctattttctcttcattgtggttcttgtaataaaacacattaaactacctaaataaaaaagtactacaataaaattatgtttacatctaaagcagcaaaattaatctctgagaaatctccagggccctgttcctgttcctaccctgcaaatgtttaatatgtcaatataaataattataaattatagttacaattatgaatgatgagttccatgtaattttgttagaataaattaatatacttaatttattctatgatcaatccacaaaatccgataagtaattttttttaatgatttaagcatctgagagatgtttgtatttacttttaatcttaattagttttattttattaaaattaaaagtcaccaaattaggacacaattttagaccatatatttgagtttctaagaataaaaaaattagacccttgtttaaagaaacatggtaatttaaaaacaatcataaaattatgtatatatttgtaaaaaaaaaaaaaagtgaagccctttaagctgagtaagttctatacagaggtcaaacctaagactaactctacctgaatctatttaaaataaatagagttaaaaatataaattttatgggattttatattatcattacaaaaatatagttttttttttaaataaaaagaattattttattgaaaaaatttcaataaaagtttaaaaacataaaaaaagtcaaataagggtaaccagggtaattatttacattatgttgtttttgtcatattttttattttttttttttataaattttcttacaaaataatttttttttataagaaactatctttttacaaacttatactttaaaatctataaaaataaaaagttcccataaaatatatttgtttgagaaaaaaggtcatgtcaaagtatgtaatatttgaatgtatattttaggtgtagaaagatgttatgtcaagaaaaaactttatatcattactggtaaaaaaaaatactaactttatatccaagtttttgtgtttaaacttgttacccttcttatatttcttaatccaattccaaatttaaaaacagaatattgtatgaaaattatgtgtatatataaatgaagttacctccaaaagccaacacatgtgcgcaaagtcatatacaaagacaaagcaatccaaataccaacaaagccataagttgaggacagtacaaataagcaccaaatacttattatacccaccaaaacctgaaattcaataccaaatctcttcattttaattacaaatgatgatgatgatgatgatgttcaaatctgaaaacttaccattgagtaagctgaatatgcaaaatctgatgctccataattgatcccatcaaaaacaaatgccaatgcattaatgggttgagtcactgcaacaaactaaaacaaaataaaagaagacaatgaatggtgatgacttgtgaaactcgtaatgaaaagattgtggagatttttgtttgttttgcttactggtatgcctaaactcatcaactccaacacttggggctcctttgtgaacaatttggaacagaatttgagtataattgtgatgatcaaagacagaaatagtcctaaaaccagccctaactgcacaacaaaatcattcaaacatgagtccaaataaattgtgacttttttcatgatggtgtttgaagtagtgccattggattctctctattaatttttgtaaaattctaaatagtttacagtgtttataaaacaaatttcaaagcaattacttttacatgcaataaaaagaaatatgcatgcaatgcaacaaattgtttgaattctattttcggcacggtaaacaatttgaaatttttcaaaaactgataaaaagtccactgttactacaataaacaccagcatgaaaagttctaagattaagagtgttgtatcgtaaatctcccctaaaatgtgacttagtgaatttttcagtgattgaggactattaggtggcattttgttcgatgtaatgaaatggaaaggaaacaattttcattcaattcctttgtttggttgcattt

SEQ ID NO: 110903 - DNA, 8188 bp, Cannabis sativa
taaacgtgattaactgctaatttctaaattaaactaagcggtctttacatttggaatgctctttgtcaaggagcctgcgtttctgttgtacaagcttgaagttaaatttgtttatgctgagggcatgacagatgacctgggggttgatcccaatcatgtccttatgcgaccgagaaaagatgtcttgatttcttctaaggcaagcaatgggcatcttactcaacatctccgtcaggtttgttccaatcttaacaaccttggtcgggtctgatgtgttgaggggaagttctctaagttccttggccagagcaactcccgagtcaatttcccaaagcaagggtcaatgttgtcttcgtcttaagcacaccttcaagtggttttaggtgctgtctacaccttctttacagtttgatctctagaggtctttgtcgtctctctggcttttctgggagagtccttgctcatcccctctggtgttataacatcaaatgaggtctttttcgtcccctttaaagtcgtggcagtagaggaggtcttcttggtgattgacaatgaggcattgtagcactcgcgggcagttccttgattgccaaggagacaaccaataaaaaccgttattgcaaacctgacggaaaagtggcacactaaggagatggctggagggtcataaagggtaggcaatctgagcatcacattgtatagagacttcacatcaaccactatgaatgtggccatgatggtggtctgcttcgaagcagtgaagactataagcggcagcttaatcttgccacatggtgggataccagctccattgaaaccatacatgagttgctcgtatggttatatgttttcttaggttagacccatcttgaactgaatgtttgatggcgctctaacgtcgatcatttccctggccaccattatattagctatttgaacctcaataactagtggatcattgtgagggtagctaacatgataagagtttgattctttgaaggtgatcggttaacttttgtagtgttgatacttaggaggacgttctgctacctctagcactttggctcttagttcatgtcagaatgctcttgtatacctttttaaggacatgaattctcaactaagtaagggcctgcaatcataatctccaacctacttgcaactggtgtaggctggagtggagcattgccccagaaggagtttcttgtcattcataccactaaagagcaacatgtttctatcttatcccgcaactgattacactcattagtatcatgaccgtaattgttgtggtaacgaaaaaatttgttcatgtccctcttccccgagtctttgaaaggaagaggtttacgatgcgacattgttgactgagtggccataaatatatatctcctctcttggagccaagagaatggagtaggtggtgaagtgaggcttacaatctatcaagggctcgcccccagtcttagcttctttccgctaggggatgttgccttgcttaccacaattgttggctctcttttcttcgttcagatttccttttttcccatttccatacgcctgagtagcaggggcttcagtgtttggagacttcttcttgccaccctttgagccctttgctcgggtgatggcttcttcgagtttgataaagccacctactctatctaagaattcgttcatagtgtacagccttgagtgtagggtgtacctcagaggactgatctccatgagcccacctgcaagtgccataacccttgcgtcctcactaagacttttggtcttagtgactgcctcttagaattgttggatgttgtccttgaggggctcgtcttcttattcttaacattcacaaaatcattaggctcaatctggcattgttgtgaaggagcaaactggttaccaaaagaatccagtagatctttccatgagtcgattgatcagggggagcttgaggtaccagtgttgagctaggcctgtcaatgtagtagggaacattctacacgatgtaatctctcacaccttgcagattggtttgcacttcgaagtagtgtatgtgagacagtagctcttccttcatagtgtattggtgtaaggaaggattcttgaactttgcaggaatgggaagggctttgatttgttcggagagtggtgagcgccgttctctgttgtaatcaaatttagacaacttaggttatgtgatcccctacactaaagcatctaaggtgtcaaattctacccgattgaccccgtgaatggtggtttgcaccccaaatgcagcttttgcaacccggatagggtcttctctagaagttcctacgtccatcgttcttcttttgatcaagaggtcacaagggtctctttgtcttctaggtcggtcatgcactctggttgacctgggtcttgtagttgtctcctgacaacgtggtcgtgaaggaaacttcagtgaagcctccaaaatgaattcagaatcgtctcgggaagatccattgtgagagtgttcattcggagcattgtagtggctactcccctcaaaatagtcttcagtaggatcacaggtgcaaagacaattgaattggtactcaagttcaattcttctccatgtacttgagggaaatactcgtaccgttggccatttgggccacgggcaaagtaacggtacaactcccctctttcatctcaaaagtacttccgagtatgaagcagctcattggtccatactcaccggattttgtagccactagtttcgaagtagcttttcctacttcttctttcaggttgagtagtaggtccctttccccttgttaggtcttgaggcacggtctcttgataacattgaggaggacttggtggaggagtcctgttggttctctcattatggcaaggtcattcaacatccatggagaacccattggttggtgctctcgagcttgagtcctttcaagctcttgattaaaagtacttttcctctaagcggtatccactcatggtgtttgcctagtgcttgctcggttagcatgtgtagttgtgatgttctgagcattcagggtttttccttggacactagttcacacatgaccaactagttgaaagggtatctctcttactaactccgaaatatacctttgggaatcagtttcgtgattaaagcgataagcctctctaatccgttgagacaggttagctatccgttgttcttgcttaatgcattggctttcaatgttcttctaattttccaagaaccagtgttgaaactgttcgtgtttcttatcaaaagagtcttgcaactgttgttgcaggtcagccgcagtatagttgagctgagctacatgaggattggcctccttagggtcttctacctctacgtgtggctcttcaagtgggatctagtcactgaagccagtccagggagatagtggttgtggccttggaggacgagttaaggagctggttccaaggtgtgctcctagtgcctggggcatagaagtagtcctggaaacaactccatcaactggcgtggccccagttgattggccagttgctggagtatatctgtcaacacttgtagaacgtgttgcaaccatcttgaatagtaactttcttgaagtgttgctctaataaaagcaccaaaatgatgactcagaaatctacattagacttctaagccacacccgctcgctagattggggagaatataaaaagttataaagtaattaatgagagacacaacgatttatagtagttcaacccctatatcgcgatagtagtggagctatgtctactttgtgtttttatttgtcatgagatggtaattacagcaagtgtttaagtatcagaaaatctaaactctagagagagaagctctgactttgtggatagttttttgaaagttcaaaatcaactaagagagctctccttttataggtgaacgaggcccaaaaaataggagataaaataaaaataaagtattttccaccgttgatgattgtctaactgtaaaaattagcttttggtggtgatggctaacttttaatgtttggtgggtcccactatgagttactgggagcttattttcgtaactcccttagggctaaattttgacaatgctagcttcagaatttggacaggtatgtgagacatgatttgatagagggcttaaatagcttcaagatgcaagttgaattgcatcaatcaaataaaattgagtgagttatggttgttttactgaagacagttcaagtcagtgccaaggttgacattccaatgctcaagttgacatctggcgtcaacttggatgttgtaaaggtgtagacacatccaaggaaagtactttgagatgcctaagcgatggtttgacgcaccttagttcttttatatgttttggtgaagctagtcacacattctcagaaatgttgctattttgcggaaacgaaagactcaaaacttacagctttcgattgatccaaaattgaagttgtgaatttcattattctgaattcatgtatcatttcacttgtaaaaaattgttcaaaatgttgtaatggcattagattcaaataagtagaacccaacgaaccaggtcaaatgttgacgtgggcgctggggcctttaaaccaagctcccatgattctatttttgatacttcaaaggcttctaaggtttcaaaacttgaggacggagtctcttcccctattttttaccatgtcgaattcaatagtgacatcagatttggcatttgagcaattgaaggcaacgtcctaggttggttgtcaaccaggtgttaggcccaacaccaggttaacctaggctctgggccctatttccagggacttgggtttgtggttttctccccaagtttacttgaattttcgttatttgtgatgatgatgaacatgtcagaagcactttttgctgatttgaattggaaacaacccaggttgacaaaatgtcaacttgggcgtagggcctagtcccaagtgtcaacctaagcactaggtccctcttctactcctttgaaagttctgtttggtccccagattatacttgctagcaaaagaaagataatagtaaaactatgctcaaaaatactcaatattatagtcgaccactagtaatgtcgtcgtcctattcaaaatctgaaccaccactactaatatcttcacatctaaatgaagagctataggaaatgggttttggagcttgcgttcttctttgcctcaaagtcatttccttcgttcctctcgaagatgccattgctgatgagatcttgaagttatggagaaatttgggatgaaatatgtttgcatttatttaaggaccagaaaataagtgatatatttatcatcagaataattactcaattaaccatgatataaagtcaattataatagaataataatctattgtatattccaacagaaattttttagaaggatcgtagaaagaaagtgtttgtggttttcttatctttgaaaacgaagtgcatgcgctcatgtcgaagatcatacatatagaatttgtcaatccaattacaagaaaagtcaaccacacctttgatggctctgtgtctcaactctcaaaaaaacataatatcttcattgaaattatttagaagccaccctcattccatatcctcaaaaccaatcttcatttcttatttcattatgttctcatgctatagaagaaacaacaagaataaaaaagaaagaagatggtctgtttatgaagaatggaggtgcagtgttagagcaaaccattcttttgtttaatggaaaatcaaatccacttcgatcatactcttcccatgaactgaacaaggcaactcataacttccatccaacccaaatcatacactccagcttgaaccacacactctacaaaggcaaatcaataatggcatcacaaatcagcaaccacaagaatgtattgaagcaatggaaagtgcttacagttcattggtagcatagaattgggcttcatccttaggcatactacaaagtatggtaacaaaaagcagttaagcatcgtaaggaaagacattaaaaatagagaaagagaggttcaagatgtagaataaagtttccgttgagaactttgcaaagtatccttgctggaaccaccacttaaaaattagtaaaaagtatacaatcacaaagaatgaactacggaagatatagctatgaaaacaaaacacacatgtaaagaaggtagttgtttagttagcatagtaacattgtgggaaattgaattttggatcacccttagctagctcatccgaccaacaagaaccaaaagttttatgaagattttccgttgacttcaaatttaaactagtttcgtcaaataaattctaagggaaagtgacattagatcaggatcgctcatcctaatcacacttaacaaaccaagcaaaccatatcgatctggtgcagactgtgcaactcacatggattttaatccctggtccaagttttgaatcatttcaatacacctcagcactctcttctataagaacatttattggttagtaattataatttataatgaaagccaaaatcataaaagaaaaaaaaatggcaaatgaaaagagtatcatttatgtttcactttatgatttcatggacctctactagtaaaaatcagtaaggagattttataccttttcgacaagttgtataagcacaaagacggctacctcagtgtccactgttttggtttctgccagaacaaatattgacactgctgctgcaacctctgaaggcttaacttccaaaaactcaatttctacattaaattaccacccaccataaacgtcaaattctctattaaatctttatcatatatgaaagtgtaaaagatataataatgagaagatagtcaccattgacagtgctcaaaataagttggatggatcgttggacataggtcttaagtggggctttatggttattgatcttccaaatgaagtagtccaataaggagaaaggtgtaacagcttccatcctccttcaatgtgcttaacacaagaagctccattctttgtatggttataggttcaaacccaaactttgagtcacacatctgtatatataaacaaatgatacattctgaaccttaaataaatattataaacaatagtataacaatagagttgatagaaataatatcatgggacaatgatttgtcctctctgttaatatgccatcatattattttatctcaacataattgtttgcatttgtagaatttaaacaccaaacataattaacatcattgatcttcttccatgaacagatctatacaaataagaaaaccatatgcaatcaaatagaaaaattatagaatcaaacccaaactcacctctataacaaatcttgaagcatacacaaccatgagacccacttgcatcgtcatagaaggagaccgggccacctgtgccaaaccgcagtgatcgttggcactgtgtaaaaaaggagcccatcggcaccgtccttgtcaaaacgatctcaaggggcacctggctactactggaggggcggcgtgtgggtgtctcggctgcgagaaggtcagggatgggcggagaagggtctgggatggagaaggggtatcagctaagaggaagaagtagaataataatttggttaagattttttttaaaattgggatggagaagggggtgtcagctaagaactttttttaaatttccagttaatcgccagataggtcccaaatataaatattttttaaaaataaatgcaatttttattttttttttagaaaaattatcaatctcggttgttcagtgtgtaacttctgagattgataactaccgaaattattatcaatctcagaagttacatatggatccgcagtgcaaatacggtaacaattctacctatattgacctaagagtggtgtcgcccttaatgagaattggagagtatattttgtcaaaaagatcaataaattgaatgtgcacaaggctattaatgttgcaaagtgagacatgaggtcttgggtaaatctagcaaagtgtgtgtgttatcatcgttttattttaaataaaagttggttcaatgttttgtcaatcaaattttcgataaaatttgtgataattacactatagtaaagtttaggctaattagaatttttaccccccaaactttgatgtgtaccaaatcatgcccctgaa

SEQ ID NO: 110904 - DNA, 1031 bp, Cannabis sativa
ttttttttttttttgtaaaaaatacaatagtcacactttatttaaaatataggctaatcctgagactgggaacttccaacagatgtagaaactttttagaagttctatcataatgaaaatacttggtgcaacgaatacgcgcaataagcttatatgtaagtttatcttttttaagtttcatctctaacgtcgatttttattttagtgtcaaagttacaaccaacacaaattaattattatttgtggcgattaaatattaaaacaaaacaaaaaagtgaggattaacttgaccataagttgattaatgacacaataactcatttttgtagtaatgtttaattattatattagtggaattaaatattattttttatcgcgtccaaaaaaaatatatattatttttcatataatttaatttaaaaactattatcaaaatataactacctattttaaaaaggtgatggtttttaggtagtgctaaggttaatagtaatgctgttattatgaacatatgcaaagcgagatcgagatatatacgtacgtggaagattagtaatcacatgtagtgcaaatattttctttaattgagaggacatgaatgcattatcatatcactatcactaatactccatatgtgagatcttgattcctaccttttagttatctacactataacaagcgccatcttattaaagtcgctttaaaataaagtaatggaaacaatgtatgttgctttattattagaacaatataattgaggagtccaattgttgataggaatagatgctttttatttttgtgttgtgttcatctagttatttgaagaataaaagtcatcattaaatcatcctaaaattaaatcttacaaaatgtacatagttatcttttttggcctattctaaagtccgtcgcagtggggtccgtctcccacttattatttgtcatttgccaagtgatggaggaatctattagaatatttctaattaaggaaataaaataatattattgattctgataaatgaatattttat

SEQ ID NO: 110905 - DNA, 4770 bp, Cannabis sativa
aataggcccaaaaactaaataggcctaaataaaatatatgaagaactatgatattttatttagcaacaacaacttatatgcatctataatataatgaaattataggaaaccacgttaatagaatcgttttactattacgtaccttactttaccacattgatatttatctataagaagttaagcctaagtaaatacataatcataatagttataataatataatttatttaattatgtgtatatattattaattataaaatattttatataataatataatttatttaattatgtgtatatattattaatagtaattcatgtgtatattatgaattgattattttataatttaatttatagattcgagattattctaatgttaaaatcagtaaacactctcacaaaaagattattccaatgtttaatagtgtgagtgtttcttttttcagaaaacttatatcacttaggtataaaagtgaatacttaacccccaattaagaataatagtgacagttataaatgagttatagcgatgactttgatatttaatgtaatgactactacaagtgagatacggtaatactaacggttttaaaattatagaatgagttctctatagatttattaattaattctctttttgttagatgtctattttttttttcaaggattgtttattttcaaatattttcttcattataacgtttgtataaaatgagtaattaacttattgtttaagtaatttgttttatgtataacaaatttattgaaatgatagtgacgactataagtgaaatgcaatgatgtgactacacgtgagatacaatgatgatttctatagatttattaattatttttttttaatcttttttacaacgttttattatgatttataaaaaaaattaaagaaattaattaaacacatctataacatatcgtcatttaaatttgaatttaattagatacaaccttatttctatttctattattaattaatgagttttattggtgcattttcttttaaaaaatattataatttgatttaatataatttaattttttaattattactaaacaaaatacaaccgcaccgcaatttatttcctagtttagttatatacattgcattgcatatgtatttatgcgttggtgtgagttgtcattgttaatcccaaagggaaaattaattgtttaaaagttcttattagagtttttaatatttaaataaaaatttctaaaatttaatcatacatggataatcataatagattcataaaaggagacacacatttaattgacttaccaaaacaaaacaaaatactgacaatatataagcaagccaactcagaaacataaagtttgagcatagcaggacacaaacgacaatttagctaataactaaggttcaacatacaaattaactaagactctcataatatattattagaagtatatataatgatatatagtttccctagtttaaaaccacttcaattttgtagtccttgttctgccaatattaagtatgttatgaatatcgttggctacaaggattgcatcagacgaaataccagctagtcctcttccagacatgccaatgcaatagataccattatctcctttccagtgatttggatacttgttttttggcattcctttctcgttcagaccatacttatagtcctgcaaattaagactattttagtaagtaaaaaaagaacatttattctgatatatatatacacatacaatttattttatagaaattttacttttctatcactattacactatattaaatgaaattaaatcatctttgtaatcataacaattgaaaattatacatgtaaaaaacctatatatatgctacaatacaaagttgtatgaaaatgctgtaaaatgttattttttaaggaaacaaaaatttagtattattactcatgtctttctcaggcaaagtttggtacaaataactttggtttaattttgatgtctcggtttatgtaagcatgtaataaatactcaatttttatatcataatttgtaatattggaaattctaaatcaattttctaaaaaaaatattattttatttagatattttaaacaagatcgacgtttatttacatagacataaattaaaacatggattaactgggaccaaaattcttgatgtacaatcctctctcaatcctctataattaattctacatgagcagacatgcatgtattttaattattttttgacatacatattatatacatatggtaatatatagatatatataccttcacccattccattgctacacttttgtaaccagtggccaatatgataacatcaaaattcccttgagttccatcgtcaaaatgaacgttgtttccagtgatactttttattgcgggaacaacctatatttacatcaaaataataaaaataatatatgaaaataatacgttaaaattaatatatatatatactgatattatctaaaccttaattttttgtgaacggattttgtcaatgcttcctccatcgatgactggagtttttccaccactggccttgaaaaggaaaggtcccaatcgaggtcgatgaatcccatacttgggtagatctgcatagtaaaattttgctagccacaaaattaacttatccacataattgatactcatcttcagtttcaacatcaacattcctacgtacaccattgttttgcttaacacatgtaactgcatatcattcacataataaataattagaataagatttgttaggaagaaaaagatataaataaattatacttacagggcttctaatcactatacatgtttgagcaccaaactcagaaagatcattactgatttccatgccagagttgcctgagccaacaaccaaaacagattttccttcatactttcgtccatttgtatattgtgaggaatgaatgagctcccccttgaaactttcaatcccatggatatctggaatgaaagccttagcattctcaccagtggcaacaaccaagaactcagcagcatagatttcacgctctcccgacaacatgttgttggtctcgatcttccagtagtacttcatattgtcaccatccttataattcaaataagccacctcaacagagcgattgtaacgagggtttatgttgaaatggttcacataagagtctaagtaagagctaaactcatgtttggacataaatgtgggggtggaaaatttgtggggtttatggggcaatgagcaaaaacatttagccaaatgaaggcttagcctatcgtatgagtttttcttccaaagtgagccatagcaatcttcttgctctaacaaaatatatggtattgactttttgcctagacatgctgccattgccagtccagaagggccagctccaacaatcaccacagtagtagtctcctccattttttctttctttcaaaacaataaaggaatactatactactagctagttagctctagtactatattgatgagaaagatatatatgttttgacaatgttttatagagtgaaaaaacttgacaactcatatatattttatacaagtgtcattgctacttaaaaccttgacgactctacattcacaaacaattttagtgaggaaaaagagatattatatggtgacatgcagggagaaaaaagaaaaaggtgatgatattagcttttttgtttctgttcatggatgaatgaagaaaatatatagacttttttttttcacaataagcatgaaatgtcaggtctccggcctaatgaacaatgtgttaagaaatggacgttacttgaaggagattcttccacattcaagaaaggagaaaaaactaaaatgacaaccttcaaaatagtatattattaaatcgaatttaattttaatggattttttaatattagaatgagagacctaattggtcaaaaatctgatattattccattaaaataattttagtagattttttaataataatttgagcctataattggtagaaaatctgaatttactatgatataagttgactatagagagactttctttacatgtaagcaacgtggcaaagaataataaagtcatatataactgatatttatttatttaaaaaaaaaataataaaggatttcttttatctgaatatttaaatattattaaaaataattatgtttttctttaaataaaataattatgttaggatataacttagggatatttttttttggaaaaaattctcagccaccaaataccaatagcaacaaccactttactaaagtagagtgatgatttctccagatagcatctactatcaacaaagaagaaattatattgtatacccattttactttatttattttaatttttaccttcatttttattttctttaagatatactcacttttatgaatgatattcccattagaccttttaagttaatgtaaattatatgctagacttaagtagactagagaataagagtatattaggcaactcacttataaaaatagatatattttaataaaatataatatgagagcatttttagttaacagatacaaaaaaaaatgtattcttcaacttatcctatcaacaaattatattaacttaaggatttgcttaggttagggatgtatcactattgttctagagacgattttaatattgtatgaagttatatctttatatattaaaagtgtctatctaacgatatttcttggtttaacagattatacttaaaaataaaagaatatt

SEQ ID NO: 110906 - DNA, 13662 bp, Cannabis sativa
  modified_base (11130)..(11133): a, c, t, g, unknown or other
  modified_base (13600)..(13625): a, c, t, g, unknown or other
ccaaagaagattgttttagatttctaaaaaggtaaagcagttgggccagatgcaaatgattcaaaatctagagagatagaaggaacaaaaccaagagagcaagaaggaaacaaggattttgttggagagcttatgcaaacagggctatggcgtatctgaaggtcaaaaggcaagtttattacaagcactgctgtattgtttggcgcagttagattattaaaagatatttgaaccaaatgctgtataagcattttaatgctgtataacccaatgatgtttacaattttgtgacctcgccagttaactttgccgtttctcttcctcagtcatctctcaactgacccagtggaggagcattgtttgtaaagtaatctacaattagttaccgaattcttaaacaaaaaccactagaacttaaataaaactaatatttacgtggctggccacgtaaatttcatttagtatatatatattggtttaaggtatattgtttgtatatcatacgatatattaataaaaaattaattatatgattaaataacatattagacaacaacagcagcagcaaaatctaaaagaataaaatatataatactttttatataatgaaaaaatagttgacaaaaattcagtagagaggtgttgatttattgtttttcataatatttataaaaggaataaaatatataataccttttatataatgaaatgtattttaggtattaaaaagtaaaaaagaacatttactttattattttaaaaaagggacattaattatctatagaattaaaaataagatcatttacttacatttctcaacaaaatatatttcaatatgtattttcaagcatctgacaaattataataaaaagttaaaagtgcactccacaaatatttttcattattattccttctctatctaccattagattatataacaaataacaaacaaaaggcagtacataaagaccaagaacaaaaactctacttgccaaaacgaatgctagtacatcaattttcagccatataaaagtaatatttgatatatattataataaaaagtaggaaataatctaaaaatccatggcgagtattgggctttggtgtccttggtctctgcaacgtccactgagccacttcacatttgtatcgaagaataacaatggttggtcacctcatcttcttcttcttctttttctttacttttaatcaaaatctctgctctctcttttttcttcataaaagggtctcccaaacttggtaaacaacaatgggttgttcgatgctgcaagaacaacgagcaacaacaatggtatccttccatttttcttagcatttgtgagaaataggcttctttctctctctaatattaactgttaattttggtgcagtttccaaaataggagggaaattttggtgggcatgaccatgagtgttgttgggttttcatttaattcaattttgtcagatgcattagcagaaaccggtatcaatgccttccttcctttaaagttgccattttttctttactattatttcttattctaagtgggtattgggtaattctttcagaagtggcagaagattttcgtatctacactgatgatgtaaacaagttcaagatatctgtaccaaaaggtgagctgaaaatgtctgccttttttgtttctgttcaacttgttctgtatataatttcaaattttcaatcacttgctttttgtagggtggctagtggctgcaggtgagcctgatggattcaaatctgtcactgctttttacccagaagggaacactagctccaacggtataagatcatagttgtatttctgatctctatgtgttcgatagaatgactcaattgggtttggtttcctttttcactgctaccagtgagcgttgtgatcacagggctcggtcctgatttcaccaagatagaatcattcggcaaagttgatgagtttgctgagactctggtaagcattctcaaattctaccaagttgttgttgttgttgtgacatttcttttgttctattcttctcctgtcttaaattcaatttcgtaatcattacaaacaggtgagtggattggacaggagttggcaaagaccaccaggagtggcagccaagcttatcaatagtaaatcttccaatggtaaaagactttaatccagcacatagttgtatgttcttgactttaatccaatgttacatagctgcatttggctcagtcgtaacagatgtatgttcgaaagaagcagtttaatggcttgggacatagttgtaaaatatcaaaaagttgattcggatcagaattttgaatgttaaagtgaaaaaagcaaatgtacaggagacgattttttattcaaaaattatgaatgagtagttttgttctttgctttttgtaagagtgctgcttgtagctctcttgtgttttggtggtcgtatgtttgcttgttgattaatgaagttcattttcttcttaatcaaaagaaaagaaaaaaaaaattaatcgagcattggtttacaaaactctggtattgtactaatgttgcagtatattttgtactgtaatcatatcaggtttctattacatcgagtactccttgcaaagaccaggggagactcgcagatacttgttctcagcgcttggaatggcatctaatggttggaacaataggctatacacaatcactggacaggtattaatacattcccaagattttttagggtgaaaattcatcttagcgtatgatcaccttgtgttaaggtcttaaatttattgaaaaactgctgagaagaaaacgattcatgatatgaaaagtttataaaacacgaatacaaacacgactcacataaattttgtgtcgtgttgtatgctaagcagttgctttttgcgtcatcgtgtagtgttagtgtcacgttgagttcttaaatttattttatgaagttgacataaacacgacaaacacgacgtgtgccacgaaaagttgataaaaacacaaatacaaccccaacacaaacttgagtccgcataaatttctgtcgtgtcaaacctgtaaaattccgtttagtattcgcgtcaaacccgcatattgtaactaaaagtttcccgcccttaaagtttttgatgtcttgaaaccaaccaatttcattggatataacatttttggatgtagtttgaggaagcagatttggacaactatggctcacagatacagcaggtgaggacttaagtaataaatcttcactcaaattataatgaaagtagctattaatccacttctcaactggttttgcaggcagtcaaatcgtttaggtttatctgacaactgatagtgtaaccagccaaatagatggatacataacaatcccaagtttcaacttgtttggtgttaaaatgatgttataatctcaattctcaatcattaattatttgtgttctattttggagtgcatcaatgtaccccattattatttttgatatgataattttaaaaaattcaaagcaaaatttaaatactattttacatgcgtataaattaagcgtacaacaaactgtttaaacattattttttaacgtattaaattattctaaattttttaaaaaaaattgtgagactgcagtttaatcgactattttctttccgcccttaagactcgaactttaccattctgtgttggtattttctatttttaaaacaattagaaagattaataagacctgagtatcactaggcacacaaataatttttttttaaaaaaaaacaataataaatacttgaagcttctgctttggttacgaagccagcccctagaatcatccagattgtaggagctcagttttttgaaatttaaaaagaaaaataaaaaaaaaaatcctaagactgatatgcacattaagacatatcacatctaaacaacaatgaacccacgaagatagataacaccagagactctatacacccaaaatgctgggaagactaagctataaaagaatcatatgttgattctaacgtgtcgacttttttttttttacatagttcttattcctacttgggtggccggaagccatttccggcacccaccaatccatgacagctctgtctgagcaatggaagtttacaaagggtttagatatgctaaacggaaagatctttagaggaagaacagccctgccatcctccaaaatccttctccacccatctggagcgacgacacagacatctgacttctctggtgagcatgactatgtatgacctgcaaaaatcaggaaaacatgacataataaagaccccggtacagatgtagatgaagagagttctcaggagtattagggtgtattcattcatgtctcataatgctcaccaatagtatatgtcacaatgccaaatcaattatacctctagaatgcaaaacaaacaatttgcaaggctagattcgaagcctgccactcaagtagcagttcccctgctcttagtcctgctgcaatctaaggatacctgaaaagtgagtacaactaacaatcttaaaatagctgaagaagttgcataaaattagagaattctactaactgcaagatatatgaaactaacctcaatcaacccctcacccagatgtttggtcagaactgccaccgtgtacatactgagatggagcaggaactataaactgtggttgggccataacaggtgctgccataccttaaaagtaaaaacacaagaaatctccaatcaggtctatctacatagcaatagtatcaatcttgaagaaacatctacaccaaattcatattttgtttttctgatgcacattagtacagcagaagcccgagaatggtcaatgttccaaatcccataaacgaataacataaactagaaaacctaagcctccttagaaccaaaaggtggcctataatttgccagttttattatgatagtagtttcaaacataagaactagtttaacttatcaccggaattgtacctgtaggatatggtgtttgcatcgtaggcataggtgaagttgttaaagggttcaccccaggtccactaaactgcactagttgatgactttgcattgtatatccatgcatattggtataaccctgaccgctaggaacagattgacctacttgtccatatggataaacagctgaattaactgccgcaggtactccatatatctgaagatattgctgaccagcatacggattgtaaccactctacatgaatatggaaaacaatgaaagaagtcggaatcaaaggatcaaacataataagaatattaataacagaagcaatggttttattttacactattgacctgtggatacacatactctggtccatatgttgcatacctgcaaaagttaaacaggcatcacacttcctgaacagaatagctccagtcgtgatttttagacaaatatatatatatgtatatattgaagttcattaaacaaaaatgaaccttaacttccacaatatgaagttccacataaatgaacattagcacgcatgaatcattatgacaagaaaacttccaaattacagactaaacggctcctattctacaagtaatttatcccaagtacaagatcaatcaggaaaaagtgactaacaacacaattcggggcccttatcaaacaacaccaattacaatcttgcctgctcaataaacattgatctggggcacatatcctccgcaactaaaacttttgaattcctgcaattaccaatcacaccatatcacatcactataatttggatagaaccaaccctgacttgaaagggattgaccaattatgtatttagggcggggcagtgtgttgagattggcatatgccacacaaaagaaagaaagaatgagaaaggagttgcaaaggagtcgaacgaaaatgagttaacagctctccaaccatcagtcaaagacaactacaataacaaaaaaagggtaaacaaataacacccactaactagtgctagtctatcaagtatctgccactccctatacatgttgggctaatacggacacaattgtagatgcacaaagccatactatgtcaaacaacatgccggtagccagaaccaggtaaaactttcagaaaacagtgcaacatctaaccacaaaaatcaaaggcacaagattttctgcagtgaaagggctgcaatcaccataattgtgccacttaactatttgttcattttcaaacaggtatacataactgccaacaacagcgaggtaagagggaaattacattgatattgtttttttttcaaaaaaataaataaataaataacatggagggaagaatttaaggaataatacattttccataaacaatgaaatcgagccaaattaacccaggatagacgtatttagttttctacatactaacaacttgatcatgaatatacatatatagctcacccataaggtggatacattagcccttggtagctgtaagagagaggttgttgttggtacccaaaacttccaacataactcccacgagcagtttgcatgtttcctatgtattgagccgaaggtcttggacgtcctgtaagaaaacaaactaaagaagtgaattgagagcaaaaggtttcaaaacttcagacctaaaacattgctaagaaattgtaatcaataaagtaaaccaacaaaatctaaaacaagagacactaccatagggcataggtggcctaggccggccaagggaagcaagattgcagtttgcgcgcctgccgtcgataattggagctggatcagcacaggctcttctagcagactccgggtcccggaaagtcacctaaaccctccatgtaaagacagaccaaacaccaagtcattttatggaagcatcaatgattactatcacaaaaaaatatcttcccaaaacaagatgaacatgtttaacactctataacgtaaaacctaaaccttccatatgtacaaatagaccattctatggtcaatatataaatgcaattaatccacttaagaggaactacttcaaaaatggtagttaaaaacccagatgaacatgtttacattttatgacatataaaatgaaaacaatagatactcacaaaaccgtagcctttggatcgtccagtgttcttatcagtgatgacaactgcctccagaatatccccaaactgctcgaagtaacgtctcatagtctcgctctgcgtctcccaagcgagaccgcccacgaaaacctttgtgtaagtagtatccccaaaaggggaattaagaaactgatacccagaactggaactcgatcccgagctcggacccggaacatggtgatacgccatgaaagacaatttctttctcttttttcctttttttttttcgagcaaaaggggaagttggatataagtcggtaaagggtaatcagatcgaaaatactattgacaagggaaagtaaatacgacccaataaagattaagcagcatagtagaaggaaaaccctagaaaaacccaagaactagtagaaatatactgggaatcaattgaattcggatgagtttctatggtattgtggtggtgggtactaggtaaggaaggaaggtctcgaatcgggtagaaagaaaaagagatggcgaaacagagtgatcaatcagtccaataaacctaaataagaatcaaaagagagagaaaaggaagaaccattatgaggtgaggaacagtgggtatgtatgtactaataatagtaatagtaatagtaattgggaagatggagaacaaggatgtaacaatggcgtcgcgggagtaacagtaacttcagtttcataccctttctctctctctcatctctcaatctacatctacatacatattaattatatgatatgaaattcaaaaaccccaaatccaaagcagcaaataaaaccatactaaaaccatacttatcaaaaaaaaaaaaaaagaaaaaaaaaccatactaaactactacaattatatatttatattttttttatttaatacatagtttcaataactattaactttatataaaaaattatcttaaatttataattaaaggaggttaattttttttttcccggttacgccagccgtctttccttaagcatctgcaacttagttggagttgtattttattattgtaattcgatttttattattgttatagttttgagtattttaattttatatttatgatataatttttattattttagttttatctcgtaacataattttgttttgtttcgttgttgattctttaatggttcactatcaaatcgttgttagtgattgttaataataagttctttacaactgaaggaattattagtagtacaattactaacattgtataagtattaaatgctcaaactatgagattaaatgaacctataacaatttttattattatatcttttaagtggtagatgaaaataactatatgtattttttttaagattaacagtaatatttttattttttttatatttttaaatttttttcatcaaacaatttgaaattaaataactatttatttaacttacttttttaattctaatcttgatggcatctaaaaatatatcttaattaaattgtatgctattatttaagttaattaatattaataaaattgtatcatttattaaaaaaaactacaattattattcagcaaaaaaaatagtacaattattatatttcttttttaaaaaacaaaattaaaaataaaaaacttgagtcagagccaaagggcagagaagacagcttggaagagtgccacgtgggacccaatggccaccccaccaccaccatcaatagcatacaataaagttttttttttttttgaaattctgcatacaataaagttatctttataattattattattattgcaaatttctttttttaaacttttgtttaatttttttttgtaagataaacttttgtttagtttattgtatgattatttatcttcttaagagatataaatggtgtttgtgttatgttagaacatgaaagaaaataaaatgaagtggggtgtaagattaggaattaagagttgagacttgagagaggttaaagaaaaagaaaatgggagtgtttttatttatttatttttttaggggaagaaaatgaagagtttaataattttaatgtggatggtaatggtacacggtcccaacacggatgagtttgttatgctttacacgtttctaactttgtagggttttttcaaaaaagaaaaataaattctagggtattgttttagaggggataggtttattatgctttacacatttgtggtgtggcaatgtaatttattagttccttatattatttattaaattaaattatattggatttatattaaaatacactaataacagtatacattttatgatatttggtacttaaagatgtcttttaatgatgcaaatatgagtcgggtttttgacacagtacaagcccgagaggcatgagcacaatcggccacgaaaaaatatgtgcttagataagacatagcacgacaggagaaaatatgggcttaagcatgacacgacacgaaaaaatatagatttaggcacgacatgacacgacacgacaagcccaaaagcacgaatagattagcttaaaagcataacacattaaaatgtccattaatttaataataataacaatgataaatatttatttatcaattaaaatgataagaatattcaaattataataattataactattttttatatgattgtgtgtaactattattaaaaaaagatataaaagtaactaaaactataaaatacacatatattttagtatttagttcatcaattgtaacaaagatacaaaaattttaagtatgaatttgagcccatataaaaaaataggttggtctatttaacaaaaatgggtcaacccgaataaatcactatacgaatctgagcacggtacgaaattaccagacttacgagacgtgtcgggtctaccctataaaataattattttttagtaaatatttatatgttaaatattgtatatcttaaatattaagatgaaaatataaattgagaatgagataggagaatattaaaataaaagtttagaaattaggttctaaaaaatttgttagtaagatataattgattatacataatgtatatggaactttttttttatgtaaatataagataagaaaaaaaaaataactcttttgtttatttttctatttgcatattaaatttaatttattttttcattcctattcatgtatttttagttttttactagctagtaactaatatttagttacaattagtagagcacttgcaacaattgagttataatagttaaaagctaaaaaaaatagctaagagcttaaaattgagctccaccaaatgctaacccttagctattatgcctcatcccaaacttcaagaattttttctcatgaatagtgaagtggtaaaatatattatatatatatatatatatatatttttctctctttcattccattaattacttttttaattacttttttactcattttcatatttctctttgttttaattaatataatatatataaagatgtaatatttaaatgatataaagaaaaatatagagaaactgatatatagtgtaatgtaaatgtgtgaagtaaattagaaaaaaaataaaattttggcgagatattttaaaaaaataaagtagagaagctgttgggagtcctctaactagttattaatttttatttgtattcatatatttttattactatctaattactaactttactaactacttactcattagtaataaagtactaatttaactagttactcataaatgatataactagtaagtaattaaataattaaaattttaattttatagtatttcttatattgtaggttgtaagatcaatttgcaaggatctgatttatttggtgttgatctgtttttagccaggatgtatgcattcactaacttttgtcattaattaattatcaatgcttagaagaatttaaatatcttaaatatttatccgtagtgaaatagtttctacgatatgttatattgcggtcgaatgggtagaataatatgcatgttggaagagtttgaatatcttaaatatnnnnccgtagtgaagtaggttctgtgatgtattgtactgcagtcggatgggtggaataatatgcatgttagatggatttaaatattctaaatattcaaaagtagtgaagtaggttctgcgataaattatactatggtcggatgggtgaaaaaaatttacattgctaaatgttgttgtgattatttatattattttggaatgagtttcgttgttattaataactttaattttttggaaacgttcaattatagtcgttatgttgctgaaattttagtagaattagaactagttactagttagtaatttagtatactataattagttactagttagtaatttagagtaagattagttaatagttagttacaaattatataaataatagctagttgtgagaaactagttagttacaaattatataactagttttaattagtaatatgaaagaaacccttgtctcaattgctaccattttttaaaatcttagggttatgcatctcaatcaataacgacataaaaaaatacctagagtttgagataagtggttagagttatgcatctcaatcaataaagacataaaaaaattatctagagtttgagataagagattatctcttaaaacattgtatcttgtttgaaatttaaggcacattaagattgagtcagtagttagtaattcagtactaaatattgagattagtgttgttgtgtttggtttatcttgttttcgaatggttttgtagttattagtagctttaaaaaaatttagaacgtttaatcatagacgttatgcagttatgttgacaaaattttggtagaattaggataaaattatttgatttaagtttctctcaaacttgcatgttaagattttttttattaattttcgttatggataaattatggacgcgtgaggagagagatacactacaatttcaagtaggatttgaggcctttatagagttttccctaaataattttagaaactcgaatgtattcattgtccatgcgtaaattaccgtattagatcaaaagaaaacattacgatgattaaggattttgtgtacttaagaagttttaatagaagttagacaacatagtattagcatgatgaacatttaactgatggtgcatatccattagggaagcgggggtagatgatattgagggtaataattttgatgatcatccaatggacttgcttgatgaagcacaagaagaatctcttgttgatcctaaaaaaatcgataatttgctaagtggtgcagataaactcttgttcgatggttgtaaaaaaataagattacctacaatagtaaagttttacaatatcaaagcagaaattgagtgagcaataaatattttactcaatttagctgcttttaaagatatttttccatttgataattgtttcccagaatctacatatgaaatgaaaaaaactttaaattttataggattgaagtatgaaaagatctatgtatgttcgaacgattgcattttatagtgtaaagaatatgcagacatggacaattgcccaacttgtggttaatcctgccataaaataaataagagtaaggagaataggaaacttatcccccaaaaggtggtgtggtacatgcctttgattatgcgacttaaacgattatatcatagtgcaaaacattctgaaattttgatttgacacgagacagagagagttaaaatggataactcaaacatcctgtagattcacaagcttgaaaaaaaaagtaaactacataaatctagaattcaaatctaaaacaagacatcttcatctcagtctatttgcggatggagtaaattcatatatatctctaagtagtctcgtagttcgtggtttatctttcttgttatgtacaatcttcctccatggttattgatgaaaaggaaattcaatatgctttctttaattatatcaggcccacaacaacttggacataatatcgatatatttagaactattaattgacgatttaacagaattgtatgagaatggtgttcaagcctacgatggtcttaagaaagaattctttaatttgaaggtagtgttattgtggactgttagcaatttttaagcttagagtaatttatcaagcttaaacacaataggttaccaaggttgtccgatttattacactgacacatgagcttgttgcttgccaaatggacacaagatgtgttatatgggtcatagacggtacttgcctaaagatcatcctgatagatagaagaagaaaacattcgatgatactaaagagggagatatgactcctttgccactatcaggggaacaaattctctaagaagtagaaccaatagattttaagtatgaaaagacacacaaaaaaaaaaaaaagaaaccaaatggttgttgtcaaataaaatccatcttttttcgtcttccatattggaaacatttaggtttgacatgttggaaattattttannnnnnnnnnnnnnnnnnnnnnnnnnatgttgtttaaacatcctaaatataaactttctaaaa

SEQ ID NO: 110907 - DNA, 863 bp, Cannabis sativa
taaatctgattatattgaaatatgttttatttagggcacaaaacccaacaataacatcacacatctctagatactttttggagatctgttgggatctcaaagtactttatgtgtactagaggatcttctttcctcgtgtacatcttccaagttagcatcttgaatttggacaaggccaaggcattgatatgtgtcgagaaaggtaaaccctagacttatccaactcaaagtttgatggttttgggcaacttaagcccttgatcatgtctcgtatttgatccaactatgcttgcagagaaggatctgttgctgtagcggtgtagtttattggcccttattgattgagttgtagcatcggattggtagagcctggccgaccatactttgggaaaagatatattcaaggctgcccagccctgtgcttggcagggtttgcctgcccactcctccttcgctggctgatggggcctgtgcgttgacatggggtagatcttactaactgttggagtctaatgtatctatatgtgtgaagtgattatattcactccttaagttgtttttgtcttgggtgtttctacacgttccctgtcctcgccaattaaagattgtcctttcagtgacttgctcttggatttcccaagatagaacttcaccttattggctagccagaggtgcacttctgtgatattggccatccatgagttggacaatggggggcattgtagtgccagatatttctggccaacctcctaggccaatggctacgaggatctggctattatcgttgttagtccttcgtggcaaggtctgttgtaaagaccgcttagtttaatttgaaaattagcagttaatcatgattaatt

SEQ ID NO: 110908 - DNA, 8359 bp, Cannabis sativa
taataaaaaattatacataaaaatatatttaatttatattatttaacagaaaataaatttataaaaataaaaaaaaaaataagctaagagtgagattggtgcggaccgtgtggtggccttggcgacgacggacggagtcatggaggaggaggagccgccgatcctggagccaagaggaggagctgccaatcatggagccgaggtcgtcatcgatccctcccctgggtcgtcgtcggccgtggcgtgggtgaggtctgctggacgctggtgggtgtggggtgggtgtgggtgaggccgagagtgggatcgtgaggtctgggagccgtgtgtgtgtactgtgtgtgttatgttattaggttaggggctgctgaatgtaaatgatttagggttttttattttttaattaataatttaatatatatatacatataaactgtaataaaaaaataaaaatatatataatatatttatataccaggttggcgggcgggttctcgggttcaacccgaaactcggtatccctaaaaactcaacccgcgaacccgctcgaagggtaccgggttgaacccaacccgcccgaacatttttttaaaaaaaatttgcgggttcaccagttcaggttcgggcgggttgctcgggttcgggtcgaacccgctcaaaatattcagtcctagcaactaatgtagcaacttgaattgcaaccaaaatctgtatagcaacccatatagaaactactgcataaactattttagaaatccaaactgtaaattttaaaaaaataataaaaaatagtatatagaatcatttaattggctaaatataacacaattttttttaaagttaaatttaacataaattttaaattttagtaaagaattttatcatctaattaatgaaagtaaaaagttgtagatttggttgggagtaggactcatagtatatagcacgtaataaaagagtaaagaatatacacatttaaccatcatagtcactcacaatgagtaccaatataaaattaactataatgtttgagtttaatttttgtcgtattactcattatttttttttaaaattactttacaaagtataattaataaattaattaatgtgtatgtgaagtgaagtcagtaaagtcgttgaggatagaaaagaaggtaggaaataacataacatgtcttcttgttttctgtcttttgagttttttgttttaaattatttatttaattattttaaaaataataataataataatataaaattatatattggaagagcgtggcggtgtgatgtgaagaggagttttgagttgagatgagagacaagtgaatacccccaaaaatcaaaatcaaaatcaaaatcaaatcaaaacaggtttcccaatttcatcaccaaaacccagaaaaacatcttaaaaccttttcttcttttgttgcgttacgttgctcctacgctccttcatcatcattactctctctcttaatctctttgagatccgatacaacattcatattcatctaattcatttctcttttctcagatcgattattactttattcttaaggtaattctgcatttcatacagttaatgtttggatcttcacatatcgatttttgatttatgtataaattaatgatttttgtatgtggttgaattttgatagagaaaagtaagtgagtgagtgagagggagagagatggcagatgataaaggcgttggagaaggtgagaaggtagaatcgggaacaacttcaactactacaacaaccacgagtgaggttgggaagaagaagaagcgtaagggtatcttttccagaatttggaatggaatctttagaatacatggcgatgattttgagaagcgccttcagtatatttctaaagaagaagccactgttcttgctagaatgaagaggaggtcccaaacttggaggcgtatgatcagacaccttattatatttactgtaatttttgaggtaccacttttctttctttctttcttacgatgatgccaaacatcttaatgtaacttgccttgtttattcagtttttctgtagtgtttgagattgaatgtcactgaattctgttgatctgatgttttctttttttagtttgttcttacaaataagcaaatggaatgttttgattctcaggctattgcaattggttatgctattgtaacaacgcgaacatcagatatgaattggaaaatgagagcatttcgagttttgcctatgtttcttttgcctgctatctcttctcttacttattcggcatttgtaagcttcacaaagatgtgtaagtgtccaaataacagctaaatgtttttttccctcttaagaatgggtgattcggcccccctggtttgtaattgcaggttgtttctatatgagtttgagggtttaggaatattttgttatgttgcctgcattaagaatgtgatagatttttccataggttagtggatttattctgagtcttattttcacaatttaatttgcgtagtgttatgatgataatgttgccaaatattttgacataagtagaaagaaagcaagtacattgcaaccctgaatccccaaaccaaccaactccaccctttttcccattaagttttggcaaggaattcaactcaatgtaaaatttcctttcttacactttgcaatgtttaatgtcttaaatgttcatatatagagttttggctgttgttgtttgtttgtgtgtgtgtgtgtgtgtgtgtggtacatttcttcttcttttaacttgcttgatatgatctctatctgctgtctataaaatgttaatttactagcataagatggttgaaatgctagcactggtccatgataaattataaaggggcaattatgctcaattgcattttagctaagttcctacgctgtatttcaagtttggcttggatcttcatattttgatgctttcttctgtctatgttatctatgtcttccatgtgctagtctatagacagtgaacataaaaccaatataatttatatctaactgtagcttaaactttggaatttgtaaattcttaacacgtgcatattttttcaagttaataataatataacttagtcgagtgttgtgctattatataaatatatgtatatatatagatagatagataaatattcaccgttcatcctgtatcctgtcgttgatgattcactgtattagcatatcaataaattgatagtttgtggtgtcatttgatgttttaggtgaccgcaaagaccaaaagactttggaaaagctccgggcagaaaggcaggcgaaaattgatgagcttaaagaaagaactaattattacagtactcaacaactgattcaggtgatggttaaaaaagcttgtaatgattatttgatttgcactaccccaggttagcactttgttgttttggcaatgttccatcatggtgaaacatgaggcattagtgataactttatttgggtgtatgttttgataggatttatttactacttaccagaattgggggaagtttttggccaattctgggacatatggtttcttagaaaggtgttaaaatttagtttatttgctttattttttgaaagatcaataccttttttatttatttaaaataagtgtcttttaaatgtgacaaataagattttactatcttgtgtatacgtaatgttttctgttcctaaactgggttgactgttgtggagcctgcaaataatggttatacttcaaagtatactatccactcgggcctagctgaagtggttggtgttctatggaaaaaaacttcaaagtatattatgaaatgaaattgctttctaaaagatatatattagcaaagatgaaacagggtttctttttaatctttctgtgtattcgttgtctttatgcatttcttatacaacatatttgtcatatggtgatgtatactggaagctctattatttgtatgtgatactgaaggtaatctctttgatgcagagatatgaccctgacccagcagcaaaagcagctgcggcaactgttttagcgtcgaagttgggtgcagattcaggtctgaaaatgtttttgggagatgaacccaatgttcaagctacaatgggaaagagcaaagatgtagaacttgttcagtctggtggacttcggaataggaaacaatctaacattcactcaggtagtgctgggggaagtcccttgcttcattctggtgaaggtacacctcaatctctggggagtgaggatccccagatatctgagcagagctcgatggttgttagtcattacaatcctcaaggatcccctgctcaggatggaggatggattgctcgaattgcagcattacttgtgggtgaagatccaacacaatcgtatgcactcatttgtggaaactgccacatgcacaacggtgagattttaatttaacaatatataatatgcccatttgtctgacgtacatcttcaggcaaatgcacactgttgtaacctactactagtttgtttttaactaaccagctaagtggactggattttgtctttgcacaggacttgctaggaaggaagatttcccattcatcacatattattgtccacattgtcaggccctaaacaggccacaccaatccgaagagcgtgtttctggctctagtacccctaattcgggatccatcagaggcgcggggagtagcgatgttttgaagactgctagtgttcttgcaagtgagagtgtagtcacaggtgacagttccattattagaaccatcccggagaacaaaatcaaggaaatgacagagacaatggaggatttagccagttgagaagcaagcatgcaaacttaacctgttcaccttggccatgcaggtggaacttttagtgttgtggaggtagtttatatgggatttgcttcatatgcttggttgggttccaagaaaaacgttgagagttcgtgtgcgaaacattatgtgcttttacttttacatatatgatgatttataccgtgtaacaacttaatatgggttgttacattcctgtacattagtttagttttttcattctaattattagtacttccccatgctttaaaattttgtaccagtgatgtggcatcttattattttgtgatgtttttttttctttctatttgtaagttaaaatatttagatgaaaaatgctagtttggttttatgtttttcttttggtactaaacatattaaaattgattttgcctttaatttattaattatagtcttatttaaattatattactatattttcaggaaaacttaatggtgcacaccctaaaaggtgtaccaatgcaccttatccttatttatgtttttgatactcggttagttttattcttaatttatatatataataatgtacaatgttttaagatgttttgtaaatttttttttgagaaatttaaaaaattttataacgttaaaaataagatttacatagtttgttgtatgcttgtttttattttattttttacatgtgaaatatgttatttaaactttgttttctatactataaattatttttaaaattttgtaaaatgtcttaattataatatacaatatacaacaaaaatttgagatattataacattcacctattggaagcgcaatggggtgattaacttattttgaaaattaattatataataattaaatgtttttcgatattttgtattggtttgtttgtgtgaatgttggatttgctgactttgtgatgttttgcgagtattttgtgaaattttgcgatattttgttatcgcaaaacatcacaaaattcaacaaattcgtcatttacaaaagtagaccaataaaatattgagaaaaatatcaaaaaacatcatctttaactctaaatttggtcgtataatgaaaatttatcgcatataatttaaaaatatcgagaaaaaaatagaaaaaaaggcgcaaatttgcagtaatttttcgggcataaaatcaataaaatacaagcacaaatgtgtagatttattaaaaacaaactacatgcatataaataatcaaccccaacaacattttttttagtaaaatcactaactcatattgttttcccacaaagaacaacaagacccaaacttatcgttggaaccaaatggttagggccgaggagatgggtcgtcgtaggaaggtttcaggagggtagaaacaattgcagtagtggtggttgcgatatttgagtcttgatggtggtgttggctgatagaaagagagagaagagagaggaaagataggttaggaaagtaatgagagaagtatttaaaaataaacataaattagtaatagtagaggaactattttattattgagctacatttaaacataaaaactcaaatttttctataaatgtatacatatatttctttcatgggatcataattccagtaaattgttattctaattggttttttttccttgtgaaattttaagttaatttttttattgtttaaattatttcttgtgaaaaacatgcaactgaaaaagaagcaacaagaaaagtggttattttaattttaatgaaatattattaatatatattaagaatatattaatgttaaaaaaaaaaaaatcaatcatataaatttgattaaaattgatttatttaataatctaataatctagttttaatttttattatattattatgattattttggcaaaatgtgtgttactaacttatgctagtcatgtacaataaataatttttgtcctttgttgtgttgtgtgatttttgtttagttgattttgtttgtgtaagttgtaacgttgaatgattaatcaacttcacagataaattttctattgttaggtaattttaacttttttacttaaaaagtagagtttaatttgaatactaggcttatgtaatttttttgtatataaatttttattgacattatatgtattggatatttttttgtatgatattattcaattatgcaagtaggtattgtggtatatatgagagtctcacagtctttcaagcagaaacaattcttttgatagaagtgttagattggtatgttcctcttcagtccattgagagtgattatttagctttgattttggttttttccaagcggtcatctttttataatgaattaggatctttcttaaaaatattgttaatttacttttcaattttgttaagttgtccctagtttatgttcaactgctcataaattagttgtgtatgtattaaaggtgaatggtaaattttgaattgacggcgacgacaacgtatgtttttctatctttcataataatatattaaacattcaccattcaccattcacccttaatatatacataactaatttatgagcagttgaacattcaccattcaataagaggcatttgtagcagttttgaattggagaacttgatggaggttcgatgatcgtgttctcatcgagttcatcctcaacttaagacattccacaaacgaaacccttatggatcttatatcgagctcattgagattgtatcgaatttgcattgagcttttatcaaaattatcaagcttaagaaaagaaaaaaaagaagattttataaaatccaacccaattcacacgaacaaactcaaaatcaatcctacaaccaaatatttaacggttcaatgaaggtggtggggcggtggcggtggcaaaggtggaggcaaatggtttgttaggtttgggttttggggttaggaggctttggttttcagagtttaaaggacgacgacattcttttttctgtggtggtcattgtcagaagggacgggtactttaagtagaaattattaacatatttttgttatattcatagaaactttaacatagaatataaacaatattatcctactgaattaaatataaaaatattaaactatttatttattttactcatcatcaattgattttaaaatattaactatttatttactccatttcttattaattgattttaagattaaacccaataattcacttaaatttcctattgcaatttcaatataatacgacctatcaagatttaatacaagaaagagttttgaacttcgaaccatcactttagcacgataacacgtataaatacttacaaaatatacattgaaattttttatgattttttatattttaaaattatattaattttccatgcaacattgaaaaaattaggaattattatataaaaatacaaactaatattttatttataaaaataccttcataaaatgtggacaacattttatacattttatgtgcctttaattactaaaatacctcttacactatcacttacacaatcagacgaaggttgctgagtggttggccgaagg

SEQ ID NO: 110909 - DNA, 3635 bp, Cannabis sativa
atacaaatctaaattaattgtattaaaaataaatttgcaaaataaatataaattgatacaattaatgtatgacaattaattaaatgtaaattcctaaatatatacttattggcaaatttttcaaaatttattaatttagacaataaattccataaatttggtaatatacaattaaatgcacaattattacatacctaaataaatcatgtaataaattaccaaattaaaaaaatttctacttttaatttataccaaataaaatataaattctaaatatatgtattaaataaaaaaaatagaaaagttgaataaatgtaatttattgactaaataaacacaaaataggaaaataatcaatattccaaataaataaaaaaaaaatcgaaattttcccttttattttttctttttgaaaatgatactgccagaaacgacatgtcgtttttgcatatactaaaggtatcaatttatgtcgctatgtcttattcaatgagaaaaaaatagaaattatcttttgaagagatggccgagtggttgatagattgaaggcaaaacgacaaatcatttatcaattgaagggtcgctcacacacgaaaaaatgacacgtcgttttgggtcgtctctttagccgaccgggacgttttcactcgtttttctatacgcgggtcacggtggacccgacctgaactcgatcgaaactcttaattccgacgaccaaaaaggcccaaatcaatttcaaatgaatataaatgtaaaaattaagacattcatatagatttcatacatcgaaaacacgtaaaataaagattttaaactcaccaaaaaaattcgagttcgaagaaaattttctagaaatatttttagatttctttgtttttcaaaataggttttcatgcttagaacaatctatactactatatgaatgtattgatgcataaaagattcaaaataaaaactgaaagtgaagacgaaaaatttacgaggcacgaaccgaaaactaaaattttcatgtttgtatatatgtatttaatgtatatatcccataaaaatattataaatatatgaaagaaagtattgtaaacattattatacaataaaatcatatattcaacatataatatatataaacatatatgaatgaaatatatatacatgcatatagaacaatacgtaaatagtatatatataaatcaataatataatattataaatatgcatatatagattaaattaaaaaatataatatgaaagtttatatataattatataaacgagatcaccgtatatatataaacaaaaatcaaataaaaacaagacaaagataaaaatcactctcatacaaactgttagactatatataatataatatgaatataaaacatatataaatgatatgtaatgcggaataaactgtaaacatatgaaaaactgtatatacaacaaaaggatcgaaatacctccagtcattggtgtttgagcttgaatccatgcgatagttttagtatgggtatttggatttcctcgctctctcaactctctttagatgatatttgctatttccttgaacagaatgactgaagagctcgatgaccgagaccctatatatacaggtgagacactctatcaatgtttgtggcacattaattgtcagaatattttgacaattaatttaggaaatcaaatcaagtaataaatattgaaatctcaccatataaataaaatattacgtaattaatttattgaatataaagtattcatgtattataaaatcaatcatttattttattccttaattagacacattctaatacacatatcattctaagtttgtccagctaaccaatagtctttgaattcatcatggtagggactaatgtaagtgcccaaccctataaaaatcctatattataaccatatataaatatatgtatgaaatacttctcaatgggtactaaataaatttaactgtaaatatttattttgaaaatattaaactattagatttttgttcgatagcgaataataaaagaaaatttttaatttttatgcataatttagctacatacttaaaaaaaaatatcaaaaaatacttttttttatactatatcaaaaatatgtttatataaaaaaattttaaatcaaactcaactttttttatcacttttttgtcgaatttttttattatttttttcagatgatggaccaatcccaacccaaataatgtaaaaatgaaaaaatttactaattaaataaataaattaatcataaaaacttatttttttctaatattacccattcattggtaatacccattaaaagtgtacccaaatatatttagggaaaattaaacagtgtactatcttttgcctattttttacttttacattgccatgcggtatagattacatttatactgtataatttaatactttatacgacagtgtactactattttttaaacttttttatatataagctgtaataccctagaattaaggaaatggatttgcaaaaccctaactagttaattgagtattattgttgaattatattattatataatttattatatgtgaattaatatgagatacaaaatgttaagaccccgtaggtgagctaggggcattttagtaattttgacccgagaagggtaaaacagtgaaatatatttatttacgtgcttgtggactatattattttatagtatgcttgtgttctcttttttcaagtgtgttgtgacaagttggcgcggtatagtcacaactgggtatttcggaccgaaccgagttcggggccgaaatacaattttgggtttaaatattagtattttatttatgtgggaataatctgaaaattaattgagtttatttgtgtgtgcaagtggctattttacccttgaagtgcttatgtggatgttttatggccttaagggcaattgtgtaatttttaccattttggagtaaggtttataaaagggattttaagcaaaattaagatttaattttctgtattttgccatgccctttggctgaaccccctttcttctcaaaaactccttctaactcttgattttgggttgtgcttccttgaattcaagcttggggtttgtggcttttgtgattgagattgaaaagagttatttttgcattttaaaaaggaaaaattttggctttttcctctgccctagctgaaccccctctccctctttccttcatatttttattttgctaagtgttggaaaattcatcttgaaagtatggattcttggtgggttttgtgcttagctttgtttggagcttgaggtagttcttaaccccttttatttgttgatttttcttgctgaaatttattgttcaaaatcatgaaaatagtgtatgatgtttttggtttgcttgtggggagaatcaatattaatcttgagaaatttgggtgttaattgcttggttttgtaatggattatgttggttgggttctagatgagcttttagggtaattttcatgtttgaattcaggtcttgtttgatgtgttgtttcaggaaaaaaattaagtttgaagcttgcttgaagttcaagttcttgattaggaacttatgatgaattatgatgaattttgctctaggtttggagctttgatt

SEQ ID NO: 110910 - DNA, 8444 bp, Cannabis sativa
  modified_base (3899)..(3918): a, c, t, g, unknown or other
  modified_base (7812)..(7826): a, c, t, g, unknown or other
cacgtacaaatctcttgtgtcaagtgatttaattttctgcaactatttttatattctgtctgtcctattttgtctctggaaaattagtttctgcagtatcagaattactttaggctgctgcagacgtatacaattttaaatacagtatatttctgtaataattattggcatttgtaaaaactcggtttttcactcttgatgaggaagaagcagtaggacattcttttttagatgaaagtcttgcagcgtggaaatcatataagtaggagatagcaaaaaaaaaaaaaagcaacacatcaaaaggttttggcatagatccatgtctttctttattacgttcagtccaaattctctaaagaatacatgcgaattgttcaagttggagagaagtccattcctcaaacacctaaaaaaagtcttgagactcatttgtttgtataagatatcatcaagagagaaggtagatgcttcctggactcgtttgggttgtctatagtaaaacaaggcgtgtacagtgatctccctttcacaaatgcatagtgtacacagagcaaagtcactaaggtgcctggtatgaaggatgtcagttactggtagatagtcgtggatagctcgccaaaaaaaaaatgcaaacctttgaaggaatagaaaggccccagaactttttccaccaccgtgtagtagacaacgtactcgaaggctgctgctcttcaagtataaaagccaaattatagcctgatttgactgagtaattgttagtagattcatgatgtcaaataagttgatcttgttgttgaaagatggttaatggaatactttgaattttctccatgtcggaatccaaaagtagagttcttagaagagggagatcccatttccgtttatcattaattaatttagaaactttcatatcaaaatctgtatttctaagtacaagcagttgtagataagtaatactaggtaatcacgagtctgaagcacaacaaagagaatcaccattgccaaccttccaacgcaaaccgtttgatattagttctttaccccaaacaatatctctctaagttaaagatggatatcaaccaagatcaacttctagaaaggagttatgtttgaagtatctctattcaagaatctgactgagaagagaggaaggattggagaagatatgccatgcttgcttagcaagcatttcctggttaaaatggacaaaacttttaaaatccatgcctccttccacctttgattgacaaagtgctttctaagttgtccaatttattctagaaccttttgagttagagccccaccaggacatgttcatcatctttttaatttgatttataagagactttgataggcaaaagtaactcatagcataagtgagaatcgattgggcaaccgctttgagtaggacttccttttcccctattgaaaacatttgtttcttccaagaggacataaaattcaataatttatctttgattttcacaaataagacctttttgtctctcccaaagtaagaagacagtcctaaatatctcttgtgacaaggttgaatcggtatttgcaagagttgctatagattagcttgagttgagggcaaggtgttcagagaaaaggagcgaactgacttctcggcattcactttttggccacatgcccgacagtaaatgtcaatcgaacgcttgatagcagttgttgaatgcttatttgcacgacaaagaactaggctaccatcaacaaaaaatagatgagaaactgaaggagcacctcgagaaacatataaaccatgtagatttctactgcgttcttcaaattgaaagagttttgaaagatcttcagcacaaattatgaatagataagcaaaccatttatcttattcctctagtaggcgtgacatggccttgaattgtaccattgactgaaggagaatgacacactagttaagcatctcataataagtcccataataacatgatcgaagaccatatcactcatcatgctttgaataaaatgtcattctactctgtcaaaagctttactcatatcaagcttgattgttgcatacccctctttacctcttttaaaatgtttaagggaatgtaataactcgaaagctaccagcacattatccgttatgagtctagactgaagaaaagtactttgggactctgatataacttgtgagagatatcattttaaatgaagcacaatagttttagacaccagtttatacaatacattgcaaaggctaatcgggtgcagttgtgacattgaagtgggcttcttgacttcaaggattaaagtaatcaatgttttgttgaagattgaaagatcaccaccatcattaagaattttagagacaacacttgtaactaatttacccacaatgtgccagtaatttgtataaactattattgatatactatctaagcgagggctgccatcaacactcatggaagaaatagcattaaaaacttcatcagcagcgtatggacgtgtaaggactttgttcatttcatcagtgatcgtacaagggacctctgaagttacatactatatattatgggtgttcaaaaattttacaaaccgcccaaaccaaactgaataatttgacaaaaatacaacccgaaataatataatgataatctaaaccacccaatgaatatattgggtggtttacaaattattctagaccgcccaattaacccgaataaactgaattgaaccgatttatatatttttaataaaggtgtatataatatattacataaattacattcattagttaaactattttgtatttaaagtttgaactttatagtgtttaacttgaaatttaaactttatactcaatactttttattgtatttggatattaaaattgaaatttaaaatttacactatattattacttttatttttatttttatgaatatttgtttaattattttatgttcattcaattatatttattttatgttaaagtttttaaaattaatttagactatagtattttttaacttgaaatataaataatatatttttattttttatatccaattatttgaatactaaaaactaacaataacaattataaaaaaaataaagattagtttggacgggttaacccaaccaaaccgacaaaattattggaagagttaaaccttttctaatttttaattggatgggttacaattaaatatttacaacccactatttatgttgggttggtaaaaatatattataacccgaccaaactgattgacgtacacccttactagagagcatcatcatctaatccatctgcaacataaatattagcaaagttattatattgccaatgccattatgagaagagtgttcaattccattatcatctaccagtttgttaatgatattataattacgcctgctattagctttctaatgggaaaaacgagtattagagtcactagattccaaccatttaaagcgagagtgttgttgctagtaatcctcttcctgtgccaaaagatcatccaatatagcttcattggaccaaagttccttgaaatgggtagcactagtgtcaagagagttttgcaaaacaaccaccttatcatgagacatcttgattttcctaagaagctcaccaaatttagatatgtgtcatgaatggagatgagataacaaatggaaagattagtcattacttgggcaataaggtcaaccgcactagatttccaagtattgaaaataatatcaagacaaccatcttccttaagccataacttctcaaaatgaattcttgatttatatttggctaattagttatttttctccccgaactttgacatgtaccaaatcatgctcccagaactttttggccgttaaaaatttcctctgaactattgagattnnnnnnnnnnnnnnnnnnnntctaattttagtaaaaaaatttctaacatggatgaaaattcaaggggcatgatttagtacatatcaaagtttgagggacatgatttggtagatatcaaagtatggggagtatggtttagcacataaacaataactaaaacagtaaaattgaatgaaattacacaaaaatccttaaatctaacaatctcaatagttcgaagggaatttttagcggccaaaaaagttcagggggcttgatttggtacatatcaaagttcggggaaaaaaaattcgaattagcctttatattttggaggaggagctttcagcaaagaaataatggaaacttttaaggccatgtgatctaaatggaaaaaatccaagtgtgataaaatgggcatcgagaaactctcaagccaagcattattaagaaagcggcagtctgatctttctttaacattaaccatatcggagaggttaagttccaacaaaccacaatagttaacaatgtcatgaaatccatcaatttgtacttcagaagacaaaggacctccaagtttatcagagtgagaaatgatttcattgaaatcacccataacaagccaatgcgaccaaggaaaagtgtctctaagtttatgtaaaagctcctaagtgagatgcctattaaaaacagaaggagcaccatagaaacccaagaaatggcatgaaggaccatcaacaaaagccatagagcaatcaataaagtttattccctagttaacaatacttatatttacatgagacttccaaagaaaaagcaaaccaccactaagactgactctagggacctcaatcccattaggaaaattaatagtattgcaaaatttcgtaatagaaccaacgctaagtctagactccataataaataaaacatcaagatggttttctgaaatgagcaaataaaattgtcgaaatgctctcagattactcaagccccgagcattccaggataagatattcatggtgattggcaaggctaagtagcagcctacgccaaagaagcatcaatattgtctgccactagagaaatattagacatttcagcgatggtttctggttgttgatgttggaatgtattcgtagagtaaatgagtggagtgtttctagtgagacaacaattcagaacttgtcttacattaccacctgaggaaatcaatttcctttttgaaacaaggatggcaatcgattctcaacagcagtcaccaaatttgggctgaaagttgatgtagtaggatcaatcccagcttcagcctaggataaagaactgttgaagaagagatgatggaatcaaagggtgtggttgtagcctttggagagacactaattggagaaggcaaaacatgagcatatgctggggggttaccacgaaaatagccactgaagaagttgaattaatcacaactctactcaacgctcaaaacttaggcaagagattacaaaactccataaaagttttaaattcaagcaagagatataactctactctgaattaaaaaacttaagcaaaaagttttaaacctagaaaaagtcccaaaattgagcaagagaaataactttactcgaataccacatgagatatgagatataactcaactcacattctaaggagaaggaacgtgttttaaaactccacacatacaagtccaagaacatttgtcgtgcccatgcacacctcttcacaacaattacgggcattggtcgtgcccatgcacacctcttcacagcaattaaggacattggtcgtgcccatttacacatcttcagaagagaagttacattcatgcactttacaaagaagtatttttttgcggaagacttgggaaaagtgcaaaagcattacttgaaggcttgcaagcaaatacaatttttcgtaaaaaaataaaatagctactcttgcacaagtgcccacatgccaagagtaccttgaagacactaaagtcaacctgacgactttgaccaagacttataaaaatgtcaaataaggcaagacatccttcatgagggccctatgacagttctagaggactcaaaaatgccaaccaaccatgtggcgtcaggactcacacacctaagtgtacccaaattagggttcatgggcccacgtgagcattttcaccctagaaacctcaatctgccaaggaaaccaacaaggacttgacttgtttgggcatgaaaatgacttgggtttatacataaagtcaaaagggccctaaaaccataagaaaagagggataaatgaccactgtcacaaggaaatggcagtgctctctagtttgggtgaccactgcctcaaggagatggcagtggtctctcctcgcaaaccatggaagaaaaaatattcaaacgagttcccttgacatcaaggagtaaaaaacaagtgagaaaaattatttcctacctaggaatcgccctaagtgaccattgccataaggagatggcagtgctccccagtattggagaccactgccattgtggagtggcagaggtcgaccaagaagaagggaagtgagattctttgccaacaatgcattttcatcaataatatgtcaaaagcattagtcttatattcataaatctcgattaaaatttcacctagaaatcatttcctgtattttatctgcacactcttgagaacataactctggtgtgtcggatctaatcaataaaactacaagtagacgtagtcccattaccatcgcgacatggggagtgaactactataaatccctagtgtccattgaatttattattgttttattagtcagattaattcattatagtccttttctattttacgatcttcttagatcagttcacgaaaaaccgcgtcaacacatagctaatacatgtaggagaggggccatggtcctaaattttcaaaaacaatgttttttggtttttgttttatcttttaaactatacttacaaaaaatgaattgtcaaaaaaaacattttttaatattttatttataattttatgacttaaattttttattcacaaaaatactcttttaaatttttaaaattatgaaaatatacttttctcagcaaatagtaaaaaaaaacaacaagaaatcaatctcataataattataaataaattataaaacaacaaaaaaaaaattaggaaacaatcttattacaactataaataaactatattgttttactaatgagaatttttgtaaataaaaaaatttaaaacataaaaataagttttttttcgtattgacgtatttttgtaattttttttcttcaaaattttggtctattttgtaaagtttctaaaaaaaaatgttttacaatataaaaaaggataattagcgacaaactatttgaattttaaagtttagtaaacctctaaattttggttctattttgtttttcactattccattcactttaatgtgtgtgacaagtttttatttatccacataacaaataaataaatcctatagtgtgtatagttgtgtatatattttatttattaatgaaatacgtttttaattagttagttttatattttattaaataattaatataaattataattataagtgattttattaataagttaaattttaacaaattaataatattttttttttgaaactcttagaatattttaacgtttaaaaaaaattaaaataaaataaatccaaaatattatcgtaaaagtctcatatttaataaataaaatattatatgttttaattatgagtttgagtctctgtgttttggaacgtgagagcttcgtgcagccaatataaactacttggctgtcaaaccaccttaatataattgagaaatgttaaaaggcattagtggtgcttagcaccttcttatgtatcaatattgttattggtgtaattaagnnnnnnnnnnnnnnnaatttaatataatagcttttaaagagtatcgctagcaatcgcatcgcgatatgtcgagaaagtactaagcaccattagtacctaatagcaatgctcaatataattttgaagagaagattccctccataattattattctttgacatatatcaactttctattataatatatgtttgtataagccttattgaaaaaagaaagaaaaacaattattgatgcatgcatgtgccaagataataataagaaaatcatgtgcttatcatcactttctaatctctcaatggaaagaactatttattatattattcattctcttcattctcttgacagaatagaagaaacccataatttgtttttactatatattattagatgatatatatgtttaatgataagatgttgttttatgtcccttcatattctatgtctgctgctgtgtttttatttatttatttttaagttatataaaattaagtaattaaaattacattactaggaatataagctgaaacatctcttgattgggtctcaactattggtaaagcagtcatacttccttcacctaaactagaacttgatttagcagctctttccaaaaggcgtgaatgcaaataaaaa

SEQ ID NO: 110911 - DNA, 2316 bp, Cannabis sativa
cgaaaggagtcattatattccactacaaccaatataaggttttctaaaactcttatgtgtttaattttattgttttagagaatttatatttaggatgttaataacagtcatcaccatataccaaattcccaaaatttcacaaatctgattgcaccattgtattcatagacccaaataaatagcaaatgccaaatcccatcccaatcctaacaatattgaaaatatttataaaaatatcactatagtacaaattaaacatcaatatactactagtatgcaccgccacttgaccaccttgtgaatattacttaacttgtatcgtgtcatcttagctcacacgttacactacgcaatgcatatccattcattgataagtctttccattctctttcttacaagctctaggtgctaacaaaattaacacttacttttttgggtggaaaatgtcacaccgacaattttgatgtatttggtatttcactgcctgcggcagcatgttaattgaatataactgataagtttctcctgtgtgacttgaaacaattcacaactcacaaatgtctatgacattagtattcaagtttcatagacaagacaaagacaagtgtagactaaaaaaaaaaagaaacaaagaaacaaaggctggaactgatttctttttcctgtactctccttccatcagtacaaatgaatacatagtagaataatataagagtaggggaaggaatctattcttgtaaatagttttgtgttgttttcaaaaggattacaatgaaacaaacttggctccatgactgtcaaatgcttttaaatacatgtttttccaaaaaagccctggccaagttactgaagctgacactcgtggcttcagcagtagcatatctattgatgagatctatcacttctggttttaaaacctcgcccctgttagaattgttgcagagataataaagagatccaagtgccgaattcacctaaaacaacattagaatttgctactcttagtaggtctatcaagttcaaagtgtctcaaagtcatagtttggaatagttgaaatctaaaccaaggaacaacaatacacaaattaaaacaagatcatttaggagtatattatgcatctcaaattgaggtcccagtagaacaaaggacaagcttacagtgttttttactgggcttgacaaacactgtattgcaagagggattcccccatgttgaataatgattgcagcattttcaggctctacaaataaaaaaaaaaaaatcataccaacaaacaagttatcagtaaaaagaatgatccatctgtttatataaacaagcctcaaaataaagatcaagttatcactggttaatattgatgaacataccagcacaagaattgcatacccctcctattccaaattccactagcttctcgtttggttcagttatgcagtccagaaagagttctaaaacattgagctgtttacaatcttcaaatgattatcaggtaaaactttatagacaaaactttgaatttaccactctagccaaataaattatacctggcgcaagaatgtataattataaggatcataagcaaagttggccaaattagcaaccactctctcttttgtttctgcatataagaatgaaataggaagtattatttcttagaggtgataataagagctagaggtaataaataagttgtttatcaaatttacataatatgtcaacctgattcgaactcaaggccatctgctagctcaattgctcagaattcaagggtggattgtgtgcaaaggagggttcaaattaagtcaaccattatgatcattcaccattttctttcctatcaagtagggtactcaagacatagcacaacaagaacaagtcttctagtctaggccattttaaaaaaatgcataaagacaattcaaatcaaaatctgtggaattttcattgagctgtaaaactaaatttagaaacccaatatcgaaacaaaccttcatttgtagcgttctgaaactgagtaaccaattcctggggcatgtatatgaagcttagtgaagcgaaaagacataaatttacagatatgatttattaggtgtgtgtgcatatatattatacatttaaaaaaaaaaaaaaaactacctgaaggtattgaagccttggagtaccgtatctcccggtgcgctctttttgccttttatcattggtaaacattgtaatatctatgagacaaacggaaaaagatcagatgacaaagttctaaataggggtgcacacgggtcggattttcgggtagggtgtaatcgggttcgggtcctatt

SEQ ID NO: 110912 - DNA, 5716 bp, Cannabis sativa
taagtaacgtagcaggaagaaatatctaatactctttgagaagtaatggagaactagtggttcaagattttaaaatttgatgagtatgggctgatcgctattggcatgtgaaagattcatcaccgaccattcaaacattcagatatatatgcttattagactataaatatatattcatttaccaagtaaaaactagagatacctgatcgagaagtggtcgttcaagattcttagagcgtaaacttgagtctataggtttgattagaaagaatgcatcggaacttgcagtaattctcctataaaaaattcatataatctatataaatgtgtctcgttcgatgaaaataacctagaatgagaatctttctcccaaaaatatttcatttcttttggtagtgcagaagaagtataagaaatgtagtataggaataatggaggaatcgaagaagtaatagttcaatgaattttgatttgaatcgatggattaaaatctattgaattaaattttaatatttttcaataaattataaaaaattgcaaaaaaaaaataacattttttttttatttttattattgctaatattattaaaataatgaaaatttacatagtattatctcaaaacttacctaatttcaaaatagtatacaatattattaacatatatgttagtcttctacatgctacacacatatacatatggcatcgttctaaattaattttctcacaagaataatatagtttcattacgcattcaaacctttaaatatgcttaggcgacaaacttttatttgcgaaataaaaataagaaagaatttctaatttaatattcattttctatgtatgcaaggagaaatacttgatctaggaaatactgaggagaaatagtggtgatcaagaagtgttcaagctttttggagcagtgtaagggcttgaatcagccaacggatagtattgctcggtaaaaatattggattagaacataaattcgagtgagtataaaaaaaagagaattggacaaagcagcacatgtccatgatctggctaagagaatcggggacaaggtgacactttttacaaaaaatttatttttattaaacaaaccatccaaaaccatcatggtacaatcaaaagataaagacgttattcaccttccagttgtacactccatgctgtaataggtgtatctctcgtaatccgttcaaaaccatctttttcgcactcaaattcctaagagttcctaacaatccaatatagttttactccattataaatgtggtctaccaatatctcgtttctcattctctagtctgatgagttataatttcgttaccatatctaactaaaagtaatgcatgattttgatattttatttcatattcattgacttttgggttctaaattaattcactatctactctaagtgcatgtacaaataatttatgtacgacaaatatataaactagtgtatatttttttttttgaattaatataaactagtatattagtttataagattatatattatacaaaatttttcatatttataaatacgtgtttaatttttcacataaataaaaaaatatatatttatattagaataaaaagtacatctatattcttactttgtttgcttaaataaaatgtatgtatactatagaccatagtaaaaaaaaaatcagtattaccacttttaaagaagcacccaattcattcgggtaatatacaaaatcaatagtgatataaaataaaactagaactattgcgatataatcaaacaagaaagatgctattcaccctccagttctacattccatgtcgtaatgggtaaatcacttgcaatccgtccaaaaccatttctttcccacttaggttcctaagagttcctaacaatccaatattattttacttcatcataaatatggtctatttattctcatttgtcatttttaagtctggtgagttataatttctttaccatatccaactagaaacaatgcatgatttgatattttatttcatatccgttattttttggattcaaggttgaatcataagacaatgataaaaaataaaattagggccgacttggtacgttgacaaagaaagatgaatcatacattaagaaacaaaagattcataccgattcgcatcaatttgatttcttgggttcgacagaggatatttaacattttgtttttttgtggaagcggaaggtaaagtaatgtctctgaaaaaaatttatttatttgacatttaatttaattattctctttattttacataaatatttataattttttatttgaaattttacttttattaataagaataaacggttaatacataactctaagtacatacacaactaattcatgaacaatcttattagttatagacaaacaaaaactaatatattagtttataaaatttatataaaattatatattatacaaaaaaaattatatcttatataagctttttagtttattacaaaaaaaaaatgtgtcatttatttcaaaaatttaatttaacaattatcaatgtaaaattaatcttttactttttctattacactattaattcattattccaaccaaagaatacttttccaatgaccatttatgttcctattatttatttaaaaatataaaaaataataatttatttgaaaagaaaagtaattacttaaattaaatggtcttggtatcttggtagaggcaaaatatctttggatctttaatcaaactctattttatccacttttttaacaatactcatattattcacccaagatatttaataaaaccaaataatattaaatgaaattatttatataatttacttaaatatataaagaaacaaaattgatttataaaaaaatcctctcgtaaaaaaaagtaatagattctttcttttgttattattagtgctaatatggttgaaataataataaatatatatctatccacacatatataggctcgtccttgagataatttattttcatcacccaaattaaacctttatttactataaaaataacaagaagagggtttccaatctaagtaacgtagcaggaagaaatactagatactctctaagaagtaatggagaactggtagttcaagattttaaaattcagtgagtatgggttgatcggcattgacatgccaaagattcatcattgaccattcaaacattcagatatatatatatacatatgcttattagactacaaacatacgttcattcactgacatgtagtgtaatatcccggaaaataatatggtatttagttggacgtattttattaaatatgtaattattctggtaatgaagtaagattatgatcttacttaggttaattagtgtgaatttattaaataattaaataaaacgtaatttattaattacaaaaattttattggaatatgtgggtatcatggatactatttttgaagtaaaatattttcgggcctggcgactgtgagaacttgacggtgtggtcagaaaggtcacgacaataaaggatggactattttggaagtattctggactagtttacaattttgggttgtcggttttgcggattagctagaattactaaactacccctaggtgtgctttcggtttaggattacttgaggaggggtaaaagggtcattttgaggattaatacttgattttttttgtccttttgtgacttatggcttattgttttaatgttactagaaaaaaaataagataattaaaataataaaggcttatttagaagacattagaagaaatagcacccaagatcatttctcttcctccctctctttcgtgacctagaagctagccaaaaaccaagggaattcttcacaatttctccttgattttgagtagatttggtaccgacgatcaacctagaagctttggaggtaagtcattttctatgaggattgtaaattttcaatttttaagttatggctgtaggattagactgagttgaggttgtgtttttagacttattttagagtgtgttggagtttgaattaagtaatttcaatggttgtttggattggttttagttagatgaagttaaatgagttttttcttcactttattatgtaattttgacttaatggttgaattgttgtaatttggagcttggattatgttgtatttatgttattacactgttccggaaagtttgattaggtttggaagagggttgggtcgaaattgaggaagaaaacccaaggttttctagtctaccagaattggtcgaccggttggttctggtgcaccagaaccggtcgactggttgccctgcagggagaattcccgggttttcttcaggttttgttgtggccaggggtgatgcgtagtatctattttaggttgtttatgtgttgtatgatctaatttggagtggttggaagttaggttcttgtctggttttggattagggttttattccggagttatgattcaaggtatttattgagttttggttatcgtgacacaggatcgggatcgcccagctttatttccacttaggtcggcccacacatttgagttttggactgagttaggaaaagtgttatacatcacttagggttaagtgattaacaattgtatcattatagtctcgattatgatcgagaacctgaataatgtgtgctaagcctcggttataatcaagggttggaaacgatcactaccgtattgagtaattactccgaaaaccaggtatagttttcttacttatcgtttgttgtatcgggcaacgatagtgacatatacaactcgtggttaacgagtggcatgggtactttatgaagtaccaagattgtgtgattacaataatgtgtaaatgtctaagtatgttaatatgtgattatttaaatgaatgttatattgatttattcacttttcttgctgagcctctgtgacttacgggtgctaaatggtgcaggtaaagggaaggctaaggttgagcagccatgagtctgaggtcggagcagcaatgtacatatcagccgcggtgccatggcctagtggacagggtgttccattttgattgtattttgaaatataaacctatgttataaaagtactattaatccagtttgtaaatattttgaatataggggaaccccgtaaatattaatacttattttttataacagaaattttgtgtgtttgatttgaatcatcaaaatttattttaatcacactttttggtataattatacttattagtatatgagaattttataaaagcacacacgtggcgcccgtgttggacaggacattacatgtagtattttgatttagtgcgtatgaatggataatttgatgtagtgcatgctatgatcatatttcgagcaataaatatggccaagcatgtgtatagaaaataataggctcgcatatcaaaggaatttatatgacaatgatgcaccttgggaaatattgtttatagtttacaatataagtcttaccttaattgaaaaactgagtttttgctaatgccattagttatacgaaattttagtataaacattgctgtaacaatctacagcagtagaatgtaattctgtcactgcagaacacagttttgtagaaagaaaccaaaaataaatagtgcagaatttaaaaacttgacacaagagaattgtacgtagtattaatgttctttcaaacactactagtccacagggccac

SEQ ID NO: 110913 - DNA, 8456 bp, Cannabis sativa
acgtacatgaatatgaaaaaaatgccgaaataagttaagggtgcatcaatatatcccttttaagggggtgcattgtagaatcaccctaaattttataataataatgaatatatagtatttttttttcatcactttctatacatttaaatataaaaaaaagttccttaaatatatttaataatttttttattgataacaataaattaatttatttaatgtgttgatattttgtgagaaattgtttacttcattaattttataatttatacaacaaaaacttaatttgtgaaatttatcataaaaagatgaaaagttcaacacctttgatgagagtatatactagaacactagttagaactgatatgtttgttttgtttaattaatttaagcattttattttaataagttcaaaagggacttaaaaaagaaatatccaaaacagaggtgggctccatcaccataatgccacgtgtcaatgcataattggcaggagcatctaaatctccgtctaccctcaacaactcccccacatgcttgctcttccctgctctccctctctaaacgcactgagaaaacgccttccatccccccaaaagaccgagagagcacccaaaagaccccatgtacccacctccactcagcttcggatccgaaccaaaagcttggtaattcaaacctaaggttaggtccgaacctcggttttgtttctcagttcgttgaaattttctcactatttcgatcacttatctctctcttctctttctctctcttgcacaaagaagcccattttttttttcttctttctgcaccgattcaaaccctaaagctctgctatcagagagtgtcgaaggatcagcttcgagcttcaatggacgcctctcaacgttactgtgagttccgcaacctccattcttttttaaaaccctaatttattgcaaaagcaaatccgtgctagggttttgctgcttcagtatttcggcagcttcgtggctgcttgtagagtttgaattgccggggttctgcttcgatcctggcgcatttttgaagttgatgccagattttcaaggaattttgcgattgtaggctatgtttggttgccaggaaaggagggaatggaataaagagctgaaattattttttgtgtcttttttttttctttttctgagctaaaaagcttcagcagaggcttaagctttctcctcactgtctttctttttctcttatcagcaactcgctaccccgattttactttgcttcttcttagtttgtttgaaatgtgaaatgggtcactttcgaaacctcactccagccctgagtttacattcctcggcagaatgttattatatcagatttctgctagttattaactttaaatgtgatgatgtgattcgcctccatgttttcagtgatttcgtttgttggcgttagttatatctgctaaccttttttatctgcaagtaattttttagcctcagtgagagcccattgtacatttctagacaaattcgattatttctgtttgacagaacttaggattttaatggttactagctgataatagatatagtgtttagttgtcacgagggatctatatctcgtctcttatcaaagaaaaaggcggttatcttattatagtgttatgctatatgttggaagcaataaagtttatcaagccgtatgtatgttcaaatatgttgtggaagctgtgtggatttgagttagtttttcgagaagttctatgtgtacttgtgagagagcgtgaactactgggaagctaaactgttgttttatgcatgcgttgattataaggattatttatacattagtcaaggaagttgatctcaacttgtcttgaattgtttgtaaaagttatttgacttggttttgtttatgaaaaggattacatgaagaaaaaactctagtaaactttttgtgttgatgatgacatggaaatgaagagtttagctttgagtttgaagttatttgttaaaactttagtgtcaaaattacatggaaattgaaagttctgttttttttcttcctctttccttctcctcctcctttattgatatgggaacagggatgaaataacattgatatttaaatttgatgtgataggttggtataatatctgatacgtctgaccattttttgaggaagctagttggaggctgagattagattttctgctctctgataggtaaatgttctctgcaattaatttacaacttaaatcaaaagcctatttgagatgcatgaaacaacagctaatgtgttgactcctattagaaggtttaggctgtgatgcaaagtatagggtacagctttcactgtatcatatctttttatgtataataatttgaatgacagcataagtagacatgatagctcatcataatctcttcagcaactaccttttttctttctttgaggaaagcaagaaacatttgaattattgatacctagcgttttaataatgtatcttttgactgcaaacttttcaggtttatgcttaagccaaaactaatacgttggatggttgtatgcaggacaaattcagtggattgtaactaaagtggagcattaatgactggtcttaggttggtctgaatgtgtttgagaaaaccttagcgtatacctttgtacacatgtaaaatctaaaactagctttaagtaggtcaacatttttaatgttaaattcatattttccttaggcctgtcatacaaaagctcagctgttgacaattgtgggcttgattatctatgcctggcaacgaagagggtgacagggtccacaatttttttggccaagagaacctgtcgcagggccaacatcatccccaggccattgacgggaactggcagggactaaataacaatttgtgggttggtggtggccagagacagattaatggtccttttatctctagtgtaaagaattacaatgttcagcaaccaggttcaaatgaatttatctcaaatttttattgttctttatttgtctccattttaatacaaatgttttatgagtttgtagtagtttgatatacgcttgtattaactgttgctgtggcttttcctaacagattcggagagaggccatgggagtcaatcttcacatatggctcatggtttaaattttacacaatcaaacctcatgccagagtttggtcgagtcccatcacaaaaccagcagccagctcttaatggctatgtacatggtaatcaggttttccaaacaaggcaaaatgaggcaaactttttgggaatggatacagatactagtcgacataatttaatgaggggcttatctatgccacaacaaggaaatggtcctgagcataataaaaaaaattcaatgaggttggaatcttctgaatctctagtgggttttgatttttttggtggtcaacaacaaatgagtggccagcatctcaacgccatgcaatctttaccaaggcagcagccagggaatagtgacatgcagctattacaaagacatatgatgtttcaacaacttcaagaattacagagacagcaacaacttcagcaagtagagccaagacagcagggatttacaaatcaggtttcttccattgtaaaacagaatgctggtaactattcaccgtctctgatcaatggtgttcccatcaatgaggcatcgaacaatttgtggcagcagcctgaagttgtaccaggtaatgcgaactggctgcagcgtggggcatcccctgttatgcaagggtcatccagtggacatatgttttctcctgaacaaggccaggcactacgcttgatggatatggtacctcaacaagtggaacaatctttgtatggggttccaatttctagcacaagcggtacacctggtccctattctcatttaccaatggataaagcttcgatgcaacagatgtccgcgaacaataattcccttcctggtcattcatatgttgcatttccagatcaggttagcatgcaagatggaactagacaggacttccaaggaaaaaatatgtttgggtctgctgccggtcaaggtttaagcagtggtattaatttggaaaacttgcagcaagttaatccccagcaaagaagtccatctgtgcacgaattcccagggaggcaagaggtgaatgaatcttcagaacaatcacaggagaaatcatttacccaggttacctcttcacagaatgtggctaccttggatcctacagaagaaaaaattttgtttggctctgatgacaatatatgggaggcctttggcaagaataataatgtgggaatgggaggtttgaatgtgctggatagtacagattatttaagtggacaaccttctgtacaaagtgggagttggagtgctcttatgcagtctgctgttgcggaaacttctagtggtgacgcagggatacaggaggaatggtgtggtcccagccttcaaaacccagaaccttctacagggaatcagcagccatcaagtgtcaatgatggtggcaaaacacaaggagtttggggtgataatagcttccagcctgctgttgcgccaaattctagacctcctccagttgatgcaaatagaccttcttcaagtgttaattcttttaatcatccacaatttccgcaaccaggattcaaaactcaacaggtacaggctgacacgttgcaggccgattcttctcatcgctttataccaaagttctctgaacaaggaaatcagtggtcagttcgtgaacctctacaaaaacaacccgtggagagcagtcaagtttatgcaaatgctagtcaactgtcaggtgtagagtcgaatgctaatagcaattcaggttcttgggctcgtcaacaaagcacacagttgcagaataatgatacccaacaatacaataggccaaatggttggaacttcattgatcctatgccagtggatggaggtgataattttagaattcatgagaataagaactccttgcaacgggttcaaagtggtgatcataagaggagcatgcaagatgaaatgagtcatcctgctggtgtgagaaggactgattcgaccctaaattctaacgcggagcttgaagctgcaaaatctgccattggaagcccacgtgtagggaaggaggaatccagtttgaataatattgcagtaccaacttctagctccatgaggccaaaccatgaaaacaagcaacagcttcctaacagtaacaaacttgatttctggaaagttgttgattcttctgtgaactccaagggaagtgaagttttggggaaaaatcaacataatgtgggtaagacacttcaaattttagagtcatcggggaataatggtctggataggggcgtagttgaaatgcatgacgtagacaactctaccaataaagatagttctgctgatgattttcgctctaatgtatcccatcatacttctgtgggtggttctaaagaaaatgtatggtctgatactgttgattcacgtaattttcctgggggcaaacaaaaatcgtctggtaatgctgctggtcgcaagccaccaggcactcgcaaatttcagtatcatccaatgggggatgttgatgttgacaatgaaccttcttatggagtaaaacacttgacacatccacagtctttacctcaacaggtttcacgagggttaaaaggttatgaccaaggcagttctgggcaatctaagtttgtcactgatagaagttccttggaaatggaggtaattatttgtttttccttattacataatgatctactgtcaaatatgtaactttttgctttttaacgttagctgacttaaaatgggatattaacaaatgtatgtatatttttcccctctgggattttcttttgagcaaatttgttattttttttcctacatagggacctttacctggtggtcagggtgacttgaaaggcttagatgcaacaccgtcaaaaaatttgtttcctggctttgtaccgaatacatctgctccttttgacagattcattggtaactatgctccaccaaatgttccacaatcaaggtattgcagatatgaagttttacttttctcattttctagcttcgttttagattttcaactaacatggagcacttcataatccagtggtgaaattagttttctcgatgtatgctgtcatagatatttattaatgcctgactttatttggccttgtgtatttcttaagattattttcctgtcctgaagactcgtggatactgtgttttaaaaaggcccaattgttgttcagtctaactttcaaggattattttttttttattttttttttattacaagctttcatcttttagaactctgacatgctgtttggattttgagtcaagtacaatgtaggttttattattttgcttcttccttgcagtcaacatatgcttgagcttcttcacaaggtggatcatccaagggaccatggtgctacacggcccagctctgaacgcaatgtgtcttctgaagtgcttgaagcagaaaattcagatggatcaattggtcacattcagcggaatcattcatctaattcacaaaattttggtttgcaattggccccaccatctcaacgcctgtccagtaaggaccatatatcttcacagagccctttgcaaacagtttttggctcagttcatggcactcatgatagtggagaaaagggccatgttcagatgacttccaggacccctgttgttcccttgccctcttctagtgacccttctcaagggaccggaaatatttctggtgtttctggacatattggcaatgaggcctctttctctaatgtccagggaaattactctatggcttttccttcagggtttccttattcaagaaatattgaaaatcagcaaatgcatgccccaggtggacaaataatggcaaaccaatctgttaatataccatttaataggctatactctgcttccaaacagttagatgactcttctgagagagctcaagtgagtcaatctattccaccatcagtgtccgatatgtctgctggtactccaagaaataatcttccttctacagagacatcccagaccagccaaactcataatagggacctggcccaacagatccctgaatcggatgcagcaccagctcagccttctgtccagcaaggtgcttattctaaaatgttgcaaaatgtatggaccagtgtgcctcgccaacaaccttcggtagcacaatcttccaaggttgctcagggtttgtttaaatctcaccttcaatctaatagcagtccagtagcaatgttttctgggccatcaaagctgaatgagcaagatatggaaggaagaaatggcttgtctggggttggggtaatttcagcaaattctcaaagctttgctgagaaggaacaaccagacagagaaaaatttggacaagctccacctgataaggttgacagtgcacaaaagacacttggcgtgttacagggaaatgagtctattgtgaatagttcctctgatgcatctcatgcaagccatgctgccacccaaagagatattgaagcttttggccgttcattaagaccgaatactagtttgcatcaaaattattccctactgcatcaggtgcaggctatgaagagtacggatattgactcaagtgataggagcacaaagagattgaaaggtccagattttggagtggatccacagcaggtaggtcctgggggagggcaggagtcaccttatggatataaaagtacagaaagagattcttcatctaatgacacgtcagttccttctggagatcaaaagctgctaagtttttcctcaaagcttggggagacacgaggttcaaatgcatcttctcaggacatggttgcatttggtcgcaatatttcacacaatttcccaaataatagtaatgcactttctgttagaggtgagcaccctcagattagtccccagatggctccatcttggtttgatcagtacggaacctttaacaaaggtgggcaaatgctgccagtgtatgatatgcagagaagtgttgctatgaagtctatggagcagtcatttgtagctggaaagctggctgatgatcagcatgctcgggactcagtggagcaaggtaacgtgactgctgatggtggtaaacatggtaatgtttcacaagtttctacttccacagctacaaccaatgatgatttctccccccatgtaatgcctcattctggcgatcaaggtttggttattgtgagaccaaagaaacgtaaaagtgcaacttctgaacttttaccttggcataaggagttgatgaaggttccacaaaggcttcaaactatcaggtgatttggacgaagctggttaaatggtttaaattgatctaaaatgctcctctatctgtttgtatcaaattttgttagtttacctttacttattgtatagaagtagaacacattccattgcatggtgtcactgtgtg

SEQ ID NO: 110914 - DNA, 2528 bp, Cannabis sativa
  modified_base (49)..(74): a, c, t, g, unknown or other
  modified_base (1323)..(1335): a, c, t, g, unknown or other
gtgtttattttcattgttttagagttcatattaggttgttaatccaacnnnnnnnnnnnnnnnnnnnnnnnnnngtaaaataatttccaacagttacgatcctaaactcgtatgaagtcaaagatagaggtaattatactcatccattacttttactttagaaggtcttagccacccttaaacacatgtagattttttttttcttgaactgctcataaattggttccctacgatcccccatattctgttgcactacatgaggtgttagataagtgcaggacaagcatgttgctctgttaggtctcgaattgactccctttgttacctaattgtttcctgcatggtagcaaacacttgtttccagtcttgaggtggttgaggatgatcttcctcaccatctacgctgatccctagctcgcagttcaactggtccgatcattgttgcatgatctaatggcacccgtgatccagaacttccaactatctagaacttaaccagatatcaatgctaatgagcatatctaacacatatactcatatcaaaattattatcatgttacttttccatcatgctttgtaataattaggcaggtaataaaaaaaataaacaaatataaaacacttactataccacgagttgacctgtctttttagtaaatgtacatattcgaccaatctttaggacttttaaaaccatgactgctctgataccaagttgtaacgccctaatttatagggatgccacgtgtgtagttttagaaattagtttaataatagtagattaatgaattattaaaatctgtgataatattaaaaaattcactaaaacaaattcctagtaatgaatataataacgacactaaaattttgttccggggatcccctattacaaaatttttacaaaagtactatatacaatcataagtcaaaatacaaaatagacacagcaactcgtagaaactcgtccatacaagccaaaaaagtcaatatgtacattcaacggagaacaccgccatctcatggctgctctaactttgacatgccatttcctcaagtttcggtctaagtgtgttggccgacatgtacagagaacgatcaatgatctcgggctctctagccttttccccttcaaggattaccagcttcaaggattaccagctggctactactagggcttagaacacaggtttttaggctgggaattgaagaaaaattgatggtggtggaggtgatttgattgcatgaaaaagaaagagggagtgggttaggtttcctaaatttttttaacatatatatactagattaataataataataataatnnnnnnnnnnnnnataataataataaaatataattaacaaaatttattttgtcatttctgaaccactaagaaatctctaatcctagggcatcaagtcaacctcaagtatctttaaatatcccagtaattctaatataaacttgccatgatactctcatcagaacaactaacttaacctattatgatatttttttttcctccgatcgagtctccaaggtcaccaaatctaaaaatatttttattccacaaaaagctcacattatattcacacattctatataaatttatgtaattaataaattacgcttatttatctacttatgaccaaatttataatttatgttgaactagattagtaggattataatcccactcattactatttgattaacccataatatataaattaaacattaattattcacaattagattttttaaaaattacagagagatcgtttattggtttgactttctaaatttatctcttactattcatatatatatattgatatcaataaaaatataagaaagaaaggaaggaaaagaaaagaaataataataataaaaaaaattaaattaatcaagaaaatatttattttactttaccttgaccattaataaaattccgactctaggacatttggtcaatcctaaatatctcgaaatatctcgataattctaaaactaaattatctcaatagtcctattaaaattactatctaaaactgttgtgaattttttttgcctctcatcaggtctccaaggttgccaaacttaaaaatatttttattctataaattactcacattacatcaacatatatatttcaaataaatcttcgtaattaataatttatggctttttataaacttagggatttttttttttaattcatgctaaattagattagtaggatcatatcccactcattactctctaattaacccatatttagattatatgtcataattattcataattagatttttgaaatattacatgtacaatcatcatccgagacaagattgactctcgattagtaagcatttacatgttttagtactttatttaaaatagcatgatagggagcatgtaacgccctaaataattaggcacgctacccaaaatgattatgaaaccctaatcccctaaccgggattactaattaaaaacagcgcagaatttaaacttttataagatcgga

SEQ ID NO: 110915 - DNA, 3458 bp, Cannabis sativa
tagaaccacccgaacccgaacccgaaataccaacagaaacattatcagtagtagtagtagttctagcattgatgatatgatgatcttgattggacccacaacaaaacccatccaacaattgctgggcaggtcttaaaaatctggaactctttaaaattgtagcgtaacccgtaaacggcccgagtggacccgaattcctatacgggtttgaaatggaacccatataagcagaagaagaagaagaagaagttgaagatgataataatattttattagtttgatcatgatgaggtggaggaggatttgatgaagaagagagtgaaagagaaagaccttgtaaattattattattaggcaataatgtggtagttattgattggttattattattattattagggaaatttgggagaagagcaagctcgtttcctgacatgaccattgcctccaagtagttattaataacctgatcacctgaatttggttggttgttattattattcttggaaaaactgatcatttctgaagaaagaaaagttgggtcgaaattgaaatgttgttgttgatgatgatgaagttggtttgattgttgaactcttaatttgtcacgtctactttgttgtgggacatgagataattgatcagtgttactacccctactaaacaaatcaccaccacttattctctccataatattattcaatatcctctataacagaaaaccaaacaaacaacatgttagttctgtatatatatatatatattatataaaagaccaattaaatgaacatgtacatacaggaaataaatggtatatagttatgtttggttatatttatcatgactattaataaatttttattaattattcaaaaaataatgtttttcactcttaatttcctctctatctcacgtaaaactctagctagaattaaaaaaaaaaaaaaaaccctagctagtatatatataaatatacagtacacatattcttgaaaaccctaatatttctgcagctttctctcttataaatagaaaaatattaattctaatattcatatattatttctaattctattccaaaagaataacactttccttgtcgatatatatatatattagaattgaaatcaagactgacagagactatacaattatatatatatatatagatccatatataaaagtcttgtatgagctatatatataattttttttcacacacacagttatcagtcgtttcaataacagtttttctttttttagataaaattaaactagaagagagacacaacagtactacttcataccaaattcaaattataaaaattataacaaaaatgaaaaaatattcagtaataataatatattataaattcacacatacaaaaataaaaataaaactaaacatttaatatattttaattttaccggattattcttggatcgatcttatttctgagactaaccctttgtaactgatcggccggaatcggattatttcaccggagccgtagagagagagagtttaatctaaggtaagaaagatgactatagtgctttctctctctatatatatctctatatagctatgtagaccacaattattgggaagcaaaagtagccgttatcgttaccgttacaacatggaatctgccgttagagttaacggagtgtaaacgttccgtgaattaaattttggttgcgggtggttcccgataactgaaactgacgtcattaatttgatttttattaataataaaagaagaagaagagggcacatgcggtggttgaaagaaacaggcttggtaatgggatttaattacgaaaatgccactgagttgtgaggttgatgacgtagcagcttatgtaaattagagtactaaattgagtgttttgtacggtttagattacagttggcggaaaacccacctagtaaatttgtctacaatagataactcattattatacactaaaaaaaaatagataatttattatttattaattaaaaaaataaatttactctaaatttattattagtaaagggaaatttatcacttaaaatgagtgtataaattaatcaaatttaattataatttaccgatctaattacaattgactgtcaagattgatgagtattcaattataatcgaattggatttgatgttacttttgtattagatcgcaacatataattaaattaattagtatttttatttagtttaaattaataattaaattttatgttgttacatacataaattatatatattaaaattaaattcagaatagctacatgcagatgatatttgtttgatttgtgagcaagatgctgaatccatgcaacatctattctttgattgcccatttagtagaagatgttaatttggaggagatcaaattttggttaggatggagaaccttgagtacttcattaccccaaatcttgccatccatcaagagatcaaaatagtcagatttcaagagataagtggttgccacggttgtagctgctacagtttacaatatttggaggagtcgaaacaccatgttttgggacaaatgtaaaatctcgctgcctatgttaatgctccgcattcggaatgaggtaaaagttagaattgtaacaattttgcctaaaaaaatgaagcaaaaggacttggaatggtttgagcaattgtaagtttagcacaaatatttttcacaggttgtatagattacaaaggtcgtcctcgcgctaagttgtaaatttgatttgaagcaatacaatgattctaatttctcaaaaaaaaaaaattaacattataattttactctaatttttttggatacatatcaaatctaaaatattgattaatctggtctgatccaaaaaaaaaaatatttggtttaaaatattagataaacttgatttttttttaaaataagataaacttgaattaaaccaatagatataaatgaaaaacattcaacgcgtaaaactgatccagtcaaatatccaatggatgttggatcaattagttaattaactataattaattagatctaattggatgataaaatctaatatccaatatataattggatcacagctggatatgcctaacaacaacattggatgtagtccaatgaacaacccttcttttatatggcacttatagaattcggaagcacagagtcagtcctgaaatttagtgggctataagaaaaaagattaggccatgatttagtaaaaatgtgttatttatcaaaatcattaaaaatatataattttaaaatgagaaaaaaaaaattaggcccctggcacaggcctaggtcatctatgccagggtcaagcctagtaatgtatatgaggttcaatcctaaaatcaattactaataagatgagtagttcattcatcttatatatacagtagaacctctatttaagaatacacttgggaccaagtaaattatattct

SEQ ID NO: 110916 - DNA, 4061 bp, Cannabis sativa
ctgcaaccatacatctccccaactcatacgtagtcagcacctcattaacaattcaagactctgctcatacagaacgaaatacaaaagcaactttgaatttctttttcacccaaaaattttcatgccaatacaataaatagctttgaccatctttaatattcacaagtacaatcacattatatcatatcacatcttgaaattagaatctttcacatccaattaaactatcaatctcacagcacatcattgtttctacaatccaagtcttaatctttcttctcttctaggtgcattaattctaaatgttatcccttgtactctatgtttatgatcaagattggtttagcaagtatagagctataaagccccttcttatttttatgttctcagaaatttaaaaacctaaattgtagtaaagaactgcattaatgaaatcttctaatacctatttcttatgctacttattttccaacactttgaatacctgtctttatgtttcccacattttatttttcaatagtttatgttcaagtagggccttatatttccagccattacagtttgaccttaacattttaacaatttcattttcaagcagtacattcaagtactttgatcaccaagtttcatttcttccaccaaactaagttccccaaatcaaacttttcagtaattgtagacagtgatggggaatttccaacagttggttgccatacttccatgcatatgtattgcacaaagatatggtgttccttgaaagaaaccctgaacactaacatatttttaaacaaaacaacactactcgcattattgagaaaataatacccctgaacactaacacatgaaaataattgcaaaatagactaccacgttacatattgattacacctagttgtagaaactactctatgattgaccattaataatcatttatctatatgcacaaaccaaaactcaaaagaatccaccctaccatagtagctgcttccatggatttgttggatagattatatctagattccccttctgaataccttcctgcaagataaagaagatcacaaaactgagacgtcagcaacagactagttttccacatatctaatgattaaccaaacaatctaataaaagacctctaaaaatattcaaccgagcatctcctggacttgcatcaggcgagaagtacttcccagagagtatacccattgcaagtgggctgtaggccaataaggcaatcctgaaaacacacaacaaatgaacattagttatcactggacgaaatacctgaacggtacttcaacaaaaacgttgtacaatcaaattagaatgtggagctaagcatagaatagttaacacagttgaaagcattcatgttggaaataaagtcaagtttaacccaaatccgcacaggatatagaaacattcctcaaagttccattgattttctaatttatctagctcaagctattgattataattttatcccaaacatcagaactttttagatatccacatttcagaatctgactcgccttttgttgttgatatatatctatgtgtgtgtgttagcaaaaagttccattggcacctctaccatgtaattacagaaataatatttctgcttctatcaaaattaagacctggaaaatgatataaaatcgtcaaatacctttcgtggtgacaacattcagcaagtccagaatcaaaagttcggcagagcaagctgtatgagttctatcacaaacaaaaaccactgcatcagcccaaaactaaagctactaagctgtagagtgagaaggaaaaaaccctcagagttctgaactagaatgcttaagaaaacctgtaaagatatgatttttggaaggcaaggatctctttgagctgcctgagcaaacttcataaccccatatggtgtttcattgctgagaccaacatatctgatctgcaaacataacattcttccttagttgaaattgacatgacctaaaatggtaaggcacaaaccataatatcaaatttacctttccctcaacaacggctctgccaagtgcaccgagttgttcttcaatactaatcgaacaaaactgacgggttgggtcatactcagtttctccaaacatgggaacataactagttaaaaaagaaacttaagtgttatccacggccaagaagcacaaatcaaaatgatctctttagtataaggcacaaagcttccatccctaattcaaataaaagggtgggcctacatacaaaccgatcaggccagtgaatctgataaagatcaatgtagtctgtccggagtcttaacaaactgcatccaaccaaataaataaaattcatcaaatgtccatatcttttctccaaaaaaagaaagaaagaaggtaaggatcaaatgcccacgtgtgaacagaaggtttgtgcatgcttgatgggaactggtaataacaagaatagctcaattatttgaacaaaagttgtacatactacactaacaacttcacatttccatgatcgatatgagcttaaaccactataaaacaaccagagaatagaatagttcgcataatatgtatatgctagtacctgttgtcaatggcttcagtgatatttgtagcatccaagcacaacggtccacctcgaatccaagtcatctgcccagatggtccagcaacctacaattacatattctaggttatacaaaacaaacacactgcaaaagatttagaatctaagagctcccaaattctcaccgtcccaactcccaacggtttggagttgagtacagactgaaaaaataagagtggcggaaagagcataccttagtggctaagaagattcgatcacgtgaaatcttcctatcccgaatccaacggccaagatactcttcgctccttccatgagttacggctcgctgaggaactgggtacctgaaatcatcgaaccccatataatacaaagatgaatgaatagtaagtaagatgtgaataaatacatttcggcagaatcgaagaagttaactccggcgttgaaagcttggtcgaggagacgaaaagagtcggataaagtgttctgctcgcccaaagtcatggttcctgaggagtgagttgaaggttttaacgcagctgatgaaatcatagcaataaataaaaaaaaaaatgcagtggaagtgaaaagttgaattagaaattgatcgaaccaaagcagagccttgaaactgagaggttgggagctagattgaacagtggaaccgccattgtcctcaaaactaatccactactgagtttggcgggcaagctttggataataacagaaaaaatatgaatataaaaaagtggagatgcagggtatcgaaccctgtacctctcgcatgcaaagcgagcgctctaccatttgagctacatccccaacatggcatttgtgactagaatattgtaattatatatttaaaacactttactcaaaaccaaaattttacaccttcttatctcagttgatctatttttaaaaacagtgtagacatggccttttaagtactaaagatacaaatttaaataatttattaaagactacttgaagatactacatgtactatggtctaaacgaccaagttttctctctatgatctagaggactcttgttgaatgattgggattgtggttatttgtgtactggctctcatggatagtagggatgcagtaaatgatatagtaaatatgattaacaaattggtggtggagaatgaggaagattgggaagttgatgagggggaggctatgcagttcagtgaaaaaactttggtcggaagagtcatttcttggagatatattaatgtgaatttctttaaaatagtttttggacacacggggaagacgattttaggttggaaagtgaaaatattggaagttcaagatgatcatacatttgccaaaatctcttttgacaaccgtcaagataccaagtggtactcaatcatagggtgtaaggctgtgaagaatctagactcatgagaaggagattcgggctcagatcttggtgataagttgctacagaaaggatacaagagt

SEQ ID NO: 110917 - DNA, 4410 bp, Cannabis sativa
  modified_base (1151)..(1153): a, c, t, g, unknown or other
  modified_base (1218)..(1225): a, c, t, g, unknown or other
ttattaaataaaaattaaaagtaacccataaatttctcaaaaaccaagaatttcagttatataggcacactttatatagaatagatacggattaggattaatatccgccaactttgattttgcacacttaaattaattttggttggggtaatgaaatgtaatgaaaaataattaattttgggtaaacggcgttaaaatccttaaaatttttattttggtttcacttaatccctaaaactcaaatttgggcgataaaactcccaatactcgggttctgttagaaaattaacactcccgtccaaatttagctgttaactgtcatggtggattattcacgtggacataatgtacacgtggcacaatattataggcccacataaataaattatttaaaaaaattaaaaaaataatttttttttgaaagacaaaaaaatttaattaaatttttttttaaaaaaatcattaaatattaaaaaaattcgttttgtttctttttttttttctgacttttcttctttttcattcttttccaaaacatatcaccaccacccaccgtcaccaccaccgcaaccaccatcactgttagtgccacctccaccacgactcaaacacaatcccatatcttatagcacaaacaaacaatatacacaccacatttatcgcgatatcacatctaaatctcacaaaatccaacaaaaatccaaattaaattcaaaaacaagaatatcagatccaaaaaaaaccaccatcgaaatcaccacccctgaaatcacagaaacccattaccatcattaccttttttttcatatctgaatcagaacctttaaaatataaaacaaaaaaacaaaaaaaaaaccacaaaccagatctaaaattgtttacctccatggggtccgaaggtggctggatcggaaacgagcaactccgactccgactccaacaagattgatacctaagctcgcctgtaaatgctcggctggagttgggcggagagctcatgagagagagaaagaacgagggagaaagagtgcaaaagagattgaaacaacaagagagaaatagagtgatggctgagagagagagagggggatcgagagagagaaagagaagagggtatttggaagaaagaaaagaaaaaaagaaagaaaaannnaaagaaagaaaggaaaaaaaaattattttttatttataatttaaaataatttttttaattttaannnnnnnntattttatttttttaatttttttaaataatttatttatgtgggccaataatatggtgccacgtggacaatccaccattgcagttaacagctaaatttggacggaagtgttaaattgctaacagtatccgagtattgggggttttactgcccaaatttgagttttgagggttaagtgaaaccaacatgaaagttttggggattttaccgccatttacccattaatttttattttttagttgcattttaaaatatgggtattcataaaatactcatccaatcaatttgcacgatacaatctaatcaaatccgcaatgtaatgaaaaataatttcatcaagattagtcaaattagttgttgaggtgtttaaagttggtaaggaaagttaggcaagatgttagttagttaccagtttgtgtagtgcatgtagttatataatgttgttattctgtatttttattcatatttaatacacagagatcgccttttctctttttatcttttgcattttttagctaaaatggtatcagagtcaatatctgtgtaaactccattcttgattctcgatctcatcactcatggctcaaggtgaagatgttcatactcaaagcacttctgagacctcaaatcaattttttgtcctagatctaaatgttcgatcctttttcgacgatggtcggaatctgtattttctttctaatggtgattatcgtagagctagtttggttccaaagattcttatgctgtgagaactgtagctcatggcatctaaccatgacagtggcattgattgcaaggaacaagttcaaattttttaatggcaaacttctacctcttggtgaagatgatgatgattttgagttatgtaattaaggcaacaatatggtgataccctggattttacatgttgtatcaaatgaaatagctaaaagcatcacatatatggagaatgtcacaacgatttggacaaatcttgaagagcgattcaattagaaaaatgctcctcgagtttttgaagctataagaacaaaaaaatatctttctcaaggatccaatagtgttacaatatattttactcatctcaaatccatgtggaatctcattcaagagtatagggcagaactaatttgtagttgttgtgccatgaagacaatttaagaatattaggatgaggatcgcgttcttgaattcttggttggcttgaatgaatcttgcaatgaagccaaatcatagattctaatgcaagatccactccccaacatcaacaaggcatatgcatctatcattcaagaagaaaggcagaggtgtttgtcaaagatccccaatgttcttactgagaatgataaatctacatcagggtctaattctagccaatttgctgggagtgtctagccattttgttcaaaaatggtgtgtaattagcatggtattattggtcaatctatgtctaaatgttacaaattacatggatatcttctagggcacaaatttcataggaaaattctcaacaaaaatgttaaccctctgagatcgtacaatatgaaaccatatgcagcaaattttgcagctaactcgaatggcaatagaaataatgttggaaatactatgaagggggatcaagacctagtttcaagtctttcttcagtgtagtgttagagacttatggcattgttatcccacaaagctcctgactgatgaacgatcaacttcttcaaatgagactcctctggtatctcatttctcaggtaagcccttgatcatttcaaactctaaattgataatcgatataggtgctacacaccacgtatgttgtgatatttccttatttctgtttggaatacttatacaggatcatattatttttcatgtaataattattcaacataaataattattttctataacatgctatacagaagcttagaattaaatatgattttttgcatacatatagtggttcttgcacaacgaaatatgactttttctgttcaatgatctaatccttattccttttttaagttgaattgtcaattattgaacctgaatcttcaattgaacatggacaagaactttttctgcatagtcttacataaagatcaaggtaccaagaagaatagtatgggctattctctcaatacataattcgaaattctaaaggagagagaagagatgacagtgacaactatataataatctattcaattgatgtgtaaaataagcactcataaaacttgtatttataacaaaagggtagactcaaaaataggaaagtaatttatttttccttctaattaattaaataaaataaatagaaaataaaaatacaatttcttggtccccaaggaagtccatagccgacccttatatgggctttggcttatggattgagaaacttacaaaagtactgactttttgcctaatctttacaaaaatactgccacacagcagaaatttcttttatactactgtccaggcctatttttttttttcttttgtactgtgaacagtaacacacccagatttaggtctgaaaatacaaaaaattataaaaagtatgatttgaaaatgtataattatacatgctatttaaaaaagaaaaaaaaatatattcatatagatcagccctaagaaacgattaataatgtacattacaaaattcaaggttgttctaaagttttttttgatttataaccatatattcattgttaattaggagaatcagccaaataattaaaaagaacaccagcaaaataatttttattttttgttttcagtgttattttattggtattttaattggaaaaaaggtcaagtaaatgaaatattgtgaaaaatgacaggttatggaatctataccaattctgataaagagcaatggacaatgggaagaagaacatagttatgtcaaatatgagaattcataccaaaagatttcaagtatgaagagctattacaaatactacttactttattggggtgcgaaaacacaagaacaacactgcaaaagcaatacaaagcgaaaaaatgaataccaccgataaaaatattcaacgatgtcagcctcttcctttacttgcaattaaagatcaatgaaacgttgctcaaaaaaaaaaaaagatcaatgaaacagatttcaacacatatccattatgcgccaaccaacagaacaacaacacaacacatgctg

SEQ ID NO: 110918 - DNA, 4983 bp, Cannabis sativa
  modified_base (4882)..(4883): a, c, t, g, unknown or other
ttaattttagttacaacaagtattacgactaaaaacacatttagtcacaacaaattataatttttgtaactaatacatttagtcacgaaccttttaatcacaacataagaatgataatttataattaatcacaaacttttacttttgctactattttttttctctattaaaatgaaaagacttatcacaaatttcatttttgattctatttacaagtacaaaaacaatatacattttagctacccaaaacactatattcagagctttccatattcggtatactacaatattaacaactgttgtataaaccttttgacgaaaatatatagaatatatgttattataaaaaaaaaaattaacttgaaatttaagaaaaatattaggtcaatatgcattcattattttctttttatttacttattgataaagtaaaacaattgccacctatttcatagaaaaaataaaagaaatgaaacaacaaaaattagttcacatgacacaacatatagcaatgtcaacaaaaaaaatagagaaagctcctaattaataaagacattttaaatattgttttttagtctatcacacactttactataaactatatttttaaatgctttttcaattgtagtaactttttgttcccttaaaactgcatttctactcttccacacacttggtaaataaggtggcaatgaaaatctttcttcttcatcttgtggccttacaattttcaatattgtactattcataccggtctacttgtagcattttttaacactcgaagaaaagatgttcatgggtctcttaacccaaacaattaatttgaatttggaataattccaaaattcattagcttgtctctcgtagctagctagtttctttttgagagccaaccacataataaatttgtgcttggaagagcaataccggtctcaaatcaaagagaaccgccacttcgaagagagattcagattcaattttgaacaaattccagcaatagagaacttataaagctgaaagtactttaaccttgagaagatacatttaattaattttttaatttcgtttgaacaattttcttccaataccaacttaaatagttgaagaaaataagtaaagttaaaaagttatcaacctacttgagatgtgcacaaatatatattagataaatagagggaggtttttaggtaagagaatcacttttgctgtaacggtagaggcgtttcaaatttattttcttattttaagacattatatctcttttttcacatgtgatgttgtgtattgtagttgtattaggcattctatccattaattttcgtgaaattctaaatactttagtatgtaaaaaaaaaggttcaaaatagtctattatatacgctcgtgcaaaataaaataagcacgcatgtaaatttgtctgaattctatttttgacactctaaattatttaatttttttaaaaaaaacaagcaaaatgtcgtaatataagcaaaactgatactctcactaaagaatttgattctcaacgagtcgtgggaatccttgtgaagaaggagatatgatcttcgctgaattacagacagtattgcaagacatagtctcgccaaatgagagtgcggtggctggatttttgtttgcctttaatcagtacaaaaaattttacttttagcaataacaaaacttgtgactaaaagtaaaaacgttgtaactaattataaattatcatttctatattataactaaaaggtgaggttcgtagctaaaaatattagtcataaaaattataatttgttgtgactaaatatgtttttagtcacaatatttgttatgactaaaactaaattagtgacaatttgtatttaaatattatattttagccataaaaaattatattgtgactaaaaaattattattaaaagtagcaattttttatagtgaattgaaagtttttgtcattgaaaaaaaaatataatttaattatggcacacatataattcttattattattcattaaagttgtgaaaattaattgttgataacagtcatgtacatacaaaaaaattcctcaagaaatagaagacaatacacatcatcattataattatatttctaaacattaataacaagaaaagaacaattattgatatgatgattttccagttgtataaatatatctatatatatatttatagaatagtatagagagttagagccaaatgatatttttctttaaatagtctaatcagaatgtgcaacgacaaaaaaagtacgtacgtacacgttaaataataatcgtacacacagagttttaattttgcaacataaaataacgtaaaattacaatattaattaattgttcattaatcgaacaatagctgatctaataatagcttcataatcagttgaaaattgatcaattgatgaagatgatgatcttaccaaaacatcttgaaacaaaagctccttcacacttgatatgctgacgtggataatctgtaattgaagctctctaagtgcattcattaaccttgctgatgggtaattcaaatctggacactgaaccctaatcatcactactgaccccaacatcttcacatcaacatctaaattattgttattattactagtattactagtattagtactagtactacttttacttggtctcatcatcatctgatgatgatgatgttgttggtgttggtgctggtgctgctgctgatgttggtatttgttggtttggttttcgaggactactttcgcttcaagctcttctactttggcttttagctcgttgatgtagacaactgcatcagcgagtagagaagccttgtccattttcgagacatttggaaccacagatctaagtttgtagaatctgtggttcagtttctctctcctttgtctttctgcttcgacgtggttaacgggcatttgagattcggtgggggtggttgttgtaggctttcttcctctttttttcattgttcccgaaatttgtatattctcgttgtttgattgtctccggccacagtcagtactgttagccggagtataattagttgcatctgaatcaggttcagaacgacctgattcagatgaagatccatttctgatttcgctagtgccttctttttgcttattagactgtaaaaatagattatttgaagaatgtatttctagaaatggtgtcatatgatgatgatgatgatcatgattattaccatggatcctctgcaccatattattattattactaccaaatagagatttgattaattgtaccaaactccaatcatccttgatgagatcagacgatccaagctcgagcactccattaggaatggagatgcaaaaaagggtttgaacaccatgcattcgagcttccttaactcggtcgcaaccgccggtcatgaactgaaaattctggctaccgctaagccaaatatactcttgatccgaggcgaaagcccgggtcaagattcccccgccgctccccgaaaattggcgcgtaaaagacaccgtgcagaaccacccgatatcggtgcctccgccaccgccagtaccacctccgcttctagtatcaacatccataatttcatcatcttgtgctacttgttcagggaaaggagttttgtatctcggcataatttcgaaatcgaaaccgaacggtgtcgtttcgggtaatctgttgttgttttggggagtagtgtttttattaaggccgcggaaatgtccatctccccaagataaaacgacgccgttgttgtctttgtaagcttgccagaaaatagagtaaacccaccattcgggtcgggtttggattatgaattggagcttttgttggattgtcatcatggttatattttcttgggttactgagacatgatgagatgttgaagaacaatttggagacataataagttcttccattacagaaaattcacttagagaaagagagagagagagaaaccaaatatatgagagactaaatgaaatgaaatgaaatgaaatgaaaaaggagaaagtgtgtttgggtatttaaacgtaaaaaaaaggtcttatattaactactcatgttttgtctcgcactgattgactattctaaatcataattaattaataaaatgttgagaaaaacaaaagagaaactatatgagcacaaattataatatgatgttactgttttctttaatttaaagggcatattgtttattggacattagtagtgcccaattttttttataggtagaaccctacaattaattaatgatattttttcagaaactattttttttaaagttatataggacctgatacttattacactaataatgatatggtaccaaagaatatattatacactattaatacattttagtaagttataaggccgagagccaatatttattatactaataatggtatgacactaaagaagatattatgcactattaatactttttagttattctcttttgaaaaaaaaaaattaattatttgaaaacacaaaaaatttaaaagcattatttaatttttagcataaaactcaaaatatatcatattcagattttttttttaaaaaaaaaacacacccttttaaattttcaaaattataaataattatttttgatgaaaaaatattgaacgtacttcttcatgataaaaagaatagacaacatagctcaccaccatcattaatattttttaggaagaacatgaaggccactgattttcccattttatatagggtaaatattattttagaacgcgtgttttgtaaaagttattaattggaccatctattttgttaaataacaaaatcgaccctgtattttttaaaattatacaaattgaatcttgaactaattttttgtcaaannaaaacttaataataatccgatctagaaatgttataatgacaaaactatttacattttctgtatctgttcgtattagaaattatcttaaaattgattatat

SEQ ID NO: 110919 - DNA, 3869 bp, Cannabis sativa
  modified_base (1262)..(1263): a, c, t, g, unknown or other
cttatactaattaccatccaccttcttatttttattttttcataggaagagagaaaagggttcctatatatatactttaaagattaaccaacaagagtttcagcttcttctgtagaaatatcaatttggataagataggtcattcttcttatcctgattcatattccatcaaatatattctaattaggcaaaccaagcaacctcatgacttcaatcacaagggttagtcttaattcagtttctattttgctattttctttctggggttttattttgttttgtgttttcgagttttttctataaagaatttgtttgttcttgttacatagaagaagaagaagataaggcagaggttttgaggattgggttttctttgtttttttttttttgaatatggaaaatttagtcgcttttggcttgaatttttgttttgggtaaacttgtgtttggttgctaagaaaaaaaatgatagaattttaagatatttgttagggtagttgaaacaataatgttggtaattcctggcacattttggttacgtttccaaagtgtatttgtgtatatatattcaagcataggtgatgccatgctattagagctacttgttgggtttttggtatgttcatgtttttcttacaattcaacttgagaattgttcgtggaaaataagacttgaggtttttttttttctttttttcttttggctttatgattaaaagttgacttttcatcattgctagctttactatcttcctggtttactttagacagctccattgttgaaacctcagcttgagaggaatgttttttttttttgaatgtttcttgttatataatgaggctactttttttttttttccaagtaataaattgtctctgatgttttgcatttaaatcttattgaacccctcctattattttaatggagttatggagtaccatctgtattctctttgcactaaaagcctacttaggagtcttatttgtatattttatgaatcaatagtttttcatttactttgactttgttgtggagttcttatgtgacattattatatctacaacaaaatcattttgctgcatcaagtttccatctatttatgaataatttgtgtttatctaggttcttttgggttgatgatcggtagagataatggcgttggtcacccatccaatgcaggtattttataagtgttgtttacatatcggctgtgtatgatatattaggattataggaacatgctctctctctctctctctcnntctctctctctctcatacacacatataacaagtttcctcatagatgttggtaataagtgtatattggtatttaaacactagaatattttgtttgtacatcttcaccatcatcataagttcttcatttactttgttgtagggttcttatgtgacattgccctcaaggcccttactttggttaagggtgtttaaattgaaaagacatgtaactacactacacatatctgggagaacagatgcttctttcttactaaagcggaatatttcttcgaggtcaatattctccttaaggttttctaatttttttttgtttaggttgatgatacatgatatgcgttttgagactcatataatcatgctatagagttatacttcaattttttactgcattcagcatagttgttgtaacttcaattttctttaactgctttctgcatccatgcaacattgatgcacacaaacaccatatttcttatttatctttgatcagacaaattcagaaaattcattccacagtgtagggccttcgtgtgtaagcagaccaaaacctaaagctttgcgaattttagcctttaaaggtaatgctcgaaacaatgaacctggaggtagagcaagtggatcaaagagtggcaagaactcggtcaaactaaaagagagcgaggatgccataactgaatcttcaaaggcaaatgatgtttcggtttcctactcctgcgaggcaaatgagagtgtgtcgtcacctgctattcaccggttattcaagaaatggttgacaaacctgcgaacacaatcctcagatcatgtagtggatgacattatagaaggagaggaaccagctcctactaatatatctgaaactgaagttgagactgagaagaaggaaacaacttctcttctaaaggtgatttggtgtcactttttgagactggatgcatcaattaagatacccttgatggtattgtaagtaaagtggatttgtttctctctctttctctctataatatcttaaatatgaacatttcccccaacttaatcaattatgtaagctgtgttccacccccataactaattttgactgtaacaaataacaagtagtagatgtcactgaaaggaaaatataaataaaagtttctatgatgtgagacaattaagcaggggtagctcattaactgttgtcagggcttctgagtctaagatttagtatttgtaacaaaacaaggatttcagtttttaaattttctactccttgccttgtgcatataactggagaagtctctacttgtattctactatctaacataaaactataagcttatgtttcaaaagtttttgtactttcatttaatattatgctgatgttttatctgctaaatctgcagcatccctatgtacctggccataaatctgaaatatggggccgaagtttctaaagatttgactcccttgtggataattgggcccgtcatcgtcgctctttatgtaaagttgctcgggtggttgtttggtctctacgtattcaccttcaagcaggctgttaaagtcattaagaactggcccgcatactgcatggtggcctacagctatattgtgcaaggaaagcttaaggaggaagttcatgctcgtttctggcaacccgttgtagacatcaaaaacatgaactacaaggaagcatttaaacgaaagatgaaagaatggggagagtggttagtagagaaataccttgattttgtggagtcaatatggccatattattgcagaacaatcaggttcctaaagagggctaacctcatttagagtgagagagaaagagtgtatttaaagaggtcttcagtcagaaagggaccaaaaaattgagttgcttctgatggtgactttttgaggaagttgatattataggtaagaaactaggcaaaacccgtttttttacgaatggggttctctgtatgtttgagctttcggctagagctagaccaggaacatgataatgcagagttgtctggtttctgtaatttttataaggcaggtaatttgatttttggatgaggctggtcatcaatttatttttttgttgttgtatttagttagtggtttctaatctattattgagagagatagaatgattggaacatctcctgtgttagagggtgcttgtttttatgtttcaactttctttattattctttctctttctcctccctctctccctttctctttccctttccttttcacattccatgtaaggactaaggaggacttgagtgggataatttgtcacttcaaattgttgagttttagcaccatgaaattaataacaccattcactttattaaaatctaactgttcaataaatgatttaggaatttctttaaagaaatgtctttctgggtgttatcttttgtaatcaatgggagtgttgtacactcaatagtcattattactatgtggctttgttcaaaaaaggagaaaaaaagtcatatgtgggctagaagtctcatttgttctattctttctcacatttttttttgggataatttcacaaatgcacaaaaacaacaaaaaaaaacaataaaaatacggtttcgtgaaattttaaatatttttacgat

SEQ ID NO: 110920 - DNA, 1386 bp, Cannabis sativa
  modified_base (96)..(97): a, c, t, g, unknown or other
  modified_base (1274)..(1296): a, c, t, g, unknown or other
  modified_base (1351)..(1361): a, c, t, g, unknown or other
gtctgttctgttttgttgctgcaatactggtttctgtagtaacaaaattacattctgcttctgcagacgtatacaattttatattttcgtatatannattgacatttgcaaaaactcggttcttcaaacatccaatgattacaaaatctgaagggttttatgccatagttaccaaccttacattgttaataaggcagtaactatggtctgaaagaaccccccatctaatactagcctctgtattcgggaaatgatctaaccaacactcattggtaaagactctatcaagctttgaataaattcttgccccctctcagtgcttgttagactaagtaaaatgcaatacaaagacttgaactcatcaacttggccctaggcaagccaatcttgagcatctaggatttctgaagccttgacattttgacatccacatctttccttgtaagcaaatatggcgttgaaattaccaaggataatccaaagattgttcaagtggcctaaagtagctaacttgcttcagagatcctttctttcattcaaagaatttctaccgtacacagtcgtaaggtaaaactcttccttgaacccggtcatctttatgttgcaatgaacaatttgacggtcctacaaaagaacctccactttgaccaacttttatctatccatatcaacaaaattctttacgaaataacttgactggaataaaagttccaactagaaaaatcattcgaccaaactaagagtcttctcatggttgattttagtcgcaaataaatcaccaaacctaactttattttctttatttagccctctaacattccatcctaacaagttataattatttattagaaagacacttcaaaccagcaagagccaccccccatcaaaaaatttcaaaatatcatagccattgctaatagtagcatttggctaagatcccatgacatttcagtgccctttctccttggagtaatccaattccctgtctcagaatcaacaaaggcagtattcgtgttttggatcaccaaactcggctctccatctcttatagaactcccctgctattctggtttactattgtctgtaactattatatcagtagctaccccaggaactagtcgttttctgtattaaaaacagcatcagcttcctttctcgcaccaatacctggttgtttaactactccaaaatctgcctcaattttttcctcagttgttttatactttgtttccccttgtttcttctattccattttgtgccctaaataaaacccnnnnnnnnnnnnnnnnnnnnnnnaattaataaagatcagaaatcaatgattatatgttcaaaagtttaattccttgannnnnnnnnnnactggatttagactgacatgataat

SEQ ID NO: 110921 - DNA, 9125 bp, Cannabis sativa
acggaaaaactgttttctgtaccaatttcattattccgcatttaattaatcacttaattaaataattaaaccgggaatattaaaatacagaatttcaaaggatgctcgcatatggtgggagattatgtcccaaggtcataacctgagtaatatgacttgggatacatcccagaccttgttctacaagaagtactatactgaatctatctgtgctggtatgatggaagagtttatacaactggtttagagaaatatgacggtgactgaatatgccaccaaatttgattggttggctaagtttacttctgatgaagtggtcactgaagctgctagaaaggccaagtttatttgaggcttttaagacatattactcgagaagtaattgtagctgctaaacaaccagggattgttcgatctgatgctcaaatggttgagttagcccttacagctgagggtgctaaagatcaaattcagaacaaaaaatatatgagaagagatcatggaagccatcttccaatgttatagtactcaacaaaaggaaagctaaatcaaacccaacatttattgttctgaatcatttgatcgcaccacgcacaacatatgtgaaaccataagctgaaaaacagattgcagtacctaaatttggaaacacttgaagaacatagctattaaacctctcccatacattatcccaatctccccaataattttgatcataagttattaatttaatctaaataacattatcagttggttaaaatttaccgacaaaagaaaacacacccacacaaatactcctctttttctcccctctaatcactttgtacgttatatatatcacgttgcattaccaaaggcatcctcgaaattctaataaaaaagaaaatatataaatcttggttgcaagcctttgtaaactatgatagtcaatcaatctcatatagcaaacgaccacaattattatacattagagaacaaacagattcactttccaccgccattttttaagcacaaaacaaagttctcaatttagcctccacaatgacatattcattcaatttttatcgccaaaaaaaaaataataaaaaataaataataggatgttcaaagagattcaaacgttaaactcagagctcaatgataccttatgcaaatgtcaaggagcaaaagaggagaaggagatctggagttagagtcgagtgggtccgctggggagtcgcgccgtcgaggttagaatagagcagcctcgacgctgaggtcagagacaggggaacagctacgaaacgacaacaaaaagtaatgaatggacaagaaaaaacgaaaaggcgcaaacgacacaagcaagcgtcttaaaaaatacaattaatacaattttatttgcatctattataagcatccgttgtagtctagttggttaggatactcggctctcacccgagagacccgggttcaagtcccggcaacggaatttttttcaatatataaaaacaaattcctttgactctgttagtaaaattttctcaaacttctcttacagaatattttttttttttttatttcacataatataaattatgtaggtaaaacaaattaaaatcataggcaagttattttgcttcaaatgatcaaatatgcattaattttagtgttcactaatattacaaaatgataactcatctttacttcaacagaagaccagaaatgttaaaagtccaggataataaagaatggttgaacatctgctttggtttgttgagtgcacaacaatcttgaagttacttaactgcaagaattggagcaaagtaagctatgatgatcttagctattcttcaatttggtttgggaaacgaatgatgatctcgtcgaaaggggaaagatgatctcacaaagattatggaaaaaccctctgtcatacatgttattcttaacaaccacctcaacatcttctagcggagaccttcgacagagcaacttccatttgctttctgcaggcttggtttcactacccatctcactgatactcgctttaagggcttcagtacttgcctttgcttcattcagtttcttctgccagcttatatactcttgccatttgaaggtctgtcgttacaaaaagaaaaatcacaatatgaaagaagtcacccatggcatgataccatcagacatttcaagcaaaatttatgacaaacaaccttcatgacaacgagttctaaaactactattagcttctgctaattgcattatgaaaccgtgttattgttatttttgttctcttcttatttttctctgttgaaaagtacatattatgttctatatttatatgtcttcatttgtcccacatcaaaggattgaaaatggtctctgtacaaaatcagtgttcaccaaatcatctcaatttatgactttactaagacaaaatgaatgaagcttcaagggccagaaagtgacctcattagtggtggtatttgtgagacaaagatttgcatggtagccaaagaaacctgccaacagtaatgaaacaatggcaagaaacaccatgagaagaatttgagtattgtaggcacccagcaaccactgttcaagagcagaaaacaatacagtgagtaaaaaacaaaatcttctgaacaatgcaacaacaagatgtacgagtcaaatttatatgagacaagatttatcaagtcaaattattcaaaaaaaaaaaaagtcaaatttatatgctgacgtttgaaatcaatccatattttatgggaaaaaaaagttatgttccactttcacacacaatattagcacttgacaaattcagaatccatatttttatgggaaaaaaaagttatgttccactttcacacactatatgagcacttgacaaattcaggtatcattatttgaaaatccatacatagccatttcagcaaaatactaattaaaaagagccatttctgtgaaatactagttaaaaagagaaataatcccttcttttaaaatgtagggacaaaatagctgatttattcaagttaaattgtaaatggtaacattttaatagaggtaaaaaaaataacaaatctagccataagaagaagtttatttcctcaaattggttcacataaaacagttcaaggcatatgtgcacaagttttggggaaaataaataaaaataagctgcaatacctgtactacatgtggagctaaacttctaaaatttctctctattccataataaactacaatgggcaaaaaactaatgttagacggaagcccaaatccaaagtgctgtcaataggtcccaaataatcaacttaccagttaaaatatgtacaacttttaattcttttacttggccagcaagaataaatccaagggcaactgatccatatatgcaaataagaaagtgcctgaaatagcaattaaaatgtgcataacagacggaaaagtaaagcaggcaagtaggagggtagcagattgcctccaattttaataaaattagaaattgacttagcaataggaaagaagcatattagaacatagataatgctcaactattctatgcatttgagatgtttatacaaattttaggacaatagtttgggacactgaccataaaagaaatgccatgaagtgacgggtgtttctctcgcctatacaattattctgaaatgatgaaaatctcaagtcaagccaaatcttagtatcttactactctagaccaccaaatgtaaatgagattagttccttttaaaaagaaaagtttgagaggttccaaaccatccatccacaatgatgatcaaaacgagcaacacagcgattgcatatgctgcagtgcttggaccttgcaggtctgaaccatcaaagagaagaaacataaaatgaaaaaccatccccatatatccaaaaacacaatagctaattatagagatgcataagaataaccaaggaaaaacaactaactttggaattttgcatgtcgaacactctttctcagagtaaataatattgtcataggggtaagcagagagatattgagagacattttcagcagttactgttcctggatcagaaaagctagtcaaaagaaatagcagaacacctacaccaacagccaacaagcttgtgtacctgcaagagagctgtaatttctaagacaattcaccaacaaaatgccttacaatgactagggaaacaactagaataagagactgaatacacttacctatgaactgcacccagataatacccagggatgtagctgaaggaagacttgataataaagtaataggtcccccaaagtattgcaagatatatgaccttcaatgatacagaaaccccacattaaaatcttatgccaactgaaaaacaccagcatttgtgtgtttcaaccattgagcatttaatgaaccacaagtttgaatgtgactactcaaccattcattcaaatttttcttaattccatattcccttttcgttacttatcaaacagttcaaaataccccagctcaaaaaggaataaagtaaaaaaaaaaaaatcaattatgtttctgcatacctggagaatcggattgggtcgatcacaacagaactgctcaatagaaagtatagcatttgtgcccttcgtgccaaacacaaaccctataaaccgcctgcaaaaacatacagatatatatatatataatataagtgtatgtaaatcaaaaagctcgaaaaacccagatagaaagagatggtagtttagtttatgagatgaatgcatacaagaagtaatcataagcgccataggttataaagtaatggatgcgttgaattggggtgccctggaagatgggccactggccgcagaggaaggagatcaccactaacaatgtcaccagtccatgacacaccaaaagccactgcacggccatatattctcaatcgaataagtttttggagaaacccaaaaccaaaaacgggtcaacgtaaattttgtgtttcaggggaatagacggagttctagtaggagtagttggctcttggctggtctgctccggtctgaggctctgttttgtaattttgttggcccctttttacttcaaatcaagaaagtttgcctttgactatattcctcctattacaaacatttctcactcatcagatacttaaaacgacaaatttcagtttatttctcttcccccttcctttgtgtacttttcattattcataccaatttaagtgtataagcttggaatatgtgggaatttaatatagtatttgaattttcatgtgcccaaatagtctttgtaaattatcattctaacaagacagggtcgggtcttttaaatctttctaaataaaaaagaacaattatttccttagggatgtattgaactattaagataagtggttttttatagaatcattttagtgctacagaaaacttttgagatgtatacttagtcagataatgaatttagtttacatcattacactgcaacactattcaaaagaacttagtcatagtccttaaaaaaaggagagtagaagagctgctagagatcatcacttccaatggcatcttcaatggtctcaatgcaagatcctacagattttcctgctgtcatggcctctgctagtttggatcttgccgtttcatgtcgacgaagaagtaggattatgtttagtacagaccatctgacttgggaatcaactttcttttgtgtaaatcccaaccctttgagcaatgaatccaactgcatctcaaaaagaaagaaagaaaaaaaatccactttttggttagtacatcttatcttttaactaaagcatataatgactcatgtcaaatcagagaccttgtttatatcatcaagaccaccctcagcacatccatatagaagatattcagtggccactccagctagcgctatgcatgagaatcggtttagagtctggtaacacattcccagaattgcattgagttattcttattgccaaacgagcagggcatggtttagcaacaaacaggaaaattgacatgtttggatgcagcaatatttataggtaaagggtagatataacatactgttgctgataattttcctccattaacctgcattattatgacacatagatcaaaactcaagaacaagactacgtctttactatagaagtagagcttaaagcaagcattcaagaataacccttttggtgttttagatcaagctctaaaagaaatagtgacagaagcgtgagaaacacgtacttcttcaagaaactcaacatccacaaatgcagtccctgcttgaacattgagcgagccttccttcttcaatgcttccaaactagataaagtatatcccctaggtagaattccaaccaagtaggctataagaaaatgcccggcttcatgctgcatagagtttgttttgatgagtactttatgatgattccgttattttagcagagaattcaaaataatcataactggaatagcaaaatgccctttgcatggcctaaaatcatagattctataatttatgtatacattgtatagagaccaatgaaaggttaaattaaaaattccatttgcacttttgagtgggtggaaagcaaaggtcttgcctgaatgaccctgttgtggtacttctggctaaaggtatgaccaattgtatcaagaatcaagctactgactcctccattgaaagatacctaagatttgaagacggaatagagaagatataaaagaaatctcaaccatgtgaagaaaatacacatctagttcaatgtcaaatgataacaatctgattagtcaatttatgccctttttataaaactgtaaattgtaatatggttgaagggattgatttgaaatgagattaaagatcttgaagacatatttctaaacaagcatgaggaagttaccgagtcaaaagtccacaggaacaacaatcctagagaaatatagaaaagttgctggggggtaaaactaaagacattccaggcagaaacacctcccagaacagcagcaagctgaagatttctttctatggcaccaagagtagtatccactggagaaagaagagatgcagcttctattccatttagcttgagctcatccaaagtgtaaagcctttggggtatctgcacgaaggaataacgcattgaatgaaagcaggccctgaatctgaagcattacaacttacaacaaccaaaaattccccaaaatctcgttagtttaaaaaccaaatcactgaccaacctgcctagcagcaccaaaacaacgcagtccaccaggcttgccttgcaaagctttgaccaatgaaagtgctgccttgtcatcccccttggtcagctcttcatccaatttctctaatgtttttcgccttgacaagctaacctgctccgatgaacataagactctgaaagagggaaacactagatgagaacgggtgaaggtatgataagcctgcatgatgaagcatcccacgcgctgcccattcacgaaacaaaacagttcaaactgtgctttgggaattgagagctctgttttcgcgtagtctaagccacacgaaagtggataaagagaccaataaagagaccatctattctagatttattaaagtacactacagagcacccttatatacacggctaaaattacttataatgcatcgaaattttttaaactaatagcccctgtcactaaaagacgttgaagaaaatggaacgaagcgtttagtatttgatgaattaaagaagagtaagaggtttaacttttaatgaatgcttcgtctaaaagagttctatcaacttttttttcttttctatgaattttgcgttcgtctaattgaaattctgtatatatatgttacccatggccgtgcatatcataattactgatgacaatgttaaatacgaattgacgtagaatcatcttaacattggaaaatgttaagagattaattttgtttgagattaattttgtttgttttgttttttttttttttttttgacaaagatgcggattaattttaaatcacctttaaactagtatatgttactaggtgactttgattcataagttataacccatttggccatttgctaatataacaccaattcgattgatagaacacaaacatttttaatatatatctacatatattacaactgcagtaataacctaaagtaacaaaagaattactaagacctaaaactcttgggaagcagagccaatctccccctttcctttgccaaccttcttaggcaaaagggtttggtgaatattgggtaaaacaccaccattggcaatagtaacagaacccaaaagtttgctcaactcctcgtcgtttctcactgctaattgaatatgcctcggcacaatgcgatttttcttgttatctctcgcagcgttaccggcaagctccaaaacctgaatcataacaaacacaaatcagaaaccagttccaatcaaacaaacaaaacatatatatttacatgtcaaaattgatcaaactgaagcaacaggcaaaagataaaaattgaatacaatttcgaaacagcacatacctcagctgcgaggtattcgagaacagcagaaagataaaccggagctccagcgccgacacgttcggcatactttccaaccttcaaaaatctagcgatcctaccgaccgggaactggagccccgccttctgcgacctcgacacggactttgaggcctttggcttgcctctaccgcccttagttgaaccggcagcagcagaactcatattctcgatcaagaatcgaaaacgacagcacttctaggaagaaaatcacaaaccctaaccctagatttctcgaaagaatgaagatttagtgcgacagatagcacagaatacagagtaaccaatatttgagaaaatggagaagcggtggaattatataagcagtaagagcgatcttattggttagattagggatcacgaggactgccaacgtgtcacacaaatccgattcgcgggaaagttttattttatattgcctttgacgtctttaatttcctttacactccctacagattttaaaagaaattttaaaaattgtttacttaaataatagtaaaggttgattcaaaggagaaatgtttctggaagaggtaagattgatggagata

SEQ ID NO: 110922 - DNA, 1929 bp, Cannabis sativa
ttaagatttatttctctttagaatatggtctacaagattatctcgaaatcattgcaaatagaattagactgatcctttcccaattaatttgtcctacttaggcagcctttgttctagagtagaacatttaggataacaatgtattagtttaaaagatcatccattatttaagcttatacgatagaaaaaaaaagggttgtttcgttataaaaaataggtaaataaataagtggtatcaatgaaaaccgcatatatgaaaaggactgtctaatttattatgcatagaggaaactagaagttgctagctatggatggacatgtaatttataataaattattcttatctttcctaaattattacattgaattatattaataatattattttgacattgtagcctagaaattaatgcttattcttttttcatattatctatgaaatctaaatattaatttatatttgttacatcatatcatttatattaatttatttatttcattcatttacatttttctaaattgtcctataaataaaataaataatagttctcatttgtttcttatatttactgtaatatgtgtttttttttttggaggaaaattagaaatttgtattacttcaaacttttaaatttatacaaaatctacactttctttttagaaagccattatatgtttcactttatacactaattataattgttcaaaccattatatctattccccccatcttttttggccacataaaagtgattcacaacttcacttcttgttgaattctcttttttactgcttgtattgtactcaatttctggtgccataagacttcatttcgatttctccaaatatgatagattgttgcagttacagccgttgcacaaacttgctattgaaacctggtatgtgttgcttgcttaatctctcgcaagatctgtgggagtgtagcagcagccgggaagttacaattaagccaattgacaattccttcaaagcacttcgtgctgaaatggcagtcaaaaataggtgcatattacttttatctcctaaatcacaaatcaggcatctcttgtctgtaataatattgaaatgaaacaacctgtcttttgtttgtaatctattaagtacagcaagccagataccgaatcgatgtttaagaattaagaattgtccccatacctctccataccgacttttattttcatgtttcggagcaagcaaagagtatccttacttgattgtatacctggtttggagaaattgttgcacattgatatgttgcttgagctcctctttgacatgcacaatttgtcgccagtaccagctgctttgggtggaactcttatagtcccaccaattgctttcttttaagtacacactatgcacccatttaactcacagattatcttgtttagttgcaattgcccaaacatatttaccgagtgcagccttgttccaaattaagtagtcatttttgaaaccccaatcctctctccttacgatccttgcaaagatcagaccatgaaatgtagcctgggccattatatattatgtcctgcctctccaaaggaaggatcagcaaatggcaataattctcttcaagacactcttaggtaggatcatcatctatccccaatacgtacgaattgcaattaacactgcatttatgagtgtcattcttcctgcaaaagaaatgttccgcgagcttcatagtcgaatcctgagaaccatcttcttaattaaatttgagcattcagtttgtgaaagtttccttgaacaaataggcacccctaggtactcaaatggaagttgacttcgttcaaagctagaggaatccatcactcgttgaacctctgtttgattcatgcctgagcagtatatagaagatttctcaacactaggtttcaaacctaaggtttccgaaaacatttt

SEQ ID NO: 110923 - DNA, 5171 bp, Cannabis sativa
taaataaaatcacaaaaatcgtaaaaatgcttaaaattctgtgaaattgtatttttgtaatttttttattatttttgtgtatttgtgaaacaatcccttaacaaaagcccaaatttctctacatccagagggcgtgaatgatcagaagagtttgttcagttgcaaaccccctcttttccaataatttctgcttacaacctcacgttatttattacacttaacaaatgtagtaaactcaccacaaatagtcataaccatcaccaccattatgtgtaaacacacataattatataaatatataaaatacacataatgagatatctgtaaatggcatggcactactagaatcagattagcaataccgcactttgagtggatatctaaatggctaatctaatggatacgcatacgcgtgacaacatcccaccaacgtccaagactaccttgcacccaactcattttcatattccttggacctctttatataagtcactcaatcagtgtggttctaattatctcttattaacacactactacttgcttaattatcttaataattaatacacattacacaaacggccatgaaagccattttgctctttctactattatttgtgcccttcattttctcactgttgagagaaactaaagcagctcaagctggtgggagcaataaccatggactttatatcgtatacatgggagcctcaccctcaaccgacggttccttaagagatgaccatgctaaacttatcaactctttgttcagacggtgataattaataacttctttcatttttttggactgcttgtatatctatctatatattcattcactctatttgttttatattatagtaaagcaaatgctttagtgcatacctataagcacggattctctggttttgcggctcgtttatcagaagcagaagcagagttagtggctaagaaacccggtgtggtatcggtttttcctgatcccatgctaaagctacacacaactcattcatgggattttctcaagtaccaaacagctcttaaaatcgactcttttcccaataaaaattccaacacatcttcctcagcttctaatgctgctgctgcttcatccaacggtggaggagacaccatcattggaatactggatacgggtatttggcccgaatcgaaaagtttcggcgatgaaggaatggctcccattccaactggatggaaaggaaagtgcatggctggtcgtaacttcaactcctccaattgtaacaagtaatatacataaagaaacaaaatgagtcttagttaagttagaaactctcgtgttatttacttttattttggttattaatcaggaagctgatcggggcaagattttacgacgacgaagacgatgatactccggaggagtaccaaacggcaagggatttagttggacacggtacacacgtggcatcgactgcagcagggtgcaccgtctcaggtgcctcctactacggcctagccacggggacagccaagggtggatcacctagttcgagaatcgcagtctacagggtctgcagcccacaaggctgccttggctctactatattgaaggcttatgacgacgccattgaagacggggtcgacgtgctctccctctcgcttggtgcttctgctgcatatcaacctgacttgtacactgaccctattgctataggggctttccatgctgtggagaaggggattaccgtagtgtgctctgctgggaatgatggaccctcaccatcaacggttacgaatgctgtgccttggattttgaccgttgcagctactacaattgaccgggatttcgaatccaatctcttgttgggtggaaacaaagtgattaaggtatcttcttctttcttttggttcaaagaaaacaggacatcatcatgtcctacatgttagctcaaagtaacttacttgttaagcatcaactaattcagggagaaggcataaacttctcagctcttaaaaaaactcctgagtacccattgatatacgccaagtctgccaagaaaagtgagggggatgacaatagagccaggtaatataaattgcttgtttcaaataataatccttgtttgctgcaactactaattagtcattaactaatctgaaaatcactgaacaatcaaaacattatcagtaattgccaagatgattcattggaagcaacaacgattaaggggaaaatcgttgtctgtgagaggaaagatggctattcaacctatgagaagattgatacagtgaagagtctcggaggaataggtgttgttgtcatcgacgacgaatcaagggctgtcgctgataattataaagcttttccagcaactgtcatcagttctaaagatgctaccgatatcctctcctacatcaactcaaccaagtaagaattgtggtgaaaattgaaaacgatatattctttagttccaaatatttctgttaatcaagaccagcttttgttttttttttttgttttcatgcttgacaatataggaatccagttgctacaattttaccaactgagacggtaacagagtataaaccagctcctgctgtggcatatttctcatccagagggccttcatacattacctctaacatgatcaaggcaaggctattcactaccgttccctgatttccctcgatggatctaacaccaaagtttctttctgatttctcactagtatttgtctttattttgtacactctgctctgcagcctgatatagcagcacctggtgtgaacattcttgcggcgtggattgctaacgacacagatgacacccctgctggcaaagaccctccactgtacaacgttatttcaggtacttccatgtcgtgtccacatgtttctggtgtagctgctacagtaaagtcccagcaccctgattggagtccctccgcaatcaaatctgctatcatgacaactgcgactcaattgaacaatctgaaagctccaataacaacagactcaggttctgtggccacaccctttgattatggagcaggtgaagtaacaacagaaggaccattacagccagggttggtttatgaaaccactattgttgattacctcaactttctatgctattttgggtataacgaatcgaagattaaactcatctcgaaaactatgcctaacaactttacttgccctgaagactcaagctctgagaagatatcaaatatcaactatccctcaatagcaatctccaacttcaatgggagtgcaagcaagacaataagcagggtcgtcaaatatgttggggataatgaagcagttttcactgctaccattgaagcaccaagtggcttaaacgtcacagtgaaaccagatgaattgcgatttaaaggctacaatcagacattgacttatcaagtgactttcacctttcatggggttatgaaaaagaattcaatgggggtgatttcttggacaaatgaaatgtataatgttcgttccccttttgtgctactcccctgaaactagattagaaaacacacagcgacaaatcatcgtatgatgatttctccaccaagtcaattattgaaatgtagtagtaactccgatgcttaacttccatcttaaataaaaattagaaagataaaaaaaatagacttttaccacttgctgtgatcagtacataatctaacaatgaaagtggggacccttgtaaagaatattaggaaaaacccatgaatttaaattcgatacgtgttaaaagcacgaatattcttaaagtaagcactaaagaatgtcacatcactaaccaaaaatctatggttccatgattccttcagattagccttttaacaattatgttaaaagatgtggaaggaagctctcttggatataagacaatccaaggttcaaacaaagattataacaaaatatgaacaaacaagtaaagaaaagaacaatggataaagaacaacattttataacattcatatacttgaagagatccagataaacatcacagtatctaaaggagagattgagaagatttgtaggagcattaaattacaaagttttatggactaggaggctttccccatgttggattgcaataacattcagtaacctcgaaatccaattaaggccaaaagagaaaaggaaaagaaatacttgagcacagaaacaaagtagttcatttgttgtaaacaagttttactcaaatgcccattggttttccctgcgaacttcctcctcttcttctggtgtaaagtcattcttgatgttgaaggtcttgcgaatctcctcaggagttttgcccttgatcatgtccgccaccgtctggcaagtcaggtccagcaagctcttgatgttcaaatagtttgcagcctagaaaaaccataaagggtcgtctcataaacttaaaatttcttcaaattatatccaaaatttcacaaataggaagagactatgcagtactatacatcatcataattcagagaatctatacaacaaagttgattctattatgaataaacacccataagaacaccatctgcgaacccagcaaaattaaataagcactacaaaccctaactataaaatcgatgcaataaaaatgaaagaaggtatatataaaattcagtggatagcagggaagaagaaacgaaccaagatgagatcgaaaagagtggcctggtcaaccttgacgaagtctgtgtcccaagacttgagttcatcgtcgacggaagaggcgcggtcgtcgaccttaggagcctcgacgtgttttttgcagtactcgatgaccttagacaagatcttgctggtgacgttgggaaggggaataccattgtcagcgcaatcgtcctcgatcatgtgcttgatggtctgcgactccaaggccaccgcctcatcgacctcgaaggtttcaccatcggagcttttcaacgtaatctttctgccggacgacatcgattgaagcgatctcgggctgggatgctctgatcgattcgaagaaaaagagaaggaaagggatacggattgggatgaagatgaagacaatagaattagaaacctaacttttatatttgagaataccaaaaaaaaaaagaaaagaaaaggtaacttaaagaaatattaatattatttttagcaaaattctaccatagtatttattctcaaaaaaaaaaaaa

SEQ ID NO: 110924 - DNA, 7835 bp, Cannabis sativa
  modified_base (2972)..(2973): a, c, t, g, unknown or other
gagagagagagagagagaacagtagataggcgtacaagtaccttcgtcaagggcaaaaacccaccaccaaacttgaaacacattaaaaagttactaagagagaaatcttaaaattaagataaattttgctataagtggataaataggcgtaatttattaattacggagatttaattaaaatgtgtggatataatgtaagttattcgtgaaataaaaatattttcatgttcggcgaccctagaaacccgattggccaggccaaaatatcacaacggttttagttagtaatattgatgacattattgagataagtcgattatagcaatattttggtatttcggcgtactcggagttgaccaaatatcgtaaaattaaaaaaaaaaatagtggctaagaaataataagataattattaatgataaaatttttattaatattattatattattgttactgttattaatattatgattattattataatattaacattattattatattattattaaaacttatggtcaaataaatttatatatatgtgtgttttaagtttataaacgaaacagtacgaatgaaccttctattcttcgtcgaacaaaaccctcatcttcttttatccatttttttttttattttcaattcaaaacctagcgatttaagctctggtagtagtagcaaatccttgaagagagaaagttgtctgggcttagggcaacggtaaggaagagaatcatttattgctgcaacactgggaacatgtaaattttgccatgcatgatatgattagacaataagggaaaacagatctagatctgagagaacaacaggctcgtcttctgtttattcatgtaccaccgacacattatgttgtaccactggatatggtaaaacttatggaaccaacttacgagcatattaggatcaaaaactaaataaaataccaattatggaatagagcaaaaggtttcagggtgaccaagatagcggtcaaggtgagaacaagaaatggcgaccttatcctgagtgttcaatatgtaaaaaaataccatttgggccaatgtagagccaaatcttgttttcattgtgagtagtgggtcacatgaaaagaacctgcccgcaattaacaaataatgatgttaaaggagaagagtgtatggttcttgcccaagtgtcgattatgactcaagaggactgaggtatcgttccttcgatcaactcaggttagaattttatgggtaataatataattgttgtttcaattgatatcgatattaagaattgtacactcaatgaggggacatcaaaagatctgaatggactgtgcatgtatgttagttagtggtaactcatctgacggggtcagacagattagggaaatgacaatatgaattaaatttgctggtattcctaagtggaatataggacataagtagccaatggaggcatccatttaattgattcggagaaaaaaatcttttgtttagaagtgatctagtattagtaaaggtgggacaatttatgagtatcgcccagaatcctaagtgaattaaaggcgacgattatgtgggttaatctatctactaccaagggaaaaataaaacaaaagagacatgagtcaaactgcgacagtcagagccccgtgatctgcaaggaatagattgggaggtatataatcccacatcgcctgggagaaggttgtatatgatgattatgagactatgtaggtatgggactacattatcgtaagggatttgaatggattgattggggccacctatatcaacgaggtgtatcttatttttggtagcctatgacgaaagaactctacgattaagtgtccttgacttgaggtgatttcatttcaggaagggtgagttcttaagaagtttttccaagaagcatgcgggtcagaacaaagcacgttgggaatactcgagttgacctgaaaagtcagtcatcgatccaggaagtggtcagagtggcgtacctgtatataaaatccaataatccgtgggggagaaggcccaatggaggcttgaagcaagggcgttagaaaggtaacgtatagcaaaaggttagggagagtagtggtttcactaaggtaaagaagattacttgaatatttcatggtgatatggtaatgatggagaatacttttatatttaactggatggtcaatctggtattttgaataaataggtacttatattttgaataacaagatacttacattttggataattatactatcttaagtaattaattacctgtaatttgggtaaccagttacttatattagaggagctcttatgacgattagatcttaagaataaccacaagtgcatccacaattacaactgaaagttgtaagaaaaaaaatacaataataaaaattaatattaatataactatataatgttaaatgtgcaaaaataaataataaaaattagagatgatggaagattaaaaaaattaaaaatagagggaatacaaaagggaaagaattaaaattataaagaaaaagaaaaggaaaataaatgaaaaatggaagaaaaagaaaatgagagggaaaaaaagaataataaaccaaatatatatatatatatttatatgaaaaaatataaaaaaaaaatagaaagaaaaataataactaggaaaaaaagaaagagaaataaagaaataaagaaataaagaacaaaaaataaagtaaaataatgagagaaataaaaagtatataaaacataataaataaagaaaatataattgaaaaaaatacttataagaaattgaaaactcattaaaaaaattaagggatcattagaagaaaaaaaaagagacacacacaaacgataaaaagaattacaaaaatacagttgtacataatttttaatatttttatggcttttaaaattttatttacataaaatatagtcttttgatgtatttttatgttgtactcttgttatttnnttgttgattttttattatttgtgtattatttttttatgttgttttgatgttatttttctattactttcatgtggttttcttgttttttttttaagtaagaatatattattgtcacagaataactttacaacaaagaccaatctaagtacaattaatatgttgtacccaaactatctaaccaatcaatatcctctatactagctttctctcttttaaaatgagaaaacctcatacaaacttatcttttaattctatttacaagaaaatgaataatatatgcatgggcattccaaagaatgttattttgagcttcccaaatatgataaatcaaggtatttaataaaccattataaatctctcttctaagcttggactgcttacaccttttcacctaattcacactatattcaaacttattttgatgaagattcataccaacctaggtacttaattcagagtgaatttgcttgttgtaactataattgaaaaaaaaaaaaaaaaaagtgttggttgttcaatttctacctcacaaaacaaacaagcgactgtgacaataaagctaaaattaaataagagctctctggcttagagccttttccagcaagccaaccaagtaatgaaacggtgttttgggttgccctatctattccatatgaaattaaattatttctttctaagattatcactcggtcagactttcgaacaaatagaatgtatgttaaatttcattctcttgaaattgacaacctccattttgctcttgatattgtttttcatcataactattttcctccagtaccaactggaactttgtggagcattataactccacaaatcttgctctttaatgtaaattaagtggacctaataaacccaaagattatctcttttgatggaaatgtcccaaacatatttactaattgctcccatattccacatttcaatatgtctctaaagtcaagttcaccattatttctaggctgacaaactcttttccaatcaatttgtccaagataaagtgagtctgaaacacacaaaaaggttctacgaatattattaattctaccaaggatatacattggcaaaatcatgagttgagtccaataattatgtatggacaacaaggcagaattaataaagatgcatcttccaacatacgaaatatgccttaaactacaaagtctaaatctagctacaattttctcaaaaatagcatcacaatcagacttagaaatttgctttgcataaataggtttgcgccgtagagaacttagaaaaaaaacctgagctatccagaatgaattgagtatctaaagaaaacatacctaaacaatacattattgtccttactaggattggcttacaaacttgaagtttcaaagaaccgtttaaaggtccttagtgagagcataacagattaaacatcccctttagaaaagagcaacacataatcagggaagcacaagtgatttagttgtatactcctacacctcatatgataactaaatccttcctttttagtaactttagacatcaacctagaaatgtagcattccatgtcgatgacaaataataggggatagatggggtcaccttgatgaagcccacttttaatgaaaaagaaaccattaatgagtagagagaacttaggagtagaacacacgccattattatcttgatgaacaaatcgagaaaatgtaaactcccagcatttcatgaataaatttctaatccactgtatcattagctttcttaagttctattttaatcatacgaatgagaattgaagttcctaccataatatttaatcaagtcttgacaaatgaggatgttatgaccaatataccttccatgaacaaagtttccttaacaatgttagaaagaacatttctcattctagcacataaactttagtgatagttctatagaccacattgcagtaagcaatgggtctaaaatcattaacactattcagatagattatcttgggaataagtgtgagagttgtggcattgatctccttgagaatcttcccataattaaaagtggaaagcacaacattaatgatgtctttacccacaatttcctaagttttcttaaagaaatctctagtgaagttgtccggaccaggagctttagcatcaagaatggaaaacaaggcatctttgatcacttccttagtatagggcctagaaagaaattgaatatgttcaggttggagaactgagccttctcaaatcactctggccaaaattctttttttccacttaatttgaaccccaataaatgttgataatactcagcattattaacatctttaatgttatacatagaaacccatgttcattattgacggcataaacattgttctacattctttgaaacttcaagttgtttgaaagattttagtattacaatcaccaccaacactccagtctagtttggcttttgttgtaaaaatgataaatgatcaacgaatgcttgattaaaggctttatgagcttccactttagctttaataagactcaaattactaggaaccttttgaacagctatctgacaatcttgtaatctgatattagcatatcaaagtaatgaaatagctttagacccacattaagaatcagatgaacagtaagaatagatgggatgtgatcgaaatcaaatttaggttaaaaattggcttcaatagtaggaaaagtatcaatccacttttgattccccaaaacagaatccaagttggcatacactctactcaagccctcttgcttattatttcaagtgaaaaaacaatctgaatatttgatgtcacaaagtgaagtattctccaaaaaggtttttagctacttgcaatctttagtattttttcctgcttgaattctctcttttgggagtcccacactattgaaataaccaataagaattcacagattttgttgagtacaggccatcatcttcaaattttccaaaatgacatctctatcattcacctcattatgagcattaatgaaggtagcttcaaaaactaaagcatgtttaggtttcaccacaatgtgcatatgctgactaaaacaatcccaaatatcaagatcaaaagacatcaggttccaagcaaagagaatcctactattaggatggtaagaagaatttgtagaaaaataccatcccctaaaaagactcaggtataaatcccccagattatgagctttaaccttagattccaagagacacgcaattctaattttcttctcaaatatgtatattatcacctctctatgtttctaggaactgtctatcccttaaacattctaacaaaaaattatgtcccttaagtgtgggagaaactccccctccctcacctataatccccatctcacaaagtacctgtctagcctgagtgtccttatcattcaaagcttgaaatgaattacttatgctcatgctaggttctggatctccaagctcaatttctttcttattttttctcctctaaactctttgaatttggtcaaccagaccaaagtttgacatattactttccactttctcttagttttcttgttcaatcttagaattctttgtttcatcagatttcttaggaacccattggtgccctttttggtaccttcttgcaatgctactgtgtgtgcccaagccttttacaacctatataaattgtaggtttccactcctagtggatccctagatgaaccgtgtctcccacttcattctcaaaagctatttgctttagaagctcttaactaatactgacttcaagcatgactcgagcatagacaagcctatctcaattttgtgaggcttggtcctatttaacaagcctatcaatctaccaaagaatcttctttagaggtgtttctccccaatacttaatgtcaagatgagagacttctatccaaactggtaatcagcacagattttccttgcaaaatttctcatgagcattccaaggtttcataactaaaggcttcttgttaaaaaagaggtatccccctgctatgacattatcctaatccactactgagagaaaacaaactaagaaaatcccatgggctaataaagaaactttgtcaatccctttatttttccagattctatggaaaaatccttccatggtctaaataggtgggttagccccaagaacataacagaccaatcctgaattccaataagaagcctcctctattatatcctaataactatatccttattcccctctttcaatttgacatcagattcaatgtgtagtataggaacaaggttagttagagccttacctctagtcaatcgatccttagccgcacgcataactccaatctaagaagaaatagtctttgagacagtcgatttctccattggtgtgagatttgtaagcatcgaagaactttttctctgttcaccaacctcctcgagcacgtcgctctgtgccgcattaatctgcatcttcttcctcaaaattgaaaaaatcaatcacagttatcccagtcagctccgcaagagatttagtttttgataattggatcctctgaggaaggacctttcttcttcacaccattctcccaaatccctccattgttagattttttgatcgcacccttcctaagtctttcgcgcccagccatggcaccagcataagctgaggaacgcctaagccctagcaaagtttgatatcctttgttcttatgtcacgatgatatgtgattttcttgatgctttttgtgtctttatagaataccgtaaaaaaattgaatgtagaagtgtaaatttttcaacaaaaatagtagtttatgtaatttttccaaaaaacaactgttaggtccttttttggcaatttagttgtcaaa

SEQ ID NO: 110925 - DNA, 4855 bp, Cannabis sativa
  modified_base (4789)..(4790): a, c, t, g, unknown or other
aaagggggtttttgtagtagtggtgctaagtgttaaataccttatagagagtgtgtcgggaccaaaaataaggaccaaaaggtttttacattttttccttcttcgggtttggttgggcatgatctgagtgatattggggcttatatctgagtttggaatcatgtaagaagagttttggacgtgattgtaaggtctcgaaccatagtttacaagagcaaccattattcacgtttaggattttagttatcgaacgagttcgaatgcgacaaagtttcttcgtgttttggatttgtggaaggtcatattcgagtttaagacaccctaaggagtgggttcgacgtagaaaaatggtttgaaatagtctaaaactgaaatcacagtttggacaccatttttgtctgtgtaccgtgttcagagagccattatgggacaaaataccaactgtactgggcttctttaaggtattggaatctatgggaatgttctcttctcgcaaagacgcatctaaacgaactgtagaaagagtttggagcttgtcagtgccagatctgggcagatttgaggtgtttttctcaaattcttttgtagattttgaaactatatattattttagggtatttggtgaagtttgataattttctaaatttatttagaattattgtgaagtatttagtttatttgtgagaataattaaaatagatagttagattgctcaaaaaataatagtttgattaaatatgactcatagtttttctatctccttctctagctcttgccgctcacgagttggtgccatagcgaagacaagatcaaaggggcaaggaaaacagggagttgttactaagaagatgaagaagaagggaccaacttgttctatggatgttttaaagataatattcattgatgaggtacttggtatcgaaccgatagaattctctgaggaaaaggataaaaattgttataagcaaggattgcgaactgttggctctgattcattgcttaaagacctatttcaacctgctctttcaccaaaatcatctctgagagatataatgcaataggaggatgttcgaagagactttgtacaatttctggcagctaatgatcaatgtaacagtaaaattgctcaaggtaagaactccagacctctaatattgcgatctggttatgcagttcggacactataatccccctttaataattttgagaaacctacaaaagctaagattactttggaggatatagaggatgaggtagcattctggaaacctacaaaagttaagattactttggaggatatagtggatgaggtagcattctagaaaccttcacttgtctgttatgtgcttggttctaatccaccattgcacattctggaaggacttgcaaaaagagtatggaaagataaaatagatagaataaaggtactatcacatggtatctttataatttgatttacaattattaaagatcgtgatgaagttcttaattgaggatacctattcttcaacaaaagacaaacagcgatcatgaaagcttgggatccaaacacaaatttcataaagaagttgtttgaattgtgccaatttgggtccaattagaggatttggatatgaattactggggcaaaggttgctattcaagattataggacaggtggggaaccatgtcatggtggattctgttacaaaggatcgagacaaactcaattttcctagagtgctaattgtggtaactttaaacaaagagctaccagacatgattgattttgaagatgaacatgaagttagcacacaagttggggttaactatgaatggaaaccaattatctgtaatcattgtttcggcttgggatattccatagctgattgtagaaagaatatagaaagtaagaaagcatgggtcgttaaggaagataataggcaaacaaaagcaacaggggttgatatgaagaataagccagttagtgatggtttccaataggtgacatagtttatcacaaacttctcgtcacttattggcaagctcagaactagtgcgataattaatctcttctttaacccttggaagccgttttcacatttattagcccacacaaacttataattctttcgggttagctcggtaaaaggattagcaatcttggtaaagccttccataaatctcatatagtacccagctaatcctaagaaacttctaacttcaattgcttttttaggtcgtggccagtcccgaatagctttaatcattatcagatataccgaaatctcgtctctacttaccacatgtcctatgaaactctcttgggacaactagaattcatactacttaaactttgcataaagtttgaatactcaaagacattgtaaaaccatgcagaggtgttgctcataagcttcctccggtacataatcaactagaataacatcaataaacacaatcacaaagtgatcaagaaagtccttaaatactcgattcattaggtccataaatgatggtggtgcattagtcaagctaaaggacattactagaaacttgtagtgctcatatcgagtacgaaaagaagcttgaggaatatcctctccctgaatcctgaactggtgataactagatagaaggttaatcttggagacgatggtctttccttgtaactgataaaacaaataatctatccttggcaaaggatatttgttctttattgttaacttgttcaactctttataatcaacacacatatgcagtgacccgtccttcttcttgacaaacaaaactggtgcaccccaaggagaagtacttggctttgtaaaatgcaaattaagtaggttctgtaactggactttcaaatccttcaattctagtagtgccacttaatatggggccatagaaacttgctcaacccctagtaccaattcaatttataaatcaatctctctcttttggggtagtcttggtaattcttcctgaaacacatttgaaaactcacatactacccgaaccttctctggtccttccggtttatcctttatggtatctatcacactatctaggtatcttgtacatctttattacaacaattcccttgtcttaagtgccaatatcattggaatcctagatccctgaatctttcctgtaaagacaaacatgttttcaccctctggttcaaatgtcaccatctttcacttataatatatagtagcattgtacgtagccaaccacttcatccccaggattgcatcaaaatcctttaaatctagtttaatcagatccactgacaattcccttccttttactaacactgggagagatcttacccaccttctcgagattaccacttccctagtaggcaataagataccaaacccactagacatgatatcacattgtcaactcaatttttcaataattctattagagatatatgaatgtgtggcacccgaataaatcaatatggtaaacataatacccctaacaaaatctcacctataactgtcgaaggaccattctctgcatctatttcggtcaaagcaaatacctgggcaggaaccataagactttatttcttggtctcaggcttttgtaactacgggcatttgtttctcaaatggcctactactccacattagaagcaggctttggactgacattcacccaagtggcgtctcttgcacttcagacattcggggtaagactgtaaggcttcgtttctaccttgacggaagccctggttaccctgaaaccttctatttgaactcataatcgatgactcaatcggtctccttttttgatcattgggactggagctcttgctcatgccagtattggacagtgtcttccaaccattcttcctctgttactcttttacgaatcaagtatttagcccctcagtagtgagggctaaatccataatttgaggataggtcttcacaacctctagttgtttggctaccataataacatctctggcaatgtactcttccaagcctctaataaaattggcttttcgtgccacttcagtggccacttcatcagaagcaaaattggccaatatgtcaaacttggtagcatattcagtcacagtcatgctaatctaaactaaccgtgtaaactctttcgcttgggtgacacgaatggaatcattataatacttctcataaaatattgccttggatgagttacaagtcatggtgttcaaattatgaccttgaggtacaatctccaaccatatttgggcatcatcacgtaatatataaacagcacattgtacatgatcattatcttcgattcgcataaagtcgaaaatagaggtaatcatactcatccaatgttctaccttcagtagatctggaccacccttaaacacaggcgggttttctttcctaaactgctcataaattggttccatacgatcccccatattcagttgtactacatgagatgcatgtatatgtgcaggacgagcctattactctcttgggtctcaaatttgctctccttgctgccttaatgtctcttgcatggcagcaaacatttgttcatagttttgaggcaagggaggatgctcttcctcaccacctacctcgagccttagctcgcagttcacacggctagatcatcgctacatgatcttaacacacctgcaatctagaacttccaaccattcagaattcaacaaatatcatgatcaatatgcatatgtcacaaacacatttttatcacaatcatcactatgtcacttttcccaacatactttataatagttcaggcaggtaatgttgggttttatgccctnnataaaactctttacaatctgattagttatcaatataagaagtttgaagtgattgatgtttgcatg

SEQ ID NO: 110926 - DNA, 2903 bp, Cannabis sativa
acccgaaacccgccaacccgaaacccggtaaacccacccgatgttcagccctaagttcagggatcctgaattccaatgatctcagtattgaaagccaaagatctgatacaagaaggttgtttagggtttctagaagtggtgttagacaccaatcggcctgaatcagttcgaccagaaaacatcaaagtggttcaagaatttctagatgtgtttttcgaaaacataaatgggtattacttggatgcattatttggtttgttagtgatttgtaaagtttatatgcttatagaaattctgagcctaaataattatttcatctacccttgcataagcctaacattataatctatgaaagtccttttgatttgatataagtggagaaagttaaatgatggaagtatatttaaaattggtttgtgggtctgtttggtttgagttgagcatatacggtggaatacaatcattgtgatcatttgtgaattatattgttaatttccttaatttaagcattaaggttaattttttaaagtgattacactgaaattctagttaatgttgcaattgatatcatgagtattggaaaagcagtgcaaatggtaatggtggcttatcttgttcgttgttatgtttgtttttatcagtttaacttggtctttactcgagggcgagtaaaggttaagtttgaggaaaacacaaaagtgatctaatgatcggggaacggaagggtcagcatttaatgtgtgacattgaaactgaggcattttcaaatcataacgtacaccttggtacaagcgctaacatgatttagctgtcaatacgccaccctaagcctcacacacttttccaatgcgcatgaagttcacaaaccaagaagttagcaccacatatgttccattagctgcaatccaaaggtccctggctatccacaaccaagggatacaaatgtcgaaaagatcgctcctttttcaaattttccacatgtccatgcaatccgaagagaagactacaagcatttgcaactctcagaagcttgggggtaaactttatctacatttttggaagggggacacatagcattcccaattcgaatatatcaattagggcctggttagaaaccctaccaagaggacgggatggatctaagcccatctgaggccttgggtatacacatccaagaccggatctatctaaatccggaagggcctctcccatctgaggccctccgaataagcatttgggacgcatatagaaagggtatcccaagaggcaactcatagacctagtataggacgacatgacaaccctctgacaccaaatcccatagaaatagaagattgtctcctatgttagaccttaagaatgcatgtaccaccaaaaataaacttctcttttgtctaatggcacgattttgacactataatacataaaaaaacaatgaatgcatgacatttgttgaagatcacgtggtccccaagcgtacgaagggtctctgccccatgggatgacctcaatttatgggccatagtcaacatatttcatgtatttatcctattagtgggcaaagtttacacgcaaaccctagcgtatcacggatatacctaaacttgaatcctagcctataaatactactgtataccctcaagcaagaggtggggaaaaactattgtgtaaatattatagcaagaaagtagggttcacaagcttgtaaaaacccattgtaatatattaaggctgcttaatctagtacgattgactcgtgaattaggattcatttatacttgaaccacgtaaaaatcttcatctctactctctattattttctttaacttcttaactttaaatttaaccagtttatgagaatctcaataaacagttatatttaacacaacatttttaattgtgctctaattagcaataacaatttaaaaagtaatttgtctaaaaagcaaaatgtcattaatgactatcattatattaaatattttaaaaaaattattaatgacaatattataaataaaatatatgtattaaagtatgttattaatgattaatgataaaagtgtaattaaaaaatatttttttttttcgaaagaacttaaagttcattaaacaagagaaaatagttgagaatcacagggagatatctctccccttgatacagaccagccgaaatgctaaaaactctaacattttttgctaatccattcgcaactgagttaaatgaacgattaataaagaaaaaattacagacactaaagctagaacacaaatctaaattttccaacaaaaaatttaataggaccaatctgggggctagacccatagacaaagcagtcatcaagacttgctaatcagagagaatatgaatgtcattccacttagtctgtttttctcacaaaagagcaagcaaaaccgtacgagattctgcttccaaagcagagccagctttcagattttagactttaaaagcccaagaattgtccgaccgatttagagcaactgtagtaacactcgcgttcctctgataccaagaagcatcaacaaacaaaacaaaatttgcctctttcttcctttgactaaccaccaatctagactcgatattagtctctaaaccagagaaagaagaaagctaggcatttcgatggtgaattccaaaaaaatagcatttattatactaaatttggcacaaattataacacataattgggtaaatcttttgttaaaaagtgctaaaaatagcaatacacatcatttgtagtttcttaggtattttctatctaaagtggcatattttttttttgaaaggaagagagatatggcaatttcataaattaagagcaaaattggtgtatatgaaaataactagataaagtttacgtgtcaagtcacgtatgttaatttta

SEQ ID NO: 110927 - DNA, 2241 bp, Cannabis sativa
tgtgtttgctagatgatattgtagtacgatttgtgtttataaccaagatcaaactaaacatatagtgtaagaactctgaataacgagttcagatgatcaaatgagagagaagagcaaggagaaggatgaagaagaaagtgatgagtggaaagtagaaaaatgctcaacaataaaggttggcatggcaattgtatttatagacaagtccaatacaatattacaactgcttgaataaagatactaacatttttaactatcttccaactaacttgaagctaactttaactaactaatattaactgtctaaattagttagtctaatatcccctcaagtgacactagtctagaccaagtgtcatcttgtcatacaaaaaatgacatgtagtagctggaagtagctttgtaagaaggtctactagttgatcttcggaagcaacatatcgaacatcaagctaatgagctagaactttgtctcagataaaatgtatgtcaacttcaatgtgattagtgcgggcatggaatacagaattagaaggaagggaacctgcaatgcaccaaggttgtcacaccacaaaatagggcactaaggagtgttgatgcttaattcagtaagaatagattgaatccatattagttcagaagtttcaagggccagggcacgatatccagactcagtgcttgatcgagcaataacattctattttttagagcaccaactaatcaagttgcctcccaaaaagatgcaatacccagatttggatctatgatcatcatgacatcctgctcagtctgcatcaataaagccttgaagatcaaaaaatgttgctagtttgaagaagaggccaccatccagagtaccggaaagatacctcaaggccctcttacaggcataccaatgatcagaggttggattttgcataatttgacttgacgtgttgacagcaaaggcaatgtcagccttgtcattgtgagatattgtagggctcctattacactttgatacatagtaagattttgcataggggtgcctgaaattgcagtgagtttggttgcggaacacattggagttgattgtgacttggactcaaggagttaagtcctggaaagaagatcccttttatatttttgttaagttaaatggatgcctgattgtatccttttaacctcaaagccaaagaaataagtgataggtccaggaactttgagggcaaaggttttgtgaagatcagaaattagatgttgtattgattggaatttgtccctgtaatcaatatatcattaacataaacaagaataaggatcaaatgtccatgaattatattgaagaacaagcttcttgtatccccactgaagtaatgtgtttttgagagtgctaaaccaggcccttggagcttatttcagaccataaattgccttgtgcagcttgcaaacatggtttggatgtttgagtgctaacaaatccttgaggttgtgccatgaaacaaaactcgttaaaaatacttaaaaacaagactaaaaaataacataaactaacaatatgcttatcaatcataaaaaaatataattaaaattagtatatacattttttgtaaggtgcaatgattttctttaattatgaatactctagaattttttttcccattcaaattttcacaatttttatgttgagtttgcttcataaattctttttttttttctaatataattagtaaattggtttcaatatatagatatgtttttaatgggtattacctataaatatatattttattattggtcattaaatatgaatcaaacgattggtatttataattattaattatttaatttttaagaattaatatttaaatttgttttaacttatgatttgatgacatgacaatattttcttcttttctttctcttattactattccttcctaaatgaatcagatttagctaaacatttttgtgtcccaataataattaggcgagactgagaggaagacttacattatcatagatttagctcaatattttttggcctcccaatatattgattgccatgttggctttgaaaaattgaaatcccttttaactagtgcacctattattcgccctcccgattagaatgttccttttgaaataatgtgtaatgcttctgattatgcaattggtactgttttaggacaaagaattaacaagttacctcatgtaatatactatgctagcaaaactttaaatgaagctcaattgaattac

SEQ ID NO: 110928 - DNA, 1599 bp, Cannabis sativa
  modified_base (1463)..(1489): a, c, t, g, unknown or other
  modified_base (1539)..(1565): a, c, t, g, unknown or other
atatggtctcccctctataattcaggatcccttttcattaaatagagttttttcagcccaaaaacgagaaaagacgaagttatccttgacctgtacgaaggcggtgctgcagcggccaatatccttgccacaacagctgtaaaaaagtgaaaaaatgtgctttctgtagtccctcgccgcggccaccaaaagcctcactgcggccactggacccatttttttctacttcgacctctctcaataaaatgggcataactttctcatacgaactccaaatgagcttattcaagatacgttgggaaagataaaaaagagatctaaaaattttatgtttgactttgtccaaaatctgatcagaacatagttgaatttaggcttgaagtttcagttttattttctttcaaaattttctctattttatagatcactattttccaaaatttgtctaatttatgcattccaagtttcgaagcctaaaaccaaagaaaacaagcgtaattctattccaaaaataataataaagaagaaaaataactataaaatgtgacctgaaacttaggttaaaaatagcctaacaccctgctagatgaagattttgacttctaaacctgttgcgactgtttaatcgactgggttcgagggctctaggaaaatttctacaacaacacccgatctccttttcattcaacatgtaagtactttaatccctagttgaaccctcttgttatttcttgtttaggatagaaatttctcattcaagctatgattatgaaaatttgcatattgaatagtgaagtaggttatgtgataaattttcaactttgagatggacctttttgagaaacaccctgttgtgaaaaggggattagaaccgtctatatagtttttctggctatttgagtttcataggcttatgcatgtatatagatctttggggtttgtcaattggaatgaaactttgacgaatttttgttctgggctcttagtttgtcgattcaagtagctaggtttccctttatgtttgtgttggtagcaatggatctcaaccaagattttcacctgagcacagcggaaattgctaaagatgcacttgttgacctgcagaagaggtgctcactaaaggaacccaagctgaggttcctactaatgtatcccaccaagagatggttctcgtgactatcccagaggatgaagctttctagacttaaggcttctctcgtggaatcttaacttcattcagatttcattgagggaacccttcctcccatgcctgatatcctgccatgctctcgggctgctgaaccccctgtatgcaaggagcatccattttcctccatcacccccacttcaaagagtacctagggtcaagacccgagcatgaaagaggtttatgaggaatagaaaataggtggctcgttcttatcattgtttctacatgtctgtgttagaaattattttaccannnnnnnnnnnnnnnnnnnnnnnnnnntgattaacaccctaaatatgaaaactcaccattgtttcatgttttatgannnnnnnnnnnnnnnnnnnnnnnnnnngagagtctaatagagacaaaaactcacaaaacac

SEQ ID NO: 110929 - DNA, 1336 bp, Cannabis sativa
ctttcaaataacatagaaaaaacattgcataaaatttagtatacgtgcctagcacgtagttttttgctagtatatatatatatataaatgttctggtgtacatctagatctagtgatctagatacatgtatacagttcaaccgttagataactttgtacatatccttcattgaaaaccaaattaagaatgattaccaattgaaatcctaatatattaaaaatgaaattatcaatcaaactaattaatataacttttatcaatatctccatcaattaatttcgctataaatacgacatgatacatgcattgtattagagagtttaatagtacaattatgatataatgattaatagttaacatatcaattattacaagtaagcaaagttaatttaatagaaaagccctcatttgaacatgcaattgtaatccattttatttgtgggcgtgccgactaacatatatttgaatacgtaccgacatacatatatacatgcatatatatgatttatcgatcagcgactaacatctgattatgaaaagtaattaattaaaaaaagaacataaactttcctatcatcaaagagcactgcgccacaaagtgatctataaatatatataaatagattcatatatgtatagatactcatcattctaaacacaataaacatataagattaagtcaaagattttctcttttcagagggagctaatatatataaatgtgggtctttcttttctgcttctttttctcttttaaattgtcacttgcatttggtttgttttctaataaaagaaaattcaggtaaacaataatgagaaagaagtagtagagattgcaggtccccttaattaactaagggtattgaaaaactcaaaagtttctgaccccaaattatattatatatatatatataccttaatatatataaaatactttcaatctgaatcatttgaatatgaactttgccaaattattaactaacgtcaactactcattgattacataacatggaatatataaagtgtttaatattagtgtcatctatgataacagatgatcagtaaatcaatcacatttcgcacacagttaaaccaaacatcacagaaattattaactattaataagggaaggcataataagattaatcagcagttatagctacggaagtagtgatttatatagtttgtttgtctactaaatgattgacacaattaaagaaatatatatatatatatatagggatatgatttgtcccgcgatgtactttcacggaatgtattccgtggtatattagatgggtctcagggtacattaaatgagtgttagggtacgtt

SEQ ID NO: 110930 - DNA, 10686 bp, Cannabis sativa
  modified_base (9902)..(9909): a, c, t, g, unknown or other
gggggtttacccgcagaaatttagattgtgggggtttagcgaaaccaaaactaaagtattgggaattttaccgccatttacccttattagtaattatacacacattgtaagttctaaaaaataaatgtatttgatacaatttttgtataatataaaatgttcaattaaatcatatattttaggtttgcgttgagaatttataaaatttctcccgtaattatatcatacgttgtgatgtatataaatagagttgcaatttatccataaaatacttttttttaaataataaataaattcattaaaaatataataatatcatacagactaaatatgaatactatacatctcatgatcatcaattatatcatacgttgtgatgtatataaatagagttgtaatttatccataaaatacttttttttttaaataacaaataaattcattgaaaatataataatatcatacaggctaaatatgaatactatacatctcatgatcatcaaataaatactataaatgacatgattatcaaaataatactatacattcaaaaaaaatatgaatattcatatctagccaaacaagttgttaatccattcaaacttcaaagagcatgcacaactaatctatgagcaatacaaattagggacactcttggaaatctggataacaaacttgtaaaaactctaacaatgatctttaaattattagagtaggaaaatctaaaagtagaacaatcacagttgtaagatcttggtaacagactgcaattcaatgtcatcatcaacgttaagcaatttgttttgaaaactcggtattctttctctagaagcttgaaagataaattgcacataaataaaatatacattaatgagatggaaaataaaataataaataaataaatattattgtaattttataatttattttcccaataaataaacaaaaaatatatcaataaatagaaattataaagaaaactaacaatataaacaatattaaaaaaatattttcaatatgaaaaaatatatataaaaaaaaatgtaaattgtcatttctttaactttatttaacaagtattataaactattaattgctaaaattaccatttcctttttataatcaaaatctaaaacactaaatcaaaattaaattagtgttcaaagtcatgaaagtcaatgataatgtcaaataaattaaataatataaaaagatataaaatcaataagtaggataatatgtacaaatatttgttgtaattaatcatatgatcccatcacattgccctataattttcaatatcaacaaaatatattttaattttgttatatataatttaaactaaatttcatgaattactatttttccttattttttcaaaaattcttttacattgtatagttttgttacatatatcattcctaaacacgtaagataaagagtaactagtgttattcatgcatataaatctctattaattttcaactacatgtcgtatcctaaattatgatgattaagataaaaatgacatgtcgtatcgtgagttatcaattatatagtaatttttaaataatttgagacataaatacttaagtttaattctcagttgtaaataaatatataagtttaatttttggcagcaataatacttaagagcatctccaatggtaatattttagagaatgcttaatgaagtagaaaatttatgtgacaaaaaataaagatgctacacaatgacattgatgctatgtatttttttacaataaaaattaaaagtgtaacatatatatttaataaagaaaaaaaattatatctatacataataatgtgtgagatcataattatagaatttgtaaaaggtattatgccattggaatatttttagaggtaaaggtgtcaaaaatgatgtggaagaatgataaaataaaatattatatttttgaatgatgtggagatatataacacttttaaaaaatgctaccattggagatgctctaaattatatttttagaacttccgtaagtatctaactcaaatcattatccacgtctttttttattggtgtatttaaactatttttttttttaaaataaaattttaataacctaaactaatcagttattgccatgtgatgtgacaatttacttaacacttaacagtcaggtacttacataattttccgaattataaattaggtattattaccgtcaaaaattaaacttaaatatttatatatttatttgtaattgaaatttaaccttaagtatttatgctgtaaattactttgtatttattttcaacgacatgtcgtatcgaattatgatgaaaagggttgggaatgacatgtcgtatggtgaattttatagtaataaaatgtttgtatttattttaaacgacatgtcgtataaggaattatgaagattttgtacagattgaaatggatatacccattgcaggcaatatattcggtttccattcgctacttgacagtgtcactctctctctctctctctctctctctctctctctcttaaaaccatctatccctacactacaagcctcatctcaatctccaactccgaccctttgcaggtgatctcttctctctcatgatttttaatctttcttttagttttgtcttcttcaagttttaaagcttgactctttgctttgttactttggtgggttttttcaaatcaatctttgaattgagataaaatgactctacttggtatattatgtgaatgtatgacttgcccaattatgaatttaagctgttgattacagaatttacatgtgtgtgtgtgtgtgttccttgacccttggagctgatttttactactcatgatgtcttaagaagcattttatatagaccccccaaaatgaaaatttgattgggtgtagagaattatgataccccatttgcgtcaatacttggtgaaagtgaagttctttaacatttgaaagtaagtagtttgaagattggggttaatatttgaaggtggatgattatgatttgagtcttgagagaataatgataccccatacccaagagaggtaggttaaacaaggtctgaggttcgagtccctcctgagtacctacatagcaattgttatagttttctggtctccaaatattgtagggttagaaggagatcgtagtttcggaaaaaggaataatgatacctcatttgtgtcaaaacttggcgaaattgaagttgtttaacatttgagtcaatagtttgaaaattgtggttcatatttgcaggtgtatgattagtattttgagtcttgagaagcatgtatagacccccaaaaaagaaattttgattgttgtgtattgagaataatgataccccatacccaagagaggtagctcaaacaaggtctgaggttcgagtccttcttggatacttacatagcaattgttatagtttcctggtctcaaaatattgtagggttaggcagggatcctagtttcggaaaaaagaatagtgatacctcatttgtgtcaaaacttggtgaaagtgaagctctttaacatttgaaagtcattggtttgaaatttgggaaagttatgattaatatttgagtcttgagaagcatgtattgaccaccttagaaagaaaagttgattgtgtgtagagaactatatgatacactatattgtcaatactttggtgaaattgaagttctttgacatttttgaaagtcaattatttattatttgcaggtgtttgtgtgttttgttttgaggagctgaggataatttataatggcacacttactttccacttcttgtactcttaaaattgctcctggatgtaaaccaaattccagattaaaccaagactcattggccttttcagcatcattttctttccaaacatcgaaattgccctttagaagctttcgtttgccagttgaaaggtttagaacaaactctaccctgcaggaaaccacaattccatcttctggttttcgtgctagctcgggtgaaggcttgaaagcagagaaggttatggtaatcggtggtgatgggtactgtggttgggccacagcacttcatctatccaagaaaggttacgaggttgccatagttgacagccttgttcgtcgcctctttgatcagcagctcggtattgactcgctcactccaatatcctcaatccacagccgtgtacgtcgttggaaagcacttacaggaaagagtattgaactctacattggtgatatttgcgactttgagttcttatcagaaacttttaagtcatttgagcctgatgctgttgttcatttcggggagcaaaggtctgccccttattcgatgattgatcgatcaagagctgtttttacacagaataacaatgtgattggaacattgaatgtgctttttgccataaaagaatatagagatcattgtcatttggttaagcttgggacaatgggagaatatggtacaccaaatattgacattgaagaaggttacattacaattactcataatggaagaacagatactcttccatacccgaagcaaggtagctcattctaccatttgagtaaagttcatgattcaaacaatatagctttcacttgcaaggcttgggggatcagagccactgacttaaaccaaggtgtggtttatggagttaaaactccagaaaccgatatgcatgaagagctatgcaacaggcttgattatgatggtgtgttcgggacagcattgaatcggttttgtgttcaggctgctgttggtcatccacttactgtgtatggcaagggaggccaggtaaaaacaccttacttcctttctagttttttcttagtatcaattgttgttgttgttaaaattgtcatttttattttccttgttttgtgattagactcggggataccttgatataagagatacagttcaatgtgttgaacttgccattgcaaacccagctaaccgtggtgagtttcgggttttcaaccaattcaccgagcaattctctgttaacgagcttgcagctctcgttactaaagcagggaagaatcttgggatcgaagtccaaacaacttctgttccaaacccaagagtagaggccgaggaacattattacaacgccaaacatactaaactgattgaattgggacttcaaccacatttactttcagactctcttcttgattctttgctgaactttgctgtcgagtacaaagatcgggttgacatgaagcagataatgcccagtgtttcgtggaaaggaatcggagctaagccaaagactgttgctgcctagtctggtttttttggaaatggtcagtcagttgtactaattggacatttagtttagttttagttcagttctgtcttagaaagaaaaaaaatgaaaagcacacaaacattataagctgttgtatagttgtgtgatgatgtttgcatactaagaacattgaaaattttaaatccattcatgggatgatcatagctttgttgaagaagttcttgaatgttaagaaagacccaggaaaacggaaatccacatttcaaacaacaggaatgcatttccttactttcttctaatcgcgattcgtattaaccaaatattagataagtatgattacctactactcgagctaagtttggagatggttatcaactctctaaaagggaccttttctaattggagtattgacaactatttatttcaatgaaatcgattttttaattcattttcggattttaatttttcttgtgtctaacaatgtaattttgttgctcagaatatgattaaatgtaagtttacgagttggatcaaaaacatatcctgacagcaagtagtagttgaaataattaactgttcaagcgattagaggttttttttatcaatgaattctatgtttggtcttcttattcaaggttgtaaaaggctcctttcttctatgagtcgtgtttcattgtgttttgtaaaacgttttgtaaatcgagttgttcattttgtagctaggcaatctcgatttaatgctgatcgtgaaatctattgttttaatatacatttcttatgcaaatctttattgtattcagattctatttaattaaatgaagttttctttttttgatcaagaaaaggagattttcatcggtcacaaccaacaatacagcagctaaaaccaacaacaaccgagcaacaacctgcccatgcactcaactttttaataagctaaacattttaagtaaatagttatgatcattagtgttcctctttcccctaacaacattagccaacctataagacaacacctttttttatctcagcaacaatataattgaccgacctagagcactcttcaaaaacacacatgtttctatttttctaaatttcatacacagttgcaaccaacatacagttagtgacagctactggcagatgtttcctatcattgcagatccaaatttgccaatttgcaaattcctgaggccaagtaacagctccaaaccagctagtcaatctctgaatcactcgagcagacaatacacagtcaaagaaaaggtgagcatgagtttcttcctctaaatcacagactgggcaattcaacgtctccaccgggatacaaagtttggtcaacttatccctcgtcaacagatgagaattcaaagcttgccagagtataaatctgtgtttaggaacactaagtctggaccaaacattcttttgatagcaaacaacttgctgttgtaaccttctattatatagatttgttgctctgaatttgtcgcctcttccagcagcaacaatgctagccttatcaaaaacttgtctcagctgacaaattttcctccaataccaactagtatcttgttgcctgttgtaatcctaaaaatctgctcctttaaggtagatcgagttgacccataaatgaagttttcttctagttaaaaaaatgtatatttgtgcagaacttgtttggtattgattgatttatcaacattattaaagaatattatttataatgaccgtgaggtctaagctccttgttttatgttttatgaaattggaaggctaagtttggcaatgtacttggatcctaaagagcctctaaatgtagttaagaaattttctatgttgtagtaataattatcttaaatgacaaaagtagtaattattcgagacaatgtatattcaatagattattacacactcaaaattcaagaatgtaacaatttctttcttgttgatgtcaaaataaatctagttacttacatctcaacactatgactaatattattttgggggaacatgttttattttcgttgtccatatttccttaaaatataagaagatcatcctataatcgcgaccgaacaggtagatctccagcttggcgaaaacctgccttgatgaagtccaacacaacagaagccaactcatcttgatgataagtgtactcatgatcagctccttctataatgtgaagtttatgattagaaatgaactcgttaaactcgaaactatcttctatcggtactattttatccattgatccatgaattgtcaataccctgcaagtaaacatcattaagatgaaacagagaaacacacaagttaagaacatatcccatttgtgaatactcacctgcagttgtgatcgatcgatttgcaggcctctcgagtatctgtagttaggcggtctatcaaactttcttcagtcactctgtactcaaactttcctatcgaaaacaagaatgaaagttaaccatcatgaatgacgattctgtaaccgattattagaatttattaccaattggtttaaaaatttaacagcttacttacttacctcttttattcttgacatcaatgaatccatcttgcttgattctttgaagaaaatctttacctaagcgaccttcgataccccttttgaggtcaaaccggccagaaatattcacaactgtatgaatgtcattatgttttgcagcatacaaaagcacagcatttcctcctgcaacaacctttgcaagttacaatttagaacaacatttgagaaatttcattagataatttgtgataaaaatacagacaaacctttgctgtgtccaataatcgaaattacagtacgattcttctcattgaagtactgaactacatcacgaagatcatcagcctctcttcgatagttaccatatcgaaatgaaccttcactttcactgaaaagtaagcaaaaacaattccaaacttctgaaccaacatcaaacaatttgctatttgtttctatagatatgtatggaatggaactatgtagatacaacttcagcaaagattacatgtttttgaatcaaattgaacaatagacaactcatgacatacaatttcattcctagtatcagaacacaaagacaaagtttggaactttgtaaacaagtatcgaaattcacctcgaaagcatactattaaaaaatttactaatcttgccaatctgcaaactagagcttacccattcccagcgaaatcaaagcgaaaagcactgattccttctttctcgaatgcagcagcaagattcaccataggaatacgttcctagagttgaaaatacaaggaaatgtagattataatgcttcactatgagaaatagcacatgagcttattactaacttgttagtattttcttatcttagtatatatataaagtcatttgagtgagaccaaaatgtttcaaagtaggattatcctaacctaagtttgcttttggcccagatcaacttcagttaaatggagtttatatcgctatgcttgaatcaaatatgaaactttatacaccgtaaagtttgttagatagaaccaaaagacattataattttggtgaggtccttatactcattaggcttagcattgaataaatagaatattcaccttatcagtatcgtaaatcaatgatgggttctatctttggcatccgtttagaaattttcttattggagattggtactgtctcgaagagtacaccaattattgcatcatataaccaaacaatcaataaaataccaacaaaatctaacaacaaatagagtctaaacaagttcaaattctacacattctcaacccatattgattattgtttccctacaatttttcagattacaaaactattaattaacaattgttatggagatgtatacccattaccaaaaatactatcttttacatcagaaaattgtaagaagatgattaaaagtaccttagaggattgtaagccatggcagattataacgagctcttcagaacctgtatcatgcaatattcccaccagattctcaccatgtctgttaacaatactaaccctaaccctaagactctgtcgaatcactgcaaaaatagaaaaacacaatcaatatagggaaggaaatttgggaaatggaattcgaaaaaattaaataaaaagatcataactttcatgtatgaggaaaaaaaacgagcttactagggtttggaggtccttctttgagagtagctttcatggacgtgtgttaatgttggctctcctctgtctatggcgccactgttgtcccatgatgacgaagcttagttttatgttattgttacccgcctgttacttgtgaactgtcaccgtacgacacgtggcataattttatttaacgaaaaaatatttataattttattgcgggtaaatactattttagaccctgtattttgcaaaagttatcgattggaccctccgttttgttaaataacaaaatggactctatatattccaaaatagtaaacataggaccttaagcttaatttttgacaatttttttaaatataaccaacttgaagacaattccttacatgaacagatatagaaaatgtaaataattttccaataacacctttagatcatattattattaaatnnnnnnnngacaaaaaatcagttcaggatcatatttgtactattttgaaaatacatggtccattttgtcatttaataaaatagaggatccaattagtaacttttgtaaaacacggggtccaaaatagcagttatctttttcttgctatactttttacactattaagttataccttctaagatatataatttgttaatgggtaggtctacaacacaccactaaaagggtgactacttatctgtttcgacttctagagttttttagtcatttttttttaagaattacctcatataccatgttttaactctttttttttttagaaaaaaaaaaaaatttacagttcgagttgctctgatagtttctatgtgggttgctatgtgaattttgattacgatttaggttgctcagttggttgctatgttagtttatatgtgaatttttgtaaaaaatacaaaaaaaaaactattatgaagtgtaaaaatttaaaaaaaaaaaaaaattcatgatcgtatacgttgtaaccatttaaaattacttgtaaatttttagaaaatttcgaataatttagactgccgaaaataaaatttacatattttattactagcgcgactatttttcttatacgtgtggtaagtaattatttaaaacttattttcgacacgataaactattcaaattttttaaaaatctacaagtgatcttaaataactacaacgtatgagatcgtaaaaaataattaaactaaaaatctcttttaaatgccaaaatagataaaaaaaaaaaaa

SEQ ID NO: 110931 - DNA, 3999 bp, Cannabis sativa
taaaaatattatttatttttataataaaaatccaaaaataattattttttctaaaactcatttcaactcagaaccgacagccatcgttataaacaaagtttatcacaagtttgaagatttataaagaatggtatccacaaaacataaacccacacttcccacgaatcaaaaactccaatccatgccaagtagattccctttcacattatgttgtgacattttgttgtatgaattccaattgtgaaccacatttgctccccccaaaaaataatcatattgtcataaaaaaaatcatattaattatcccacgtgccacatgtgtttgtagttttaaaaaaaaatataacccaaaaatctattttcattttcatattcatggctccaaaaatcccactctagaatgaaaaaaaaatactaataattggctattaacaaggtcttcttatttttctttttgtgttctcctttatccattataaaataacaaagcttaaacaaaagccacacttatatttttcattttttatggcttccccattttcaaaaacatttagaaaagattccattttcttcaacaccaatattccaaatccaaaccactcttcttcttctttttcttcttctcaaataagagttagttttatacatgaaaaacagcccaagaaatcattggaaatagaaaggagaataaatagtgagactactctttctattaaacagaatattactactaaaagttcaaacaaagaaaagggctcaaatattaaaatttctaaggaaaaacaacttttttggccaaagattttgtttgggtccaaatccaagaagattaggagtataatattgctcaatgttatcacaattgtttatggtaagaacattttatatgtaattatttggctattttatatgtaattatttgtaaaattctctaatttgagcatgcagcaagtgacattatggttgttaaaggcgccgaagcaacaatggaccccgcagccttttcagcagcgcgattcatcgtttcagcaatcccattcttgccatttgtgtggcgtgctagacacgacgatcaaacccgaaatgcagggatagagctcgggttttggttgagtctagcatacttcattgaagcaattggtttacttacatctgaagccggtcgagcttcattcatttctcttgttacagtaagttcaagtaatttcaaccaatcatctttaattaagacgagttttgtttgtgtgtgcatatatcattgctcgaaaacaaaagtgttatcaaaaagcgttatcataagtagtgtatttggaacaggttattgctgtgcctttgcttgatggaatgttaggagcatttgtaccttcaagaacatggtttggagttcttatgtctgcgatcgggtttactatactcgaatgtggaggatctcctccaaatgtaagcactacatgtcttgtttttaaagatcaaacaagtttgattcattagaagaaattgattatggtatttgtttttgttgttgttgtagattggtgatcttttgaactttcttagtgcaatatttttcggaatccacatgattcgaaccgaacatatctctcgaaaaacaaagaaagagaactttttagcgctcattggttgtgaggtaaacattttaaccttcaatcactcgttcagtattcaggattggataggattggactgaaattctacataaataggactattataaaataagatcgaattagtaagaagtatgaggttcaatctcaaaactaattgacgactagagtagtagctcatagtattttgcttttcgtataggcttcggttcttgctctgttatccaccatgtgggtactccttggagggtggtttgatggtgatcaaactgttaatgatacaatatggacatgggaagagttatgggaatggattgttacattcccatggatacctgcaatttatactggtctattttctactggaatttgctctattattgaggtattttactcctttccacaatcttttattagcacccttcttcaactaaatagatatttatatccttactcatatacatgaaaaattatacttacatgcatatatagtagtggagattgttctgcatcttgtactacattttttagataccagtcatattctgcattagaatatagttatggataaaaaaatgtatgaaaacattgatcatttacaaaagttactctacttattagttgttattattaaatttaaggaattttcagaccgttaaaaattctcctttaactattgcgattgttgtatttaaaaatatttttccgattttatttatttttactaatgtggtgattgtctctatgtaaagttgtgcttctgaactttgatatctagtaaattgtgctcccgaattttgatatgtaccaaattgagtttcctgaacttttatctacgtcaaacttctattagtaaaattggacaaaaattcttaaatccaacaatctcaataatttgtgaaaacttttaaccgcttaaaaagcttaaggaagatgatttaatccatgtaagaattcgaagaataaaagtcttaattagccaaaaacttaagataaggagagtcaatattagagtatagtgtcctagcataaacattgcaagaaaacattaaattatttataagaatatgagatactctacttattatcaatttaattttgagatagaatctcgtaattcttaacacgaaatgtagtttttgacgaagtttcatcgtgttgtgtgttcagttttcggccatgcgtgatgtttctgcaacagaaacagccataatatatggtcttgagccagtttggggtgctggctttgcttggtttctattaggtgaaagatggggtactcttggttggcttggagctactcttgttcttggtaaacatttcttatacatgttcaatcatcactttacttagtaactaaaaatttcttattagtcactaacatatgacacaacaaaagtcaatctaactcacagcttaagaccaagcttaaaagcaagaattttatggtggtattataggtggaagcttaattgttcagatgttgggatcttcacatgagaaatgtatagaagttgaagatagtaatcagaagagtgatcttatacataatgtagatattttaaagtgatctttttagtttgtatagggaaaatatatgcataaatatatgtatatataaacataaccactagaactagtagtagttagtagctacaaagattgtatagataggggggtgttggataaaagggaaaagtttacataattgtagtgattgctaaatgcaatctttgttggaggactctaatggaactacctaatgtttgctctaattgttttgttgcttttagcctttgtttcatttattttgccgttttgtattttttttttctttcttttgttctttgatttcgccctattcagttcaccactggaaaatgtgcgggatagagcaggaacggagaatgtaataggaggcgggaaaaagaattgttccgtctccatatgcatctctgatctattgaaaggctttgtcataaaaaagattagagagttgtgctacaagaatagaaggttttgccgtcaataatctaacaatgaatacatctagtttaaattaagatattcattcatacaaacaaaaatgttcaattcttctatttgatttttgttttggatagttcatcgttggtactcatgaatatatagctactaatttctaaaaaaataaaaataataacatatttatttttataggaaaaatacgaatttaacttaaataagagatgaaccattctcttttagaaaatagattaaataactctaaacttaattttaagtaaatattttttccatataaaaaagagggttttataaaaatagagcaaaatttataattatactgctacacggatttttttacaaaaatatt

SEQ ID NO: 110932 - DNA, 1386 bp, Cannabis sativa
gattgtccataaaacccttctgaaccaatttcaagcaagtgatttctgtctatggacttaacatgagcagccatttctgttatccatgcctagaatcaataaaaaagtatttagcattgtacaattttattaaacctaatcaatagtagtagctgaatttaaaatttcaatctttaaaatttatgagaagtttccagacctgaatagtccttcctgaaggatcagaagtgcatctgggctcattcataagctcccaagccatgattgttgggtcatttttgtagtgaagcccagtgaaactgttgtatctgttaagaacagtctacaaaagatatatataaatatatatatatatatacatatataatcagaattacagcacaaacaaaaaattgacccaatttaataatcaagactcaattttttaaatttgaacttacagatacatgattcttgtagtagcctttgacaatagggttcctaaaaaaatcatcatcagatgtcaaatactgcccttgatttctagcccaattcacgtactgctttttcccaccaaagctctcataattgttaaccaaactcagtataagcttaatcccatgttttctagcctcagctacaacaaaatcaagccccttcaggacccaattaaaggaaagattagacaacattatcattgttaaaaattaaagacaaaatcataaaagggtagatctataggatactaaccttaaaagtttggtcatcatatgagccaggagcatactgaagaggtctataacctccatcactgaaagcccaagttcttgctacagtgaggccatggctagaagcttcttgaaaagcagatgaaactttgaacctctgagatgggtcagaagctacatacattaaccagtaggcattgaatccatttgcatagtatggattaccattcagcataaaatggtgcccccaagttctgatgaaaccattttttgttgcttctacaaaattgtgttggtggatcaaaattaccaaaagaatggccaaagaaaagtgcttcatttttcttctctcactctctcaatttggagaaagaaagaaaaaaaaagttagcttataaagaagagtgggaggatgtttaggcaattaatatggagggaaaaaataaatttaattatagtaaagacaacatttacctaattatcaaattaggttgatttgtaatataaagaccgcaaattaataatgtataaagaatgtgggacagaatactttcattttaactacattaaggatacgtttggtacgcaggattggactggattgaactgaagaggattagactagactggacaagattggattatgctgaaagtaatcttgtgtttggtttaagaatag

SEQ ID NO: 110933 - DNA, 6708 bp, Cannabis sativa
  modified_base (125)..(125): a, c, t, g, unknown or other
attaaataaagaattttaactaaacagattctttctgaagcatattttaattatttcattaaatattccaatttaaaatataaattagttttttctaactaattttttttatcaacttaaatttnaatatcttttgaatttaaaatttagttgcggaattctaggggtttttttttttgattaatggaagggtgcgaaggcacaccataaaaacaacaacaaagaaccgagttcagaacaagagcaaagaaaacaaccagaaaaaaaacacaaactgcagaaacaaagattacttagacaaactaaacactaaagcaaaataaacaattaaaccattgctccagaaccgttgcttcgcgaaccaggatcccactccaccagatcgtccatcaccgagccatccaactcagaaggctttagagatccctcaacattcttgaaaacagcccatttcgcaatattgtgcaccaaaaaattgcactttctggaaatgtgattaatgtcccactccaagagattggtgcaggatttttggaatcttgattttgccacttgaagtctgaaatccgcgataggcgactccgaattcctaaactctttgaccacccccaaattatcactctggaatagtactctattcaatcccatgttagctgcatactccgcaaccaaacacacagcatgagcctcggccaacagtggttcggtaaaaagggctctcgaggttgttattgacacaatattgctgaattcatcccgaaagacagcagccagcatgcatcccgtagaagagatggccacattagagttacagcaaagccaagatgcgggtgggggggaccaagtcagaacatcagtcaaattcttcgttgataccagcatgtgatcttcatttttatgtctaatgagagtaattaccttgatgatgtctgattctatctccccatgcactctcttgtttctttctttccagatttcttccacgatacagagagtagtagtcatgaatttataaaacgtaacatttggaggtcggttgcagtcaggtaagaaccactcagtccatagttgccaattagtaacctggacaagatcagttcggataccccaccccacagtaaaccagattgcttttgcaaaggcacaattccaaaagagatgcaaagaagtttcatggggctccttacacaacacacaataatccgaaacaccatccaaaaaggaagccaacttacctttggtcggaaggatattacggtaaagtttccaccactgaagtttcaggcgggagtggagcggggaattccaaatcattttccagttctcatttcacccaaccaaaggcaagagtcatcaatctcctcttccgaaagctctatatttaggatggccttggcatcttcatgttcgaaccattccctcaccatagacacgttccatcttttgtccgggagcaagaactgatttgcccaggccactccataagaaacatctttaagaggtataggagtgcgattggaagatggaacccatgggtcaaaccaaattgacgtactcacaccatttcctatccttctgcataatcctttttggagaaccaaccgagcatcaagaaccgctttccacatcctcgactctcctccattttggtctaggagcagaaagtttccatcttttatgtatttcgcattgatcacagaactccagatgctatttttataagtgagagccttctaggcccatttcatcatgaatgctttgtttaccacttccaagcttctaaaacccagcccacctcttagcttggattgacatagggaattccaagctataaggtgcagctttctcttcaccttcgtgtccccccaccagaagtccctaaggcatttgtcaaccttctgagtaattttaaggggtataggatctgaggcagccacataggttgcaagtgacgaaccaactgcctgtattaggcaagctctccctgctttagataaaagcctcattttccaactcttaactcgttgaagaacccgatctaccaaaaaacttaggtcctttgaacgattcagagatctcaatagtggaaggcccaagtatgttgcatcattcttcattctcttcatatttaggagctcagaaatttgtcaagcaaggttcgtggaaacaccctaagagaaatggactgtcaatttatggtagttaactgcttggccagaccaagaacagtaatcttgaagacatttcaagaatcccttagcttccttcaaggacgcttggccaaacaagattatatcatccgcgaacataagatgagtaatggccagaccatcttttgaaatcttgaagccttgaatgcacccttccatttttcttgttgttatcagttttgataagacgtctgcagctataatgaataaggtcggggatagggggtccccttgtcgaagcccgtaggagggtgtgatcatgccttgaaccgagccattaattaggagtcccatcttcttaacaaaaatgcaagtttcgatccatttgacaaaagtagggtggaaacccaaccctcttaaagtatttagaattaaaccccagtccatcttatcatatgctttctccatatccagtttaatcatcataaagactttttttcccttctttttgctcatagagtgaactatttcacgagccaccgcagtattttcagttattagtcttccatgcacaaacgcagtctgggcaggcgatatgatagaagggagaagatgcttgagtcggagagccaataatttccatatgcatttataatccacattgcaaagagcaatgggtctgtaatcattgacccccgctggacactctttcttaggaattaggacgatattggtattgttgatgaaatgtggaagctccaaactatgaaaaaaatgggtaaccatttccaagaaatcctgcctaaccacactccaatgctgcaggtagaaccctgtggacataccatcaggcccaggcgccttgtcatgccccatacaccgaaggcagtattcaatttcatcttcagaggggatggagataagcttctgattttcatactcatttatcaggggtgttcgcaacaagttctcctcaggattgcacaaagtcgggtttctagaaaaagtagagttaaatttctcaatgaataactcagcaatagaatcaaggctacaaacccaattgttgttctcagtcttcaatgtttggatggaatttttccgtcttctaattacggtggacgccatgaaaaatttggtacactaatctccatccctgagccacgcaactcgagatttctgcttccaaaaaatttcttctctacggagagcctcattcaacaaagctcgagcctctccgaggttcgctgcctgaacttgatcatttgattcaatcttttccacagctgctttcgcctccgaaacttgcaattggatttttttgaaatgaattttattccatttttggagatgatcctttgttttcttcgatttacgataaaggtttaccattgggttctgatgaagcttgtcccgccaggcattgcggacaacccaaaggcatatcggatcacggccccacatcaattcatacttaaattgggatctagtacatctagctcccccatctgtattgagaaggatgggtttatgatcagaggtactcaccgttatcgcctcaacaatagcattaggaaataataatctccaatcaatagaggccaaagccctgtccaaccgtgcacgtttgaccgaagctcctccaatagtccccaatgtcttctgaaactaggtaaatttccccctcatgcagcccaaataaatgagaccggttcgagctaccattcttcgaagatcaaaggagtagcgagcagagttgtgctggtttgtataattaatgcattcatgatcagcaagcgttccgttgaggtctccgaaaagcatcgttggtgaagtgtgggtagtacagaactcaccaattcagttccaaaaggcttcttttccattgagtgtaggggggccatagatcccaagaagattccaatgcactcccggggggtcctattcaatcgaggcaaaaatccaatttttatctgtttcctgaatcttgcaaatgaccccctatttccaacacataccaaaaccactcgacatcccaatcggagggacataagtgaactcggtaaagtgaagcttattcatcaatctctcaaacttctccagaaccattcttgtttcagacaaaataactaactagggattatatcgacgtataatcgtcttcagttgtcgaactgccttggcattcccaagcccgcgacagttccaagcaatcattttcatggcgactttggagacttttctgggcaagtctccatagccccaaactgaaaatcctgcacaacatttttctcttcatcaattgctctgcatcttccttctagatgggattgggttccactttgcacaatttcttcaataacataagacgattggccttctttgttcttctcaataatgacaaactggttatccaagtcaatggccaaatcaataccattagaattccagagattacgatagaggttgccttttcctttagaagagagtctctcgcttttcttcttgaaactttttgaattgactccagtccaacttttcaatttctccgatttctttctattggttggtgaagacacaggagtctccagggtctcaaagtgctttcttggtctacccctctttcttttttgaggatggccttcattggacccaggggagtaagttagaagatcatctctaactgccaaaggctcctcagtgatactctttgcaggtgaggcattagtagaagtggcagctttttagtgagtaggaatcactcctcagaccatataaaaaccatctatagcctttctcttttttggcccaagttcaatttcttggcaattaatgtcttctatatccaaaattggattgaaaagggtgggctccctttgaaattcgtccaccgtgattgatcctgttaagggtccaaatgctctagcccaacaagcactagagggccattctaacgggtgggcctcaggccgaaggagagagttaaagaaaagccccactttatacttgttatttaatgtaatattttctttatcagtaatggctatatgagaagcatctcctaaaacaagttcattaccaggagctttcggcgtgcacagtttgttcttgatatttccaggttaatttccactcttgcattgggtcagactattgggagctgcatccatatcacttgcttccccagaatgggaaagagacaacacgctttcctcaagcttttctttctccgtacccgtcgactcactaccggtgttggatggggcgccctgctctgtcactatcttctcaggtggacggtcaaggatcactttttcaaccactccctctgtcgagttctcgaaaggcataatcttgcccgtcccaggtagatacacaaccagaaaacggtttaaaaccacttcacctgactcctctctattttccaccactacctccacctgtctccgtttacctggcatttgcctacgcaattccctccactcagtagattcagcctctcgccatctttgctgcatcttcagttggttcctaacagttggatcaatgagcgcttgctgttgggatatccaatcattgaaccatttcgggagaggcaggtggaacggcgatttctccacgacgtcttcatccatccaagacccaaacatgggaaagaaagctcccttgtcatcctttatcacagttggtgttttgaagcaatatttacgctcatgagaaagagccccacatttgaaacagattctcggtagtttttcatattggtattggatccagagatctttgatacctttcctccgtagaaagaaccctgagaacaggggtttattaacatcaactcttcccgaaatcgaagagttcccataccaaacgatcctcgctcaaagttcttctcaatgaatcttggaagttcatacacagcagaaactttccctgcaagttcttgcagatttgttttgttccagtagaacggtggtatgctcttgagtcgcacccagataagtgattgatcaaatgacacttcggcaggggtgagccaagagggccatggaatgagcactagtacgaacccacagacaagccacggtcttcgaattagaacattctctacatcaaaactcatttggaaagtgaactggagaaggccatcttcccgttccttccaactccatcccgttagtgagctccaagcattgttcagggagccaaaaatggctttccgtcccaatctggtgtggcaataaagtttgcctagaaggattcgactaggttcctcatttctatcgacttcacctgggttaagatcacacgtgagatccttagtagtaacttgaaccgagtccttaaacaaagagcttaggtttgcatccgccataacaatgtaactctaaaccagaacttcaaacacgttctctgaaactttctctggagaccttgaacacgttaccaatggtaagctaagacgtgatatcagaagctcccatacactccatctaggagttggttattgaagattctagagatattttttaagttgttaaacttaaaatggaatatt

SEQ ID NO: 110934 - DNA, 2057 bp, Cannabis sativa
gctttgtcaagtcctttgatattcaagtatgcaaggcacctagaagcccaaggacaagcatatgatatgtacagatgatacctcccagattcaactgggaattcagagtttggatctctggaaatgatgttacgaaatgtggaagcagttcttgcaaatgcaccagattcagacaactcatccagtgcagatcgagccattctaacagaaagctaaataacaaatatgcaaacattaataccactacaaggaaacctgtatattgatttttcacatgccataagaccttaaaatttcaagtaataatagatcaactatacctaccaaagaaatcaaattgataaaaacaaacttccatttcaaatatataaaattgatcaatgaactgttcatccttataaatctcataaacgattttcatttgttatcccccatttaaaaccaaaaaaagacccataacttgaataacatgatccaactattctttctacctcgagttatagaaattgaaattctcaataattatacaaattaatatcatgtaatttagacaacacgtattactaaaagaataggcaagtaaagcttcacttgtgtgtgtgtgtaatatgtatgtatacgattatacgaaataacaaaatagagaattaagaaattggagttagttagttaccttgaaggagtttgggagagggagagtagaagaagaggagatgttggtattgagcaaaggtctaaattgtagaaacgatgggagagacaacattataattattagtatttagcagaagaagaagacatcatttttatttccaattggtttgagttaattattagtataaacacgcattatttttattttatattattattattacttttattttatgagcatcgctcataatgtaaagttaaaatataatttatttatataaaaaatatattttaataatgtatcaaaaccttacaaatttgttatataataaatgttgtgctaaatttgacatgatatttgatataatgtgaaatttgcattaaatatactattttttttttttatttattttatgccatttatattattttattactatatttatattaatttttttattactttatataataaaattaatgatacaattattattttttatatttcattaaaaatattaataaaatattaaattttgcattaagttatataatgcaaatatatcacaatgatatattttatttttgtgtgaaatatagtacaattttttatggttgaatgaagtattatttgagtcaagaatgatgtaagagaagtgatatcatttactttcttctttattggcgtgcttcaactattgttgttaaatctagttttccaaatctctacatccgcagcctctcaacatttttttatttatggacaaagaacatagacaacatttttagacatgtatgatgtatgtgcttttgtattttttatcagaaagtatgaatgagcttgaaaattggtggttatgcaaaagttcggaaaaataatgatatttacaaaatatatatatatatttatattacatgaattattcaattggtaattatttagtaccttaaaaaaaaactatttagtaggatgttttcaaaagaaaaactatttagcataataactactcatcttttcttagaactcttggtcggattaggctacttattggtttagatttatccgtaggataattcaatcaatatataggaccagtttcatggagtgctaaattagttattagacacattatatatttattttttttttaagaaaaagaaatatatatttctccaatatgctattaagttgtatcaaaaataaatattgtgtcaaatttagttaacatacatttttatttaataaattgttgttgaaccaaaaaaaaaaaggattaatattatctcattatagttatttctttaaaaaaatgtggaaattgatcctctaaaccaacttattatccaactccttaaaccaactaacttaactaactttcggttatgttagttagttagttggt

SEQ ID NO: 110935 - DNA, 2478 bp, Cannabis sativa
ttttttttttttttattttcaataatatttaattttttatatatataaataaatatattatgtatgttggcaatttctttttttttttttttttttgtctcaactcttaatttaattcaaaatggtactagtgtacctccattaatgaaggttgggaatttacatatgctaaggaactttaaagtatcaagcatcacaagaaaaaatatactgttattggtattatttaatatcagattctcacacattttaatttaataactaacatataaaaatatgccacatcagtactgtctaatagcaatgctcgatcacctaaatttcatgaaaaattaaattattagaacaaaataaatcaccatttatttgggctgaggacctccattgcagccaggatttaaggtacaagagacaatttgtactcttagaacaaagaaagaacaagtggtatattttttgttccatcgtactgtaatccaaatactacaaattgttacagatgctgtgttatgcaacagagattttgtttaaagtttttgcagcattactaatcatagaatgaaacgatgcttgggaataataactcttccccaaacctctctgtgacatttcacaactaagctttttggtttaatcaacttataatccctgttgaagttatagatagatgaattattgagcatcaattttggctttaaatttttcttttacaacagtgatttgcttccagtaccaagtacttaccgaacttagagccttatatgctcaccaatcctgatctcctaaataaacttatgaatccattgaatccacaaattgtcttactttgtggatatggcctaaatatatttttcaatggctgctatattccaagccattacaccctaaagccaaggccccccttcctttttcgaagaacaaacattattccaagctactttctctagcccatgtgtttagctactcctctccaaattgaatttacatgcaaagacaataattgttagtattgcctatttagtataaatatgtaaagtcatttcacaaatagataatgaatgaatgaatgaaaattaggagtattcttattaaattttggcactaactcaaagaatgcgtcccaatacaaatgattatgtatcagttggtgctttcattgagagaatctcagagagaaattttagtgagagatcgatactatgactaatgaagatcttgttgtatttgttagatctatgataagttctatggaattgcatatatggagcaacatttcaaggctcaattaaaggaaaatcgtgaattcactgttattagtagggtttttggtagcaacataatctgagcccaataggaatggagagacataagaacagagttgataatggtagctcttcctacaaaagatttcttgaatccaagttcttattcttagcgccatttttttaaccaaaatttcacagtccaagcttaagattctccttgcacatattggtagccccaagtatttgaaaggcatttcccctcttttgtaacctgaaacatctattactcactaccataaaaataagttttagtcacccacctagagggattctaaagggttttagtgacacttcactgcgcgtcactaatgtgggtgactggaaaaatattatttagtgaccctgcattactgtcactaaaaccttttagagtttctcaacgtgcgtcactgtacccttttacagtcccacttaaagattacagctacccacaaagcatgtcactgtatctaattttttaattttttttaaataaataaattaagggaaattaataattgtaaattttaaataataattttgaataataatattcaaggataatttttttttttttttgattttgatactaaaaggtgaaataaaagtccaatttttttaatatcatgtttataatttaatcttagtttagtaaactgcactcaacaaattaagaagattataatttatatttctactagttaatctatacattctaaattggtaaaattaaataaagttattataatttataaagttattaagtataagttattaagtaaatcccgatctccccacacatcgcctctgcaacccagactttgaccaactctgcgaatcccaatgcaagcctctccgtcgatgatctacagaaaagagagacaaagagagagaacattatcgagagagagtgagagaaatcattacagtgagagagagagagagagatagaaataaagccatacccgagtttgtcttagcaccaccaaacctaccgacgccataaagagaaaacgagggaaataccaaccttgtaatacgattcagagagagaaatagatggatgtaaggttttaagggagtgggggtcttcatttcatggtcagattagaccatcggaggtcgagttttgccatcttctgggcagctgcaacaacgagagagagagagagag

SEQ ID NO: 110936 - DNA, 2708 bp, Cannabis sativa
gatcctggtaaaataaattccaacagtaatttaccctattagtgggcttttatcataaaccctaggcagatcatgggcaagtccatacctacccttagcctataaatacccttctatttccatacggagggggatcactacctaaataaccaaagctatgctaatattattctatgcgttcttcttcttcaagagaaactaagaacacaaagttagtgtttcttagaaaatattgaatatgcacttagaggctaatagactaactcatggactaaggttaatgtttatagagattttcagaaactggttaattagagcttaaagaaaatgcaaaataataaataatagacaaatggttttttacgtggttcaaggattaataatccctagtcaatgagttcgttctattagccttaccggcgagtatttgagtattacacgcttttacaacgataactctgtattccttttgtttctcttaaagaagaagaatgctttctaggaatattggtagaggttttttaagtaagaaaaatgtttaccctttgtacatgaaaaatatgagtatttataggtacatgcatgggcgagggcatacccttcacccacctagggtttcatacttagcacgttactttagctagtgattttaacatggcaatctgaccgttggtggctagggaacctcctaatcgtgtggtgcacatctatgacatcctaatttgtaggacttactacacgtgtcgcccaaaggtttcaccttacaaaggttttgtatgaacaaattattgggcaaaaaggagttgtagggcatgtacaagcactaccaatgtctaacactagggagaagatctaatttggtgttagaagatatgcaacgattgggtttaactccagattaggtattatggagttccaggaaggtctggctaaggccttcctggattatcagatttgctaccatcctagagcgggtgcaacttttacgtacttctggtagcaagagaattccatgagaatcccagagttatttctgcatttgttggcgaggagagcctctaggtattacatcatcttctgtaaccctgataaggggaatacataaaataaaaatatgcattctgatgtggcatccttccgcaattgccacgtacaagtcatccagtaatagggataacatttacccctaagctcccaggacttatgagtgttgggagcttgtaactttctctcggatgtccgtttcatgtctctcagtcgttgaacaatcatcaaaatattgaaggaatcttccgtgatgtattggacatctgaaaggtcgtcgtgctctacaatatcaatggttattcgatgaagtttggtgttcagttagtggagtcgtgaactcacgctatgcattttgagcgcgtttctcaagggaaatgaatgacggttggtcttgaagagacgccaggcttctggcaagttagggatggtgccacaaaatgatgattaataaacactttattcttttccttcagacgcattaaatgcattcctttcatatccccaactattggatgatatagcccccgattatttcaatctagatcgtgtgtttccacaacatttgaactattgtcgctcatataaatgggggtcttagcgattgaaaccatttcttttcccattttaccaacaatccttcgcctagatagaattcttctcagagaaacttcttgcccagaaactatagccccttcacacctctctaaccaaagctcaaccacttctctcgttgtatttctttgaccttcaccatcttcccaagatatcttggtatcagacctcggagaggcaccgttgccaaacaagcagtgtaattctagtggaacaaccgtcatcttcacttctaaccttttttacaagtatgtaatgccccaatttaaacttttttttagggcttaattgaaatatagttttcgtgcttgagggaatatgccacttttcatgtgtagggtttaattttaggaattagggttattgtgtctggaattattttgcatgattcataggggaatacctcatgacttagggctttaaagaggtactttcacttcagtttgggttaagatgcatgcttgttatttttgatttactagttcagaggatttggcagaatatttttgagttagtagtaatctctcaagtaattcctctttgatttattaagtgtaaacatttttctttgtctgtggaagagagaatttgggcttttgttattgttgtatgtttaggttcccaatttttttaccatagcagcatgcttcatggtagtaacctttgtggtgacgagtctggcggggatctctctaataagttttgggggaggcttcccccagtacccaatttgtcatttggatgtagggtattgacttcttggattttccttccactttttcagtgtctggtaaacacaatgacttccaactggccctagttaatcttgaagagattcctgaggcatcccccatggattttcctcatgtagaagagaattttgaagagcctgttctggatgagggagcttctgaatctgctctctttgaatgatgttggaagggaaaaggcaaagcctgtgttgtgtccccatctcgtctagttctcaatgacaccatctggagatagaccaaagaccaaacaaactaagtgttggaaatattttacca

SEQ ID NO: 110937 - DNA, 11065 bp, Cannabis sativa
  modified_base (10465)..(10480): a, c, t, g, unknown or other
gtgagtttactacttgtcacgataggtgcacatgcgtgtgcaaaatatcacaataatatttttaaacctaatctttaatatttcttcatttaattctattacatagaaataataagtttcattaaaatggatattgaccgttttgatggcttaggtgactatcgaatctagaggaagaaaattagggcattgtttgcccaaaacaaactattgaaggtccggactgaaccaatagagtggcatgttgaaacaacaactcaagaggaagaattgctagaaatagcaacaagcttaataattttcaacttatcagactcaataataagattggttgagaaggagaatacactagcaaaaatttgaaagaaaatggagatacaatttcagaaaaagtctttcataaacaagatctacttgaacaaaagaatctttagttttaaaatgcgtcattcaaagactctggaacagaacttagatgagttcttaagattttatattgagttagcaaattcaggagaaaataagacattgagtgatgagaatcaagctataataattcttaactcattgccaaaatcataagggaagttaaaactgaaataaagtatgggagaactgattactcttgaggaagtaatctcagcactaaagtccaaatatttagagatgaaagttgaaaaacctaggaatcctaaaggagacctaaatctaagcaagggaagaccagcacaaaagaaaccttggcaaaacagaggtaaaagcactagcagaggatcacacaaaaggaaacaattatcacaacaaaggaatatctaatttaaaggaccttaaaatcccaatgggtgttaccactgtggaaagcttggacatttcaaaagagaagtagagaaaagcctaattcagatcatcaagaagattcaagcaaacaaaacaagagcaagaatgactatcataatgctaacttaagtgatggttatgatagtggagatatttatgtggctaatcaatcttttagagatgattgaatcattgatttaagtgtacttcatatgactaacaataaatcttatctgtttgattatatggaatttaaaggtggaaatgtcatcctaggaaatgatcagacatgcaatattgaaggttcatgttctatcaattttaaagtgtttgctcaaattattagaattttaactaatgttagatatgtgactgatttatcctgatacttaatttctataaatatacttgatgatatgggaattgtaagaaaatttgaggcctgaactattaagttggctaaaggctttatgacaatcataaaaggacagaagaatggttgtctatataagagcatctccaatggaatatcaaaaaggaggtgtattgctatattttagcacactcgagaaaaattatactgcaatagtgttttaaaaagtgtactaaatttgacacatgctaaaagttgtgccaaatttggcacaagatataacattgtgcaaatttagcctacaataaatgttacttttttatttactataataccactaattattatgattcattgacttttactaaactttatttactttatttaccatatatcattatttaaataataaaagaataaaaaataataagttttgtatattctcaataaaatatgaaatgaccatcactataatcaattattttttattttattttacatcttgtgcattggagcacaattgtaaatagtgggccatagtacaaactcattttttgtgccaaatttaacacaaattttagatcttccattggagatggtctattacccgcaaggaagtccaatggcttgctgccacaacattaaagaataacatgtaatagaagacattaaagttgtcttacggcacaaaagactaggacatattagtgaaagaggcttacaaatcatgagtgaacaaattttacttggtaaggaaaaggtaaccaaggttgacttttgtgaattttgtatattaggaaaacattatagattaaaatttcaaattggcacacacaaatcacaagatattctagactaagttcattttgatttatggggacctgatgttgtgaattttcaacacgcaagtatatgtatcgttttcaagtaataaacttacaagagtgaggtcgatcccacgagtattgtagttataaagtactaataaattaaattcccaattctatttcacaataaaattttaaggaagaatattaaaatctaaagcaaataaaagcaattaatttagaatgaaaattaaaatgattagagtttagggttattaacttcaattaaatctatcttatattgcttaatataacttaattcttgaatatcaatttctatgcaatagcagatttactaaagtaacttaaattcggggtaggatatataaatctcaagttatatctaagttttctactctcatgataaatttaaacatataagaggcattttttaaagaaaccctaaatgttatccaaaccacataggtactctcgtcctatatcgaaatctatgtctattttattatagtagaatcaatactcactttgataaaattttgaattgaaatcataaaacagttaattagtgatcaagtaatttaagtactaatgaaatagatgaacaaaaaaaattggtgaagaactaaatcatattaaaatcaaaattagggatagtgcctatttcttgtctattgttgatgactattctaggaatgtgtggatttttctgtaaaaaacataaaaatgaagcttttcaaaagtttgttcattgaaaattacttgttcaaaatctaactaagagaaagctaaaaaccctgagaatagataatgacttagaattttgtaatgatgaatttacaggatactgttaagataatggaatttaaaggcacaagacatgagaaaaatctctcaacgaaatggtgttgctgagaggatgaacatgacaatatttaataagcactacaaaaagaaactacatttagtgacaacattttagttacaacataaatactttgtgactaaatgtgacttttagtaaaaaaaaaagttacttgtgactaaaacatagtaattagatacaaattatcactaatttagctttagttacaacacgtattgtgactaaaaatacatttaatcacaataaattgtaatttttgtgactgataactttagtcacgaaccttttagtcacataagaatgttaatttataattagtcacaatttttttgttagaccttttgtagtgaagcccaggtgcatgcttttcaatgtaagagttgaaataattttgacactaaatttaatgatagcataacaacaaatttaatgtactctttgaaaatgttctaattcacaatgtaagctaaagaaaaagaacttcctttgtcagtgattatttaaggcaggatttacaaccaattacataaaatatatactctgcacttcaccaaacagagtagcattttaaatgcctcttttttcgttttttttttttttttttgatgaaaagcgtatttgattaaacaacaagttagacatcacggttattacataagatgtttgaagggatggtggatatcaccaaattaacaacttgtgggaaaacgcccacttaactatattatgggtaacaaaattataagtcttgtcgatattagagaaaatataactaaaaaaacaagaagagtaactattacaaatgcctcacctatgtataaaagtttcttatatatattatatacagtaccatccttccctaataaaataaaaatttgttatgatagaatgtaagatcacggggcaatatatttattggatttattttagtttagttatgatattagatacatttggtgaggaaaaacataaaaggaaatacctaactagaatatccgaggagaataatgctatagctaggggacaaactcaattttatttttattttttttatcaagtactgagaaatggagacaaaatccaaacaaatttcttgtaagaatttaaccaaaccactcaaattaatattatctttataattattgtttattattacaaaataaattaaagtgacgatggatatttattattaactttgggtttcatcaggaagcgctatattatataaagactggtcaatcggatgctaaaattgagaagctaggcggctcaactcaaccttgtgattattcagagaagacaaaacgatatttttggtcatatatgtgagttttcgtgtgccagtttcatatcgatccaatggtaacaatggcatttcgaactgtatacatttttttttcttcttctttttatctcatttatttttctttttaaaatgtcttagcggttatgttgacttccatatattttcccctttaatcatatcgaccttttcactctaattaattaggacgtatatattagtagttttcacaaaaaatatatggatcatgatcatccaagtccaatttaattgtacttatattgtacagggcaagtaatatatgtgcaaattaataaacaaaacagaagtgcatttataaattttaataagaacacgtaattaattactatacttgtatgcattttaatttttctttgtataaaatttatgtgtttaacgtagagatatggaatatggttatgtacactactttgatattcaattttatatatattttaatttaataaataatattagcaatcgctaatttcatatcgtgttacatgattccaatattaatactcttaagtttaatgcattgtcttatatataccacattaattacactcacaagcactctaaagttctttcttgtactaaattataatttcatgatgtcatatgcagcatatttttttcatgcagtcataatgctgactaatattttttcattaagttttaattataatgtaaatatcgtagcgatcttttacatgtatgtacgtacgtatttataagattaattttggttttctcaacaaacaaaaaaacaactaattttgggtttactataagtctataaaatccaagagtgatcgtctaaacacatgcatataagagatttattaattattagttattagcggatcaattaattaattaaagcttgaatatgacactgatatataaatctatatataatatatttgatcccaaaagatgccccgtattttaacatcacaatcattatcatttatcacctcactgattcagtattgcattagtactacttttatattacaacaaataaattaatgaagaaaaaaatgcaacaaattattagaggagaatgcgccaaatatatatataattctcgatttctcactactgaaaaaatgtcattttcagaattcattttgacaatgttcatgattattagagaacttattagttattatatatagggcaattacaagctaggctcttaattaattaattacaagcaaacagatatcagactcagctatatattctgatataattattgtgattattatttaaaatatattcagatgaaacttctcacgaatttaactaaaatcaagcatcatatcccaagaaaaataaaaactgatcaaattaatcaattaagcatgaaattaattaagttccagtggccagccagttgacttttataatttcccaaatttcaaaaggggttagttgccttgttttcattgttttatattcggtacataattaaaataaatcactaattaattaacctataagtagtttttttaattaagagaaattttcaagtaaaatcaacaagaaattaaaatggttctcttattagtgatatatggtacacaaattaattgtcaaattgattaatgttgttagagtttcaagtagtagttatgagtctttattaaaattatataatgctcaaaattaattaatatagaaaatgacaataaacctatatcaaaaaatcgagtcaaactgtacatacactgttcatttagctcatttcaatgcctataataattaatcgtaacgggttcacacaccagaaccagagtgaccagacagcaccaagaaataataccaaaaaaaaaataataattaattaattatatatttatcaatatgatatgtaaagtgcattaatatgaaaattaattgagatttcttgacagtgccaactcatcaatatgtgatacgtaagagactttgtctagtggaatgattccttgactcctggaaacaagttatatatatataacattacctgtagtttgtagtactattagttaatcttgttcagctaaatcttatatttttggtaccaaacttgtataaaacatatcacttaaattgtttatagtttgcgtctgttgagaaaatttatatattactaagctccataacattcagtcattcacatacgtacgtggccaaaagtcatactgtctaccagtttttttatacgtgttttggataggttagcggttaccttctttgactactcatttattgttacttttctggctagtcacctgcacccaccgcccatttctcaaatttaattcatcccttctccccctttttaattgccactaaagagaaaaaaaaaatatttctaataatttacattaagtaaatatgtgaaattgtattattaattgagcttgcttgaaagaaagcctactaattgggccagtaattgtaagtggtttaccctaaggctacttatcaaccacaacataacaacatttttcaggctaaaaatccttgagtctaaataggtgtgtgtgatctagttgtgattatgatttgagcccacaatacaaccattccgatggtagttgagctatatatccttcattggaactacttgacattaattacaaaaataaataaataaataaaactcttctcaataatatattccagcttttcattcaagtttatataatacattatttattttattatatatagtttcaccattcctatggtttagctaggtatacttccaactctctttctcaaaaaccttcctaaatcaaactattctcaaacgtgtaaggctttgatttcaatttcaactttttgttggagtatttatagttgagcttcttatacactgcaaaagtacctttttttcatttttttttctctctttataaatttaaacacacacaaaattgtacaataacagctcattataggttgggaaaaattaaaaagaaacaatgaataacagtatagacatggataaggagagattgacggcggagatggcttttacagactcttcatcggccgtaattagaatccggcgacggttgccggattttttacagtctgttaaactaaagtacgtcagacttggttatggctattcatgcaacgcagctactgttctgatgtctcttgttgtaattcccctcgtagtatctgtaatcattcaactcaccggtctgaaacttgaccgaattcctgaaatttggaccaaccaagcgtttgggctcgaaagcaaggacgccgccaccagactggccggctcagccttcttgctcttcctactggccttgtacttgaccaagaggaccagaccggtttaccttgtggacttcgcgtgttacaaacctggcgacgagcataaaatgtcagtagagacattcttgaagaggtcggaacagagcggttctttcactgatgaaacgctccattatcagaagagaatctcgacaaggtccggccttggagatgagacttacttcccccgtggaattacgtctagcccaccaaatctaaacatggaagaagctcggttcgaggctgagactgtcatgttcggcgccttagattcactcttcgccaaaacaggggttaaacccagagacatcggaatcctaatagtcaattgcagtttgtttaacccaacaccttccttgtccgccatgattgtcaatcattacaagctccgcacggacattaaaagctacaatcttgggggaatggggtgtagtgctggcctaatttcagttgacctcgctaaggatttacttagagcgaacccaaatacttacgccgttgtggtcagtacagagaatattaccctcaattggtactttggaaacgaccgttctatgcttctctgtaactgtattttcagaatgggcggcgccgccgtgctcctctcgaacaagtccggggacaaagcccggtccaagtatgttctgtcccacacagtgcggacccacaaaggagccgatgacagaaactacaactgcgttttccagagagaagacgaaaaaggatttgttggggtttctctggctcgtgagcttatggcggtggccggagaggcattgaagacgaacatcaccactttgggtcctcttgttctgccattgacagaacagtttcttttcttcatgaccctgatcagaaggaagctatttaactccaaggtaaagccgtacataccggatttcaagttggctttcgagcatttctgcattcacgccggcgggagggccgtactggacgagttgcaaaagaacatgcaactcagtgagtggcacatggaaccctcgaggatgacactccaccgatttgggaacacgtccagtagctcgctctggtacgaactggcctacacagaggcaaagggtcgggtttccaggggcgatcgggtctggcagatcgctttcgggtcgggtttcaaatgtaacagtgccgtttggaaagccctcagggccattcccgccggacaaagtactgggaatccatggaatgactcgattgaccggtacccggttaaagtacttactggttagggatgtccacgtggccaaatgtaagtggtcgaggattgtccacgagtgaaatattattatttttaatttagtggtcgtgttttttagaatcctgaaattactattttacaattaatggatcaattacttttgtctttgctatactatgtataatgtatatcagctgacaaaaaatatattaatatatgtatatcaccatctattttcatttttgtcgatttctcattacttcacatattttattttcctcaaaattctcaatgagaaacaacactactatttaaatatttgagaagttgatgtgaatatatagccacatatggatatatttatattcatattaattagacttttttctaaaaaaaagtaaaaaataaactgaattgttcacccaaatttccaattgccttttttaaagaaaaaaagaagcaagaaatgagtttaataagcaatgccaaattttatatatttttttttcttattttagaaattagacggtggtatttgttaatttcgaaaaggataaagcttaatgttagaaacatggattcgaaattactctaataaatttaatcacgtgataattttggttaatattaatattggatgcatgcacgtttcaatttaaagtaaaagcaaataaaaagagtcgtttagtaaaataatgataatgaataaatcaactacggctttgtggatattccaaataattgggattttgggggcgtggtaccgtgggtcggtgggtcttacagtttctttttctttatttttttttatttcttttttaaaatggaagcctacagttgtttctgctataaagattaaagaataaagggatttttttttttattttaggctaaaataacttaaaataaatatttatactatttcaatcaaaaataaatatttatactatctactcgttttaaagatactatttacaaaaaattttattacaaaaataaagtaaggatgtgaattccatgtgcaaaatgagagagtgagatacacatatggacaatataagcgagtgagactcacacgtgagtaagggcaaagtcattggctaatgcgtgcataactgtagcgtcagaaatgcgacagtgtgactctgtcgctgccacgtgacagtttcaacaaagtaagtttgagcatgttggattgctttttctcaatgcaatagttatgcaaaaacaactaaatagcaacactaaaacgatttgacaacaaccaaactccaaaaaaaaatggtaaattgcggcataaatacttaatgttttagattttatacacttatatactttatctttatttttggaggcaaatatacctaatgttacaattctcttacacctgttactaccactttcgttaactcataaataaagacacgtggagggtccaaatgcattacatttatttattttttattttaaaacttaatattcttaatatcagaaactaaatgctacttattaaaaaaaaaaacagttctcataataatgttcacatatactgcactggttcattcaattatggtaatttagttttgcatctctcttattttttttattttttttttttgaaacaagtagtatttagttttttatattaagaatnnnnnnnnnnnnnnnnaaataaataaatgtaatgtatctgagcctttcacgtgtccatatttatgagttaacggaagtggtagtaactgatgtaagagaattgtaacattgggtatttttctctccaaaaataaaaatgaggtatttaagtgtataaaatctgaaatattaggtatttatgctgcaatttactcaaaaaaaatatattaaacattaagatattactttaacacaattaaaatttataaataacacaacaacaccgttaaaaaggcaactaaatgaacatataaaaaatatttagaaattttttgcaataaatataaaaaattatgaaacacataaactaaaaaaaatatatatacaagttacactaaaaataatattttaagaaaacttaaattgattaataaagaaatgctctcaagtggacaacaatcacaaacatatctctcttatattaaatgtgattatatcacataaattgttggtttaataatttatttttatttttctattaaaattaacggttaaaattaatatcgttaaatcaatcaatcaattattattattattgaaaaaataaaataattttaaatat

SEQ ID NO: 110938 - DNA, 7932 bp, Cannabis sativa
tctctctctctctctcaaccaaaagaatgaccgcgacccattttctgcatcgacttcactagcacaatcaagaaaatccatctgcccccaaaaaaataattgtagatggttttggtggcttattctttgttctacaacatttgggctaatttctcattcaacatttttacctttgttctactaaatccaatactttaaagatgtgatatataaaattgttgttattgctttcatgaacttcaaatgggctataagtgaaatagatgaatctgggttcagaatttccacttattctacgcttgttttgcttttgaaggctggtcaaagttttatcagtgcttttccatgcatacctggttatgtctgcttctttgtttgtttttttcaaatttactaaatgatgtggggaaagttcaaatgagtgaacaagtggaaaaatttaggcctaaaagcatacttctgcatcatcgatataatgaactagtgcccttagattttatttgcaacagactagcttgaatagcttcacaacctcaagctgctgttttagttttccatttgttgtaaaagagtggatgcacaaaaaaaaaattaggaccgctcttttacttgccaattaactatttggtgagcattagcaatgttattagtagtcacttatcaatatgtgcactttcacaaaatacttatcaataaaattctagacagaaaaaaggttgtagcttgtaacatgcattcaagtaccatgagtttgtgttcaaaaattggtcagttctctttttacttattttgttgtccatttgaactttatatgtttttcttcagcaccaatgtgttttacttttaatgttcctgtcccttctagacaatgcatggaaaaaaggccaatgatgtttcaaaagataaaggagagcttgtaagcggcagtggaaatcatgctggtattgatgaacatcaggagactaaaaggtcagcatataacatggccaaagccaacatacaattttgttctacataatatgatatgctctatcattcttacagaattgttgcattttgatacagttagttatgtgaaaaaagcatcattgataaatttttgttatgtcatttgtgttttaagctaatgtcttatctttcgtgacctgtggttgttatttgtttttaaggatcttctaaagccatcaaaatttgttttatttatttcaactttttgaatttgcctttcttcaatatgtctactttaatcaatgctattagttattttaaatgcatttgcaatgtgcctattttattcaagggttattgtgtggtggctctcttatatatcatgtttaaagctatgtacaatttctttggtcatgcaaagacaggagaatgcagatgaaaaaagcaatcttcaaccacaaagtgctacagaagtaggagaaactagtaatccttctgaagtcaaggaaactcattttatagatccacatatacctgagtcgcatgcagaagttactcaggatgtcccaatgagctattcatatccacaaggtgggcaagattataaccagttactccaacaatactatgagcttgaggagaaaaggcagcagataattcagcagcttcagcaatgtggtggttggaattatcaatatacccatgaaggtaccagcactggtatgcagtgggataacgctactacacttaatgtccaagaacaacaaagttgtactcaagctatgtcctgcccatgttgcccatatgcgagtcaatgctttatcactccatgcacttcggttcctaattgtttcaagggtggatcatgtgctggtgaaacttgtattgatggatgtggggtagtggatcctaggaagaagttccctcagcaagataaccacgtagttgaagcagcaataggagcggctgaaagagcattatcttccttgaggataaaaaatcctgatgattctaattcaattgaaggtaagcatgatttctacttggtagtaaagattttatatatcaagcaattagcataacttgtttgtcctggtgtatttaaatgttacaaagcatattgccatagaaattctaattctcaagacctgacatgtgaagaggtatcaatattgttttattgtactcaaattctttattgttattataattattatttgaagtttcacgacacttatgcctctcttggataacctcttaatagcactggtgaagagaataattgacttgtattctattgataaaatagtatatatttatacacaatttagggaagctatactagaaaactaagagaataaaaaaaaaactaattagcttaatttctaactaattttacagctaatatatatatatatatatattatatctaacactctctctcaagctgaagcatatatgttggtcatccccaccttgttacaaaaataatcaatccgccccccattaagagattttgtgaagatgtaccttagtttgttctctagtcttcacatatcctgtagaatttaaatcttactcaatgttctcatgaagaaattgacaatcaatttccttgtgtttagtccgcttatggaacacaggcgtagatgtcatataaagagtagcttcattatcacaccacaatctttgctggtactaaaattttgagtcccacttcagctaatagctgatatatctatatcacctcacacaatgattgtgctatagctctatattctaactttgcactggatcgtgacacaacattctgcttcttactcttccaagaaaccaaattctctccaacaaaaatacagaaacttgaagtggatcttctatctaccttggaacctccccaatcttcatttgagaaacactcaatatgagtgtgcccatgatctgtgtacatgatgcctcgtttaggagctcctttcaaataactcaaaatttgctctaatgttgttcaatgatgaattattggagatgacataaactgactaaccacactaacagagaatacaatatctggacgagtcacagtaagataattcaatttttcaactaacctgcgatactttttagggtcttcaaatggtttcccacctcttgtaaggtgcacaataggattcattggagtactacaaggtttttttctcaatttttctgtctcacttaacaaatcaagtacatacttcctttgagatagaaaaataccttgtttactccaaatgacttcaactcccaaaatatacttgagcacccccaaatcattcgtgtgaaaccgggtatgaagaaacaatttaagggatgagatgtctctagtatcatctcaggtaataacaatttaatccacatactcaaccaacaaaataatcccgatcattgatcttttatagaacatagaatggtcaaacttacttttcaatgcaccaaatttcttaatagctttactaaatttaccaaaccaagtacgatgactttgtttcaaacaatacaaagatttgcaatcacgatagactcgccctgactccccgtaagcaacaaacccagtagattgctccatatacacctcttgctgaagatttccatgaagaaaagcatttttgatatcgagttgacgcaaaggccagtgatgagtagttgccatggaaataaatagccgaacaaatatcagcttagcaacaggagaaaaatatcattatagtctactccatagttttgagcataacccttagcaactgtgaatacccatttgcacttaatagcttgttttcttgaaggtaaaacaaccaagtcccaagtatcattcgcatttaaagcattcatatcttttatcatttcaacaagccaacaagaatgagatagggcttcacgaaaagttttaggtatcgaaatagaatcaagagaagtaataaagaagcaagaaggcgaggaaaaatgattataagaaacaaaagaagaaatgggatagatacaattgcatttacctttacaaagtgcaatggatctgatggcgaagacgttggttcaggatatgaaacaggatgcagaggaggtgaacgcctagagtacactttactaggaggtgaaggaggcgaaggtggtgtaggcatgtcaggagttgtgaccatggaggtggaggaacaagagactcgtcagaatacgtttcaggcgcaaaagatgtgatagaatgtaccaacaaatcatcatcctccccctgatgagtaagattaggtgtagacgaaaaaaaagttattttctacaaaagtaacatcgatagaaataagatatttattaagatcgggacaataacacctatatcctttctcaatgggagaataaccaagaaagactcattttgatgacaggatctaatctgtgacatgtggatgaacatcttgagcaaaacaaacactgtcaaatattcgaggagcaactggaaacaattacttaccaggaaaaagaattttaaatgggatttcactattaagtacagaatatggcatgcgattgataagaaaacacggtgtggaaacaacataaccccaaaaaggtttaggaactttcatttggagcaagagtgcacgtgcagtttcaagaaggtgtttgtcttttcattctgctacactatttataattgagcagatgtatattccttagcattatcacgattgttcattaaaaataaccaacatacacaagaataatcatccacaaaagtaacgaaatacctgaatccaagtttagacaaaataagagaaggaccccaaacatcagaatgaactaacccaaaaggtgcactagcacgtttattgactcgaggactcaaactaacgcaatgatttttagcaaacggacacgactcacaatctattgaagacactttactatattgtggagaaagtttcttgagccgaggaagagatggatgggccaaacgacaatgagcctcaaaagtagaagtgacacttggacatgcaatagagattggtggaaatggatcaagaacatacaggctggcgaattcatgtcctttaccaataatcttcttcgtcataagatcctgaaaggaacaatgattgggaaaaaataagatgcaataatttagattacgagtgagttgactaatagaaagcaaattaaatgatagattaggtaagtgtaagactgatgacaaagtaagtagagatgtaggagagtaatggtgccagatccaagaatagaagaggaagatccatcagctgagataacaattggtggaactatgagatcgaaatgtagaaagaaattggaattatctgtcatgtgatctgtggcaccagaatcaatgacccattttgaggatatggaaagaaggcatgtattagatttacttgaatcagcaatagttataacagaaggagatgaaaacttaagtgattcctggtcccgtgaaacttggcaaattcatctgcaaaaataatgaccgatttgttagatgcatcactagtgcttgcaacattagcgaactgtctttgttgatttttaaacttgaactttctacactcaaatttggtgtggccaagctttttccaatagttgcaaaaaattcctccccctttctgttaacttgaggtagaaggtctcccaaacgcattactactattgcaacataccaaagcactagtaagcggagcagatggagtagtttcagtatgtagatggagcagatgaaccattgagtttatggtcagtaattttagacatcaacgacaccatgtctgtcacaatagctgactaaatttctatcataattttaaaacagcgaagcaataccaaagagagaaagaacaaagaatcacactacaaggtctgaaacgccgaaagagtaaaccaaacaaagagacggctggaaaaagacacctcacccgcttacgcgccgatgtgtgagggttgttgccgaagcttcaggcggcgcatgtggctcacacgcgacggttctggccaccaaattccagggttttgctgattggcaactgggcagtctgttggtgttggcagtgagagttcatgtgctctctaaaagtgtttttcgaaaaatgaaccttaagaaagatgaagaacaaatttataattgcaaaccacaattttgggataaaccctaacttagaatttcaaattttgctttgataccatttaaaacaatggagaagagaataattgacttgtattccattgagaaaataatatatatttatatacaacttagaaaagctatactaggaaattaagagaataaaggaaactaattagcctagtttctagctaatatacatatcgaacaaacagtaaagttttggtagatgaaagaatacaagggtggagtccactgttcatgtactcaaataaaggcatggagtccaattgtagagtttcttgtgacttgtattttattagtgctttgttaaaagaatagacttagtgtgcttttgaaatattggcttctggtcattaggttgttttggttggaattaaattggtgctgtcttgagtgattttcggcaactcaaatcattgtcagattaacatgaagcaggaggttttatttatgcctctttaacaagattgagtttcagaataaacgtgtagtagagcttgaggttgatacttgacatatgtgaatacaatttctaactgggtaaggttaagtttgacatttattggaacaaattgtaaacattttagttactaaacatgtacatgacaccactaaagtaatcattacccactttatgtttgtggtggatcatcttgtcattgtcttgaattctttctgtaaacatgaaagaactgtgtagtttatgatttgaaaattgtatgctctaaatgcatataatgacctttcattgcattatctgttatactcagctaacaagggggaagaaactgatagaaaagaagggggcaatattcaatctgctagctcagagactgatcttactgaagtcttgaatgcatggtattctgcaggtgtctacactggaaagtacgtaaatttttattgctttaaaatgaatgaactcgcaacttattcacttagtgcctactattttccttcataattagcaattttctcaagtacattgctgttctgcatttgataagtgtccagtgactgggttgaactgtcagctctgtttcaacgaggaatataaaaacatgtcttgacatcttgttttgtcatcatttaagatatagttgtgatcttttttggttctttttctcattcagttttgtgcctagatttggaagaggcactcctattcttttataaaatcttcagattttaatcaattcatagatttgtagtcaacattttccatgcatataattggcactattttaagatcaacttgagatatgtagtagaaaatatctagaaccatattattcttatccattccaacagtattaataccgtgtttttgatgtaggtatctggtggagcaatctattgcaaagaaacatcaaagatgagcctttagtatattttttttttgaccatgtgagcggatgttatagacttatagtggttctttagtgagatatatttctgtataatacagattttcgcatctggtttgcatgaccaacatgtgatctctttggttatcattgattacttgcatctgtccacacatttcgttaagaaaacaaagaaaaagagagaattgtgatggactgtaagttgttcaccatcgtgatcttaatttttgcctgcactagaaactacccatttcccacccatatggattttcatcattttctttgtgaataattaaggacccgaataataagctgttagagtgtctttaattttaaatattattttggactctgtgttttacaaaaattactaattggactttcggttttgttaatgacaaaatagattctatattt

SEQ ID NO: 110939 - DNA, 1630 bp, Cannabis sativa
acctgctatagcaggtcaccaaattgccacctcattaatttttttattacccatgaatgggtattacccattaagaaatcatccatacacatatatatttgtttatgtatttgtatttgtatcttcaaatatgtatttgtgaatttatttttgtgtttatcttttgaatagtttgtttttttaacctatgtaaaatcaaaacaaatttttaattttaattttatagaatttttaagtgtaactaatctaagaaccaattataaatttttgtgcaaaaattgtttagacctttcattaggaaaattaaatagtattagatacataatattttttaaaaacaaatatttatagtgacttttttccacagttgtaaactttcatttaaagtaattttttttcaacagttataaatcgtcttttaaagttttacctttttatgacacccacatagccaacagttttaaaaactgatgagaaatagtataaaaaacagttataaactcatggaaaaagtcaatcattttgtagtagtggcggtttaatcacgtaaagtaagttagtatgtgtagtagtcgggtaacaacctaactcgaatttacaccaaaatgtgcactcggacttgaactcgaatatttgcgggtggcactacctaaacttaaatttccgtagtgtcaatttcaagtttattaagtacgcgtgagtcgtgtcatccagatgggcttagtttttggatctaaatatgtcctaccctaataatcagtagtggcaaaaattaactagtcttatcgcaactcatcactcatcattcatcacatttcaatagttaatgatgttaaagagtattattgttaaagagaatactcttacagttcagaaatgttgtataatcaaaggagttgtattgtattaaataaattgaatgttatgtttgaactaaaatttgtattatattaattattataatcacaaattttaatacaataccaattgtattattcaacacataaaaaatggtccctgttagcttataatgtaatttttaagagcttaagttgtatttcgatgggattgaaactggggtttgggtgggggtcgaggcctaaggtcctgtgtggggtttagggtctgaggttcgagaccaagctagagtacatgttttgaagtttgtgtttgtgaggtttaggtagttcaggttcgggctaggttttggggtacgggctcagatttgagattttagccaggggcagggttgttctggtctaggtcgggatcggagtttgggtccgagacagggtacaagctatggttcaggttcgtgatctgaggttaggttacggtgcgagttcccagattcttaatctaaggtattaggtatgggtttcgaagtccaaatcgaagcctagagatctagggtcgaggttggggtttgttaagctcacttatgctaaattattgtcctacatagaataaatggtagagtattaagtcatatataagaatatgaattactccacttatcaccaatctatatctatatataaaggaaagcatcaacaagtttatgtggcactctatatgagttttttcatctattcttaattttcttatatttgtcatttttttatttttt

SEQ ID NO: 110940 - DNA, 2566 bp, Cannabis sativa
  modified_base (972)..(974): a, c, t, g, unknown or other
agtctcgacaacttttaccggcgcatgtcacgaaatacgccggcaaaaacaccttttcttgtagtgaaaagagatgtaatatcttctggaatattgattccttcttcaatttttcataaattttgtgatcgaaaataagttctcattttgatggaccaaaaatcatagttttctctatagaaaattagaagaggtagagaagagcggttggactccaaactcatgttgatgaggggaaaatattacgcccaatgatatgattgaacggaactctgatactactgatggtttgagaataaatttgtattagtttagatttgaataggtagatacaaggaataagtgtttaatggttatgatggtaataaagtgaaatagtaatgttgtgtatatatagtagagaatgatttggcttagaagagagttgtatgagagaaaatagttgtatatatgcaaataaaagagtaggtagtaggtttggaagtagtaggagacttaatttagttttgaagcttggttacaatttggaacattgatggggtatttatagttgtttattccttacactttgtggttagaattattttgttctagattattcttttactagaagaaattgtatctatacacatctaaatatttctagagttcacatagttcgtatattctagattgaatattatcaagaaattaattacttaaggtttttagagaattttttatacaaatataaaaaaatttagactaaagtgttgtagaaatgtataacaaattttaatatttagtcattaatattaattaattagtttatttctatcaaaacaataaattgttgtaagttacaactatatgaatatatttataatattatatatatatttcaaaaaaagaagggttttttttttttattatttgtacacttctaaacattcttttttttttttttttatttttacggaattctatatagannnccttcttgcaactagcgctgcaacctaaatcacaacaaaaaatcgtataaaaatccttattgcaactagcgcttcaaccactttaggaacccaaaccgtaaatttgaaaaaaaaaaaaattataaaaaatagtatatagagtaattcaaaaaaaaaaaaaaatagtagctaattgacttggtaatatatttgatttatatattatttctattaattagccacttgatccattatcttctcaaaataagagcaacgtctcttgtgacgttattgctctgcatgtatatataagtacttggagggtatcacacatataccgtatacaaatatacaatataattggatttttagttgggttattattataattttgctgtttttgttttcttggttcttttattataatcagaagacatgttaaatcttagaggattattttataaatctttaaggacagtgttttctaacatagataaaccagttgaatcaaaactctaaactaacgaacatgccttattaacggtgaatggttaaggagttttgccttgaagatttggccaacaccctcaccatctcgggcattcacttcgaaacagcttgcagcctatcgttgacgggagatatcttccatagccacattgatacaatcgataataataagaatgtatatgtaagtggttataagatcaacgaaaccagtagttaccattccaggcgacaacttgtagcgtttcaggaaggcagacttagacatctccggtaaaccatcgagtaaaccctcctcaatctcaggatgattctctcttttctcagaaagtatatatcctgagacgcattagcaagagcgagtcgtagggttttgagaaaccgaagcagcagcagcacgagcattatcaccgtcatcttctatctcggtaggatttcgggcgagggatttagggggaacagtcttggggtggttctgagaagctaagagggcgttctgggaatggcgttcgaagaaatgttggatgccgaacttggaagattgctgagactgattgttctggttcgattaaattcttggaagaagaagatgatgaagcattggacttcttccttggacgcattgaattgaaaaattcagcttccgatttctgcaacttaagagagagagagagtggagggagattggggttgtgtgatttcccgccaaacaactacggtcagaacttcagagagaatataaatgaaatattgggcttttccgtatgcactatagcccaactaactgtccatgcccaatactaaatttgggcttttgatttgtgacccactacttcggaaaaacggaagggaaacttacaaaaatactatttttttaccaaatatttttaaaaatactgggacacggcaaactttacatttttactgtccaagctcatttttatttcttttataatgctcaggcccaatatatttacttttatactgtaaacactaataaaacacaaacgcacctctccttcgtggttggggacggacaaatcaacaccgaaatcatagaaacaccagaaaaaaaccataaaatctggcaaagagaaaaaattact

SEQ ID NO: 110941 - DNA, 3340 bp, Cannabis sativa
tttttacatttttataatttttttttatatttttacagttttatgttatttcaatattattttcatgttgttacaacgttatactatatttttacaacatgaaaacaatgtgtaaataacaagttttttagaacaacgtgtaaacaacgatctattaaaaaaattgtaaaaaaaaaaaaaaacctcaaaatttcgtaaaaatagaaatttttaattgttttagagtacttttaaaataatcatttaaaactgtcttagacccaatttttttagggtcagccttagaaatttatggacgtgaatcaaaggttctgataccatgacgaatttcaagcttacaatcaaagaatcttaaaaagacaacaatgaacgcaatgaaatcttaatctcaatctaagattaaggctctttatgtatatgaaatcaaaatgcatagtggtagagaagagtttgttgtaacagaaaaacaaagttaactaaactctctttaaccagttcttccaaagcagagaaaggcctaagtactttaactaacaaacaactaacacaacacactggtcaaaatttattttttcatcgcgggttagtttggagttgagagagacatggttaaaatccctctcgagcatgggaagtatagcttcattttttaaaataaatgaataacttcatttaggcatctgccaacaagacacacttctttagttcttagttaactttccattgttgattggaatgtctgatagtgagtagcctatatattatgacatcgatcaatatataaacaatagatgatacacttggatgaaaagtatgtagattctgattcttctttaaaagccaatcaaatgaagtaacggtgtctgttactcatcgttgataacttaatatatatgtttatcaatttctttaaaagaacgtttaatcttggttgtactacaacgtttataaatattttatatgtattcacattaaactgatagttaaataaataccataaattttagttttttatttgaaatcaagactattaataataattaactgttatgttacgtagaatataataagagcattttaagatcatcttccgttacgaactacaacactaattttgtttaattcattattcttggatacaaaaacaaagagagatgaaaatattttctataaatagcatcttataacaacacttgtttatatacacatctcttaactatggctaccgttacaaagcactctgctttggttctcatatttgtaaaccttctagctctaaccagcgctaacaatgccattgacaactgctggagaaaaaacccgcaatggaggcgaaaccggccccaactcgccacctgctcagttggttttgctggaaagatgagtagtggcaatgcaggaagaggtctcataagatacgtagtcacaaacccaagtgatgaaaaccccttaagtccaaaacctgggacacttagatatggagctagtatgataaaaggaaaagtttggatcacatttcaaagggacatgcgtataactctccaaaagccactactcattagtagcttcacggccattgatggcagaggtgtgagtgttcacattgctggaaatgcttgccttgttgtggttcatgcgagtaatgtgataatccatgggcttcatattcaccactgccgagcccagggcccgagcagtgtgatgggttcggagggaaatgttgtgtcgatgggtcaggctgatggtgatgctattagattggttggtgctaggaagatatggattgatcataatactctgtaccagtgccaagatggacttgttgatgttactcgtggctctacggaggtaacggtttcgaataattggtttagagatcaagacaaggttatgcttcttggtcatgatgatggttattccatggataagaatatgaaggtcactgttatttataaccattttggtccaaattgtaatcagagaatgccaaggtaccttacttctaatgttaaatacataatacaatagtttctcttatatagcgttatgttttctaattaaaaatttccaaccaattgaaaaacaaaaacaagacatttacttttacagtactccatataatgaaaatgctttgatttatcacaggaaaaagtttcgagaactagcttatttcagatcaaatagattttaattttatgtatgaaataagatgtgctttaatttatgtataacatggcatacacaatgacaggattcggcatggttatgcacatgtggccaataacttgttcagaggttggactcaatatgctattggaggaagcatgagcccaagtgtgaagagtgaagctaatatctttattgcacccaaatcgggaaataaggaggtaattcattataacgtgatgtcggttttattgatataattatatgtgtgcatatgactaagtttttacatttttttttacaggtaacttggagaatggacacagttggaaacaagaattcatggaagttttattcagtgggagatgtatttgagaatggggcttcttttacaggaacagggttcatgggagcaaacccaaactataatcctcaacaaaatttcaaggttgcaaatgccaaatttgtgagatccttaactagctcagctggtgttcttcggtgcactaaacgatctaaatgttgaataggctcacaaaaacaaatattatgatacataaatataattatatatataggtgtgtaataaataagctagtgtgagatggagtagtatgcattttaatgatgtacaagtcatatgtaaatgttctctactcatatataaataagtaaataaaatagaagtagttaagaacttaactacttgggtacattgattatagttttatcatgtgctgacttttcataatacaaaaaacatcagtaatttttctttcttttgaaacgaaaaactgtaattggatgatattgatgtcactacaacaagaaagaattcaaattcaatcaatgattttggtaagatcctctgcacattaatatacatattccacttggcttatacatttagaggtgtcaaacgggccatattgcctcggttgggctgggctggcccattctacattatctaaaaaaagcctaagacagccgagcccaattatactccaaggtaagcctatatgaagtctcaaattctactcctctcaaaatgctctcaaaaatactcaaagaataattacataagacaccatttttttttgtaaaataatttaatttttacgttcaaagaatatttttttgggctatttacaaaaatatggggaaatgaagatat

SEQ ID NO: 110942 - DNA, 8368 bp, Cannabis sativa
gtatcgagccttgaaaacccgagccaccaaagagtttgaccgagagtatcccattagaatgtcattccaatacttaaaatacaatcaaacataggaattgaatgaaaattgttttctttctattctattctatttcattacttccaaccaaacgttacctaaatagtaaatatatacaattttaaaatacaaaatattaaataaacattatttaaaatacaaacttatatttaaataaaatacaaaatatgaaatgagtagacactctcatttatatttattatttgtggacattattattatacattcgaacatcttcaattattccgaaaataccctttgtcttaatcttcgtttttatacaactcactctctcactcactaacagaagagagagaaaaagagtgtttgagagagaaacaacaatggcgatggaagcagacttacccatttcccattttacccctacaccatccatactcttcctcctctttctcctctcttccgccatagccaccgctcccaccgccgctctcaacatcaccaacctcctctcctccttcccagacttctccgacttcgcttcactcctctcctcatcatcatcttccctcgccgccgatctctcccgccgatcctccataactctcctcgccgtcccaaacacatacctctccgcttcatcagatctcacgcgccgcttgtcttcatcttcacgcgctgatgtcgtccgataccacatactcctcgaatacctctccccttccgatctccgacggatctcttcctcaggtaagcttgtcaccacgctccttcaaaccaccggacgcgccaccaacaacttcggttcggtcaacatcacccgcgatccaatcaccggaattgtttcagtccgatctccggcaccttattcaccctcgaatgctaccattcttaaccctatcaaaaccctaccgtacaatgtgagtgtcttcgctgttaattctcttctcgttccgtacggattcgatctaatggcttccgagactcgacctccattaggtttgaatatcactaaggctttaatcgacggtcataacttcaacgttgcggcttcgatgttagcagcctccggcgtagtagaggaatttgaagccgacgaaggtggtgccggaataaccctatttgtaccagtcgatacagctttcgctcaacttccgtcaaatgttgagcttcaatcattaccggccgataagaaagcagtggtgttgaaattccatgttcttcattcttattatcctttgggttcgcttgaatcaattgtgaaccctgttcaacccacattagctacggaagacatgggcgcaggaagcttcactctcaacatttctagggttaatggatcggtagcaatcaatacaggtatcgttcaagtgtcggtgacccaaacagtttttgatcaaaacccagtcgccatttttggggtttctggggttttattacccaaagagatttttgggaagaatccaataacgacgacgactcccaaaccaggaacaccctttgcttcgggtacggctcagccacctgatattgctttctcgccggagtttacgcctggattagatggccctccttcacacctctcatctccgccgggtttaggtcaagatataagatcgaaagcagaagcagcagccgccattaatgggttccatttctataccttgatccttgctctgttgtgtatagccttatctctttaaatggtaaatggtatgagatataatttattattttggttggtaattagattttattttttttaatttatttatttttgtgttttttatttttttttacacgggaaattgaatttataaatgttaattgtgttaatgtttttttttctattaataattatgtgtttagagagattgattcatttttgttgtccttgttatgtatagcaatgttagaaattttttttgtacctaagtgatgaaggaaaaataaaacacagaaatatggtgaaaaaaatgttctatttattggattgtgtagcattatataaattatgttgtacattatatatttttttttatataatattatatttggtattgattttgatgttcgtataaatatataatagtttgatatcaataaaaatttaacttcatattatataaaaatataatataaacacaatttaatataataattgttaagctgtaaataatgaggttggttacatgaaggaataaattaggtggattaattaaagagttaaactcgtaaaggcatttagaaatatttctagtgtcgataatgttaatgttgagacttaacctatttaaacttgctcttgtttataacctcagaaatattattggtattttttcagaagaatatgttacccaaagtgcatctaagggctggtgaaccccgaaaatcatacattaaacaatgaaacatcttgacaatcgtatgttatagaagataaagaccaagtcaaatagaacaatcatcttatttaaaatgaaagtggttgcatatgaaacacaaggaatgttcacggtttataactattgttcagattagataaaaaataattgttattcaatccctataaatatcagagcaaacattgtaaaagagagatcaattttttaaatttgagaaaattttgccaaattatatctgtaacctaagaatactagaaatagaaaaaaactcgtggaatatataaattttaattacaaaatcaagtaaaaatccatctctcttattaaatatatatatatttatatagcatataatatttactgagcattaattatcaactctaatttatgttaacgaaatttcgagttaatactttctaaactctaaaaacacatcttcctacccaaaaataaaagtttgcattatggacaatacttctcaagacattcccgtcgaacaagaagaaacggttcatcacgttagaaaagagccccaggggactcaacttgccaatgatctaaatacaggaaaaagtcctcctaaatgggactttgaaagaactgacaacgaggaaaccattctagaaagaaagaatgaggggcataagaccccactagatatgttccttgagggaattaaaaaattgccaacttcgacaaagattaggcaagcctaaccaaagaaatgctggattaaagcgtgaagccgctatagcgcgtgcgaatgctaataacacacatgcaaaactatttgaacccccagcaagacaaacacgaggaaggcctcgtggtgggtcaaagaccaaaagggcgtcgaatgttcttgtcaaggagaacaatacaaacaaccctacatattctagtagcaacaacctgtgaatacaagagagattactgttgacacagaaattccacataatctaaatggtccaaatctaaggcaaacacgactcgatgttctggaaccatctcatatgaatatgagaccttcgccagaacaaccaaaaactcgacccacaagtcatcgtcgaccacatgaatcattttaaatagaaaaacttgtcacgcccatatttcgagcattaatatgaagatgatatgtggatataagtcttaaaaattaaggaataatataaacatgaggaatgggataggtttctcacctcgagacatgctacaattaaatgatacgtttgtctcgcattgtattataatatgactgtcaaataaaagcgataaaattataaatacaattattagcgagataacaacatcataggcctatctcaaacatgacccagataaataagacatgtatagaatatgaagggattagtcgctggaaaaggtagataataagttctttaagagtttgttgctcattgacccacatactcatgagtatgttaaaagactaagagatatgagcaaaaaatgatccatctcggaaggctcataaacgacgtaagaagatttaccctaaggaccacaaaagattcaattctaagtgttatcttaagacctatcttagacagcaaaagcgaagaagatacctcaattaacgtctcgcaacatacgcctagtcattcccaacattactgaagaaggcaaggcatattttaggtatgttatctcagcaaagaagataatttcaagataagtacaaaagtgcttactaacagttaatttatttatcccacatgttgtaaaataaaatgtggagattgtttatgtttcataaacggttatctagataaaaacaaaaaggaataacggtcattcctaaaaatcctataaatagggacagaacctatgatgtaagggacaaataatttttgggaggaaataccttgagaaattaagtgcagaaaaacctagagattactactttgtatcagatatcttgttatcttaaacaaatcaagaactcagaaataatatggactcatggactatgtagatttaaatataaaaccacgtaaaaattcatgtgtcttatttatctctattattaatatttacttttaattttattcacatgataatctagaagaacagatgctccaaaatgagaaggacaagaacgatttaaaggtcaaggtcgaaactttgaagaaatccttatttgacattgccaagaaggccaaaaaagacattgaggagacgaaagaggccctcgaagaatcaatatagtgatccaacgctccagttacaaggtttgagtgagcaataataaaagcatgaaccttagcttcttgggtgatcgtgccgagaaacctagctttacacgttaaaccaaacctagaggaagaggtttgttttatgattcaagcaaacccttatttcattccacttttacgaacacataaatgtataatattttagtataaattaaaatttaacatagtaatatataaaaatatgacataaatacaacatactaaccgagcctgttaattttaactaccgattcaagcaatcccacgattccattacttcgtggttctacttgacttctaatctactttcgtgttctaattatcaaacaaggactctgtttagataactgaatgtgttcagtgaaagaaaggaatgcgtaacaagttctagttctttctctagatttatatcattactaattcctttctgaaacttctaagaataatcatatatcatgtgttttcaaacaccacaaatagaatatgcatatgtaatttaagttccatattaatattaaagaagaaaaataaacaatgaaactgagcacactgttgttattataacttataagttgagttccaactaaaatgaactgaagaacatagaaaacagagaacaacacagaaactaatcaactcaaacagactctcaatttgattagaagagcacataattaaacaatggctgcaaaaaataactgttcttccaaatgcatagtaaccactctgcccttctctacagttctgatctgaacctattcctgcttggtgaagtgtcggacagcgaatgctaaacccaagattaaaaggggaactaagaactgcaaaattttgatgacaaactcaggtgtcttatcgggattgtgtggagtttgctgcggtggaatgtaggtccgttttagcggaacagttgcagcatcaatctctcctatgtagtactgctccatcatttctctagctgaatcactgtggcctacatcttcaaaatcattggttgcatctttccctgcaaaggtttttgaataaaattaatctcaaaaaagagtcttcatttggggtattagatcaatgttgcctccccacaaaaaatatacatagtttcaattggaacagttaatatgatgaagaatgcattaccagtagctgatagcagcacttcatctcctccgggatgatcatccataaatggcgtaacatcatacacctgaatccagatactaactacatgagttcaaaataaactccatgccaatgaaagatcaatagaacgaaaaacaaaaagcagaaaacaattaataataaaagagaaggctgtgacaaaattcttgagtttggatcataattgaacttttctttttctccttacctagttcctgaaaatggggttcttggttggtcataacttttttattgtatgcaaactaccaaaactcaagttgaagagatttcacttatttctacttcaacataataaaagttgtaactttttgtcttttagaggagaaaagaagaagaagacttcatttagtatacatattcaagcatttaggccctttataataaacactacattacatcacatatacaaatatatatgtaatatggggatagtaattgcttctacttcctttcataattgagttaattttgtaactaagagtgtaaagggactggtacccaagaggaataagttccctatatgttatatatgaatatacacacaaatatattttatcaatattggtagcaattaaaattaggctaaagtgacaattatccgaattggattaagatcccagcaaatcaacacctaggttaacaggctggataaaattagtttatacaagtttcccaaaccaaatttctcagcaaacaaacagagtcttaagttgaccaatcaatccaaaaactaaatcctcactccaaaaccaatcaaaagagaaaaaagatctgacctttcccgaaacaattagccaacaatccttggtcttgttatgttgagccacttcttcgaatttgtgcacctttggatctgaagccattattcttaactgaaaacccacaaaacctcataattattatgtaaacaaatttgaaaaatataaagaataaaaaaaaccatgaaagtcgacacagaaatcgttagaagaatcaaatagaaagaacccagaaaaaaagattgaaaattgagatcatactgggcgttacaaacgagggagaaaagcttttacgaaggaagagaattcttcttcttcttcttcgttctctctcactcgtcaaaccttgtcagagtcactaagtaaatgtaatgctttcttttctttattattattattaattatttgtggagattatatatatatttgaagattttcatttattcttaaaatgcccttcgttttatgttgaatttacggtcttaatctttgtttttgggaggaaattatacattattcgaggggtattttcgtctcaaaatttatcaattcaagttgtatacgtttcattagtaaaaacaacaacaacaaattccataaaaggtaaatagaaaaatgatgaagcgtttctttctttatttttcttttttccataaaatgtaattattttatttttttcttctaatgatttttaaaatatcaatttactattttttttttgctttattattattttactatttaaaattagatacatgatgttccattcaatcaaaatataaaataaaagggtgcttttccaatgtacagagagtatttttttttttttatgttttgttatttaggagaatttttctaatttaattttttataagcatatacaatataattatttaagatattttatataattttaaaaaattgagaatactttataatataaaaataatatttaagtaatttatttacacataaaataaaataatcgtgactgtttgaatcttatttttaatatattaaatttttcaaaattttacataatattttaaataactatatgactataatttttaataatatttactatttgtttagaattttaatttatgctaaaaaaataaattaaattatctaaagattttctgaaaaaaatctatttttcatatataatttgaatttaaacaaaaaaaaaatgataaaatatatgtttaaacaaatttagagttagatttaaatataattatacaaaaattaacagcataaatttattaaaaaaaaggtttacgagtacatttaaaaatgggttaatactattttagactctatgttttgtaaaagttatcgattgaatcttttattttgtaaaatgacaaatttgatcctgcattttctaaaataaaataaaatagtatcccgaactcaatttttttttttttaaataaccaacttgaagataatttctagcatggtcaaatgtagaaaatgtgtccagttttatcataataactctagattgtgttattattaacttttatttttgacaaaaatcaatttagggtactattctataccattttgaaaaatacatggtctaatttatcatttaacaaaatagaaagtttaatcagtaacttaatgcagagtccaaagtaatatttactttttcaatatacagtagaacctctattcaagaatacacttaggaccaagtaaattatattctaat

SEQ ID NO: 110943 - DNA, 10509 bp, Cannabis sativa
  modified_base (36)..(38): a, c, t, g, unknown or other
  modified_base (8607)..(8608): a, c, t, g, unknown or other
tttttaaaatgtataaatttttaaaataattttttnnngcacattttttgtaattattttatttttgttgtacatttatgaaaaaagcccttaaaaatattaacgaagcctttaattagctaaaaagaaataatttttaaaaaatatcgctaattataattaattatagagaacattagtggtgcccaaaatatactccttctattgtaacccataaacttattgaaatgacaaaaggctataacttttacttaatctttatcaatttcagactcgtggaagagaaactccaagctataaccatggcttctctctcagctactacaactggaatcctcaaatccccgtcgtcttattttccgatgatcctacttaaatctcaacaatacccacaattcatatctgtccaacaacgctgtctaacctctgacagaaagaccatcttcaaaacggccattggagcttcgaatccaagcgcgtcaactggtccttcttcgccaggactttactctgcccagaaatttgaactcacagctcaaaacgttgacttggttctcgaggacgtacgcccttatctcatttctgatggtggtaacgtcgatgttgtgtccgtcgaagagggtgtcgtttctctcaaactccaaggtgggtctcgtttctttttatctatatttccttcttttcacttaaagtcatattctttttgtctaattcaatcaatcacaaggttcaccaaaattttatatccaatttcaagacatttgttcttgaattgcaactttgaatgttacattgtgtaatttgaggttattttattttagatgcaagtatatggttgacaatatggttattattattgcttatgtcgctaatgtgtggaaagataatagaatttatgagccaatttgttggaaccaccttacaattataacattatgcacattagaaaattttctattttgtgggattttcatctgtcaactatgtatatatatatatatatatatcagtatatgttcaactatgagaagttattgtctcaagtgtgatgtatatgtgtgaagtttacatttgaattacctaattttactttgattaacaattttcagttcgttgtttcctttgattctatgtttgagtgtaaccacacaattatatttgatgacgaggtgagatatctgctagataagctggtatggtagattcagattgaaagtgaagtgtttttttctataatatgattaatatagctcgaagtgaaagttgcataataattattgctaaccaagttctaaaccaaagttgacacagattatatggtggtgattttggtttccactgttatgaatttacggttcttattgactgagattttgccagtattgaaaaatgattaacaggggcatgtgagagctgtcctagctctacaaccaccatgacaatggggattgaacgtgtactaaaagaaaagtttggagacgctcttaaggaaatccgccaagtctatgatgaagaggcgaaagagacaactgctgaggtgagtcatattagtgctttgatatttgacaatagtatttgagggaatgttttttgtaaaaacttgaatctgacattgctgcatttgcaggccgtgaaccgtcaccttgacattttgagaccagccataaagaactttggtggaagtgtggaagttttatctgttgaaaatggggattgctttgttaactatgttggccccgagtcaattggatctggtgtcaaagctgctataaaggagaagttccctgatattataaacgttatactcaaacagtagagatttccctttctcagaaattacttgttctacattgtcaccagaagtaaatagtacatttatttatggatataattttgggaacaccatgttatttctttgcacatttttttcatgaatgattatgtgaagacgtataatagcccttttcacattatttatacatattattcatgaacaatgacctcagcagattcaaccctgatccaggatgatgaattcttttccagcattggattttgttctgtttcgaaatacatgaaatttggttttaaacattgaacagtgttaagattctccctcattaacttgatcagcggcagttaacactgacttcagccatcgagagaaattaatcaaaaatatggtgtaagcaaaatagcaagtgattgtccagctgactagtccctgcattgaagcaattacagaaactcaaatactttcttatattatagtgaatttgatgtgtttgggagctagttctaccatttacctggccaaagatatcgatgttgggttgtggataatgccataggtggaagaacctgcatgaattgaatagaattttaatggatcacaacccatttaagcacacaattaagagagtgaaatggcatggttggttggtcggttgcttacttcattaagggagtctcagccagtgggcaacctattccaacaatgcatgccagggtaaaccccaacagtgttctatccagggatagccatagcaactctgctaatccgaacaatatgtaggcctcagtgttgtacgcaactccagctttgtacatttcagcgcttagttctatgaatgccacaagagctctgcctccattttcaaagggttatatgcaataacgaaagtaatgaatggctgaaagttaatgacattttggtacacattttaaagagtaagatattgagaaactcacataaaagaagtggctgctttcttttggttatcatcttctaaaatctttgaagatcctctttcatccaagtataattgaagcaaaccaacagtgcaatagaatgaaccaaggagaaaaggtacctatttcaacagatggagtagctctgcttgcatcaagtgttaccaagaaaatatcacatggctttaaaggaattcacattttttacccagatatttgtatggagtggaccaatgttaatggcaccattgtcatacaccacaagatctacccttgagtgaagcccatcaagcaagggacccaagaagaagcctgagccaaatagggtcactgagattgaaggccaagcttttctgaggcttcttctctcctgttttcttaggctgcagtaggctgctctgccaagaaaatgcttggacttggcaatgtttggtgcactgtgtagaaagcaagaggattttaacaaaatcatcgaatggtgaatggtttcacatgcacactctaacaaccgttagtagtgttagtagtctttggttaagtccatatgatgataaaatttatgtggtgcaagttttttcagggttccactacaattattattgaagggcgaacagaactaataaaacccataattaggatttttttttcttcataaatcttacctattatataaaatctaactccatgttattatacatttaacaaattgttgtgtatttaataggagagtattgttattggacatcagtggtgtccagcactttctatagttggcgtctcataattagttagtgatattgtctaaaaactattttcttaagttatatgagatctgatacttaaacaccaatagcgataagacactgaggaagatgctagacactagtggtaccttttaacaattctcttaacaaaatatacccaattaaaatgttaactttaatagaatatataatatattacttttaataatgaaatttttatataaaaaatataaattgatattttatttacaaaaatacctaaattatggacaacaattttatctttaatgagcttttatttaccaaaatactacttacacatatccattcgtgtcagtccaaatttaacttttttgttctagtttttcttttatttttcattttcgaatttaacattcagtttctttttccttttctttctcaattttttatttcaaaaccaccttccagctattaccttttgaaaacccacaaaaccacctcccagtcataactttcgccattttcttcttccaactgcctcctttatcaatttatatatatatatatatacatatctttcatttcgtatgtataatggctattacatgtggctctgcttctttatctctattgcaaaaaaaaaaaaaaaaaaaaaaaaaaatcttcaaaaatgggtcataaatcaattgctaacaaggctaaagggaaacgtccaaccatcgacgatgatgactccgatttcgctcctcccgtggctaaaggtgctagtcaatgtaataagaaaagtttttttaaattctaactaatgtttcaaagatggtgttattaatgctatacagttttgatgatatgttggatctgccattcaactacaaaacaactattatgcaattttttaaaaatcaataatgtattatatgtaatagcaatgtattaaagtaacatttttgtctataaaagttcacaataacaaaattaaataattcaaattaatattttctcaatatcaaatttcttggtttatggcatgtcttccagttgtgacctttttggtcacatttgttgtgcttattctatttttttttgtttcctatgcacctagaaatcttcttttccttagttttttttagttatatatgagtattttcttggttgcatttcagcaattgtgtcagcttgtgtattagttcatcatatttgcaatcaattgagatgaattgtctactagtttcgtaatttacttaattgatttctttatcaaactgtccgtcgcaaaatataaggaatggaattgcgtctttttttcgagagtataaaagtttgagtattgtaagttaactgtaatgaaactataatgcaacgcttatatctgttgtgagccaattaatataaaaccacaaaataactaattatatttaatacaaacaaatattacaactgtcgtgttttatctgtttaggtcacatatttgacaatttcaagcgctgtttatataatattatgatattgtagtagcaaaatcattattcaactaacatacaacttaattgcaactagaaatattaaatgtgaatgtgtatctataaaagaactatttgtcagtattttttttggtcactaattgataattaattgtaccttaataataatatgtggtgaaataactattaaatctctgtaaactaactttatatcaattaatttagtatattaataaaactaaatgttataaaagtttctttaaagagctttgtattgtattgacgatatgaaacacttgcaaatatgataaaattcattgtatcattatcagtttgtaataattgatatgtcaagtttcagagagttaacaaaatagttatgcaattgttatggaatataaaaaattagaattgtgtttctatgtacgtggctctgtctacatgtgaatttactattctattcgtgacgtaatgtgaacaaattcaccattagaaatctagaaaactacaaaaaatacatcaagatacatatttaactatattattgattcattttttttattatacctgagttagattgtttaggaacttcagttcaactttttaaggtttgcatttcatggatctgaaaattgaagtcaggatattagttttatgcgaattaaatcagaattctagttgagatttagttttgtagtagttttattacacattttttcatgattttggaacaacctctattttgattgattctggtcgtcttctcatgtgaagtcgtagaaattaatggtggttctcttttgtttgggtttcatttcaattgtgttgggttactgggttggtcgatcgaagattgcgtgtgtgagattgtttgttttgttcagtacagctaaagtagtagaataagtggtatttatgtaatatttggtttttgagttgtattaatattcctagggccggcaataaatattgttgtaatttaattatatttttctttatatacatgaaaaaaaaacccctttaataattataccctcttacctaaagaggcaaccattaaaagtacaacataaacacccattcggtgaagcatcatgaaaaccacacacccactagtgaagcattattatgaaaaccaaatatattaaatatatatttgtgttcaatcaccaaattattcaggataaatacatgcatgcacatatataatttcatttgcaatgttgttttgtttggaaaaaaaatgatacatacgcacatagtagtatattactatattgttatataattaattacatatagtttacaattattctttgatcaattatttgagaaaaaaaagtcatctctttctctcaagccacaaaaactcaatttagaaatggataaataacatacacaactaataattaagtttgttcattaatttacataatttttttataatttattgaaatacaatccaattatgtaacttaaattttatttattattttattctttataaaaatatatattaatgtaataagtaaaaattatatgttcaatatttaaaaaaatatataatataatgatgaatctaccaaagaacacagattcatatagctaataattatgtttgtttattagtttgtacatctaatatttttaggtttatcaagattcaatttaattatttaatgaatgtttaattttgccaattaaactggtccaataaattttaacaattgaaccgattcaataaatcatttaattgaatcaaccctatctattagacaggtatatatattggattagtttaaatttatccaatatattttcaatatattttgaacttattatattaaaatctcaaatgaagatgatgaaccatataaacattaatttactttgtgtttgaacgaatttgtagagagaattagtgcccaaatatatgcatcaattttatatacacaataatattaattgaattatatttaagctaacatttatgtaatcaacatgttaatttaaatatcttaatttcttgaatatatttgaagttttaataattgactaacaaaatataagtgcattgcacttacttttcttgtatatatataaatagaatactttttaataaatattacctataaatagttatatatattcttaaaaaaaaagacatcatcaacaataataatactagaaacagaacacaagaacaataacctttaaaaaatgtccaaaatttcattaaccttgtgataaatccaacacagctaaatacctaacctcagtctacttctactctacaagaaactcataagctttcttatgctcaaccatgtcatccagaagacatttaaaaaatctgacattagtatccagtggccgctgacatagtctcttgtcaattatgttgagatgattgcgtttaaagaaatttgccaagtctttcagctccattcatcttctgcagcagcaagcaacattaacttgatcgtagtgggatgatgataagaagcagcttcagcccaacatggccggccggattgttaaaaccaatttgaaacgttgaagtcccttagcttcctaagatgtctttccatatcttgtctagtttttgtccactcttctctctctatcactgtggtagggtcatctctttcatcctggaagtgagtgagtaaataagaaataaaacaactgaattggaccagacaaagcttgataaaaataaacctctgcaagtatatatttggagattagagttgtttaccgaaggaactattttgaaggaatttccattatcacgtataacaagaaggtcgttttttctatctctgttccttccttccgggattgtgacctatcaaacacatgaaagccttccattaatgaactaaccacaaccttggaaagtacagcaatagaaacaagtaacaatcaaagaggcagcaagtaaatgtaaaattttaaggccagaattatatttatattgtggtgcctcattgcattattcgtctcaacactcaaatgtgtgaactcaaaagtaaagtacaaaattctctcaccaaaacttttgctctggtaattgattttgttttggagtctataacatatatctcctcaaaatccagcacaaattctggatcacctaaccttcggtttctgtagtgctttgtcaaataaacctgcacattaaatgcatcccgagttatgatgtgccttaaaaagaaaagtgagccaaatggacagtaaatttctaagtgttatcagtttctgcataagaaaacttcttcaactagctatgctactaacgtgcacaaatcaattatatgtttgtgtaggaaatttagctctgaaacatattaatctctataattcctgcttcaagatcatacttaaacaaataaatgttaaatcaaaacaaataaatcaagaacaaaaaaccagcaaacacattaaaccagaaaaataacacaaatgaatctagatagctttcaaacacaacaacacacgaaatttatactagttccgatcttaagttcaatgtgaacttggtcatattccaatttgaaaacattgccaccaatttttattgataatgagaaatagagatatcaatctcaagagctacaaggaannaatcacagcaagtcatccatggtgtaatccatcaacactcattaactcagtaacctgagccaacataaccaacaatgttgctcaatacaatttcccaatctcaactctctctcaatttctcactctaacttctctctctactgtgttgtgtctctcttttatattcttgttattctcatgaaaatgagaggaactctttatataggccaaaggatctaatatgcaagctatccttgttgacagttaagttagttaaagactaactaactaaccaaatgttggttgggggtttaaggaataataccacagtttgtaatgtgtagtttaacaatgattgaaataacaaaacagaacagaacttttgactactggttccacatacatttcaggtacaagactacagcttgtatattaaacctttattgtgtactgccatatcatacacttagtaatgtgtaatgcctataaaaaatcactcttgtacttttttcatatactcaaaatagaagaagtctaagtttttccggagagagaaaacaggagggtttcgtgaggtgatcttggcttatctctgggtctttgagtttgtatagagtgctcactgtgttcttggaagggtgatcgtaggtgtacttaattcttgattggtggcttgtaatttgaactaaaaaattttacatcacaggaaactaagtatacataagtctgaactgaactatgccatgaagttgaagaaaaaaaggaatataagcataccttgaggatctctctatcactcttatataatggatctctaggtgcatcaattggtggttctgtaacattgtagcatccataatcactcttagcacaccgaatatactacagttttgaaacatgttcaggagatatgtcaaacatataacaaaggttatagaaaaaacaagctaatggaaacataactaaatgagtaaatgggcaaccattaaaatgtagtaccttctgaggcattggagcaagaaccctgggaacagcataaacatctgtgtccggaggagtaacatacatctatacaaatgtaacccgtgttaagaaatcataaaagaaaacatttttaacaaaaataatataaagagagatttttttttatacctctctgaaatcatagacatcgttatctgggtctggaggttttcgaatgaagaaatcacaatggaaaaggctaatcttgtggaactcatcctcgttaatcctgtaatctaccaccatctccgaatcccaaccttgagtagagacaaagctcttgctatgcaccatggaaatgtcttcgtccgctccaacaacgatggtggccgatgctgcggtggctccagttaatgtgtcgtactctatgtcgaagtccttcttgttgtcaacctcttcaagttcctcatcgtccatgtcatagtcgtcggggcctccaccgtcggcgtcaccctcatcggcgcgaacgacgaaggaattgttgtttggcgaccgagataaggggttaagtttgagcttgaggggcggcgaagaatagaagaagttagaggtagttgctgctgttgttgctgtagcggtgaggggcctaagagaaaatagtggaggagaaaggagcagagtgactgctcccatggcttcttcgggttcgggcaatcgctgtgaaagagctttatctgtttgtttaagggaaagatagtttcgtatatgtttttctggaaaacgacagagagagcttaacaacgacaacagattaaaacaatatataatacgacattgaacgacgaaaagagatggatgacaataggaaatgagcattgctataaggcatcagtggtgcctagcagcttcttcgcgtaacgattggctagcgatactcctaaaagctactatattaaatt

SEQ ID NO: 110944 - DNA, 2822 bp, Cannabis sativa
gtcttgcagaagtgtcgaggctgcgtgaggctgtaattgttgaaatagcaaaatttagtgttggttgaatcacaacgagggcattttagggccatctcaggttgtggtatttttgctagacgggctcgatctgccatcgagcctggtcttatcgagcccgcaccacctccaccgccaacactttctggtgttggaagtagaggtgcgtgaacctgagaattctggtcattacgattgctattttgttgttgttgctgctgttgatgttgatgatcattatgattcggttgctgcagaatttcatcataaaacactaaagttaaaatcaaatacaaattaaaaatatctggtatattcaagaaggggatgagattagaaaggatatataggaatatttgtaaaaatatatgaatatttatttatgtggctttaaagatttttagcttttttggtgaagaagcaaactcaataatatttgagttggggtaagaaaaagaaaaaattcataaaaattaataaaaacctgtggcggccagttgggtggatccagatacacatgaggaacagatgagaaagccatggctctctctttggagctttaaaaatctctctcttttcttttttgtgaaaaagtttagttgatgggttattttaggtgggagatatatatatatatatatatatatgtatattcttttgtgtggcttaagaatcacatcaaacgtttattaagaaagagtttgagagaaaggagagagatcatcagatggagatgtaaagatataaagaagagggtttttgtttatatttattttgttcctttgttctgtatggtagtaagagtactactactctctcttatctctatttttgttttattaaatttttagggtttaaagggtaaacgacaaccattttcttagtctttaagcttcttttttttctttatactgttattattaacactgtagtgcacccaaaaagattagtgcccatgcatgatcaagacagagagagagaataattaaaccctaagtaaataggttaagatatatgaataataaaacaagctgactatcaataatttgaaattaaaaaataaaagttgggtaagaggtggggtttcgggtgtggaagcgtcacaatcgaatggacctttatttatatgggtctgttcattgcatataatttttttttttttttgcatggacatatattaataaaagtcttacattttttcaatcatttcttaatgtatatatcatcgtgtgtttgggaaggatggtcttactttacgtataaattacagaaaaggtaattaaactttgataacttttgatgtaccattttgatatttttagacaaatacataataaatatgttactaaatttaactagaacaatatggatgtaaactatatatacataattaatatgtgagaagtatttgtcaaaagtctaaaaagagttttggaatgtaatttcctgaaagtgagtatttgtaagtacatgaaaagccaatttagtgattcaagtagttcagccaaatatacttattcactacttttccttcaaaaaaaatcctaacgcacatacataaaagtgagagtataaaaatatgtaagtcaataaaaggtatatttataattcaaaatgtatagagaaaaccatggtacacagcaaaagatcttttgcgcgtattctaaatataatcatatatctaaataaatggattcctttctttgtagtagagacatcttataatagtactttagactttcctggctcattaaatcttccagttcatctgaaacgaacaaattgtaaacttaactagtctactctagctttggtagctagctagttataatatacaaattatattacaacttacatgtacgtatgtctatgaaggaataatcaatggtactccactgttccttttcctttccagaaaacaaatatatatctataatggttttaagttgacgattgttgtggcacttccaaacttgtgaaatgaaatgctaagttcaaaaaaaggcatagaaatttactggcacaccctgctaacctaaagctgacctctctatttctctgatttatataattaccaaataaaagcttgaaacacgtgtgcccaggcatggtacttatatattcatcaaatattactttcatacttaaataacatttattcaattaccaaaatttatatatctatataaaggagaactataagacggtgacgtgtcgctctaaaatagttttaaaggtgtttatctcttttttgattttttctaattatttaagacttatttatctattttctaattatttaaaatgtatttatctattttctcattttttttaattatattttttttatttttctaattttttaaataaaaaacacggtaaatttttttaaaaaaaaaactttataaatatctaacaaaaaaaattaaaaattaaaaaagttttaatttttaatcttttttatctttattttggttttaatttagccgtttattacctcatattttttgataatattttttttctttctttcttagatcacaaatatgatgaggcaagtaaggaatttataacaaaatcattcacttatgtataaaaaaagttagtagttaagtaactcaaatatatgatttattttatgtacagagtaaacctattttgatcaataatgataactataaataaggtataataatgatagcgactttgaatgtagtggcgactacaagtgagatacggtgatgacatcggctttgaatgacaacagttttaaaatcatatga

SEQ ID NO: 110945 - DNA, 3945 bp, Cannabis sativa
aaaaaaaaaaaaaaacaacccaaaataattatcttaacccccaaaaaaaaaaaaaaaagacatcaactctaaatttattttgtgtactctagagtgatagaaggagagattaaatccttgtttggcaagagagaaaggagggatacattttccctccaatccttaaaaaatcaatccctccaaatttgggagtatagaaaaagaaaaaataaaattccaaaatacaatacccttgaaaaaagataatcaatatttatgttcaaaataacaattttgtaattttaccaataatttttttcactgtccttcccacatcacacctaataccaaacaacacaaaggaaatcaacaatcctctccatccttcctactctccatccatcctactctcttttcccaccaaacaaagccttagtaacttaacagaggtagacaaacaattctacaaaaagcttaagcttcaaagaataatcaaaaattcgattctatatggtaagaaccgaatactccaaagtcaataaaaccagaaaaacagtagagaattatagaaaatattgaatgtatgagaaaagtcaattataaactataggagcccttaggccattttgatacaaatagagttttactcaatacattgcatacccactaactccttaacacccttatatatactatcccaaatctcacccgtaactactctcaatacactgagtcatacaccttcgtttcctatgctctagcacatccagtaatatggggtctaacaataccggctgcccgaatctcaacttgtctcaaggtgaatgagagccaaactcgaccatcgcaggcttgacccgacctctgtcaaaaaaccaggtcagaaaagtgaccttctctccattccagctattgagaagagccacaggagcagtttaccaaggaagaacaaggctaggctgatcgagaaatataggggagggagagaaacaccaccacgtagttaggtgaccgcactcgaaaaaccagtcaaatatagtcatatttcagcagtcagtatgacgaacacgtgactgttgaagtatggcagcaaggcgaggaatctacaaaaatgtgatacagaaacccaatcaataaaacagtggacatttgagttcaacgagttcaactttgctccacttttcctagttgttgtccgttgatagtgaacaaagtacaaatacgtcacttgggtagtcacctccatcatgtcgaagacaaacaatgatggacttctcctactagctgctgctacttctcctactccggcgacgtctccaactgctggtttttctccaccgacgtaggctttgatgatggacttggtaagctgacttcctaatataaccttcgctccttcctcagagaacatattcaattgaaaacctaattggacgttttaatgtccaccatttccatttttgtatctcatcttccttctttttttattttttttaagaagaagagaaaagaacctcttgtcttaagacagatctctccccattatgtattgaaatcctcacttgtggcggaggaaaaccatgtctacaaaaaccaagacaacaaggccttataacagttagcactctacaatacttgaccaaaataagctagccaaaaaaaactaataataccactacaacaatgatttccaatctctacatgaatctaaaaaggacaagtcctcaaaatcctcttctgaactttcagccccttcaaaaattctggtatttctttccaaccacacagcccaaattgttgctaagattgtcgttctccacaattttgttgtatgtttgctgccaattaatttagtaacaatcatttgtggtacataacttggcataacccatcgaattcctctatcaaattgagtcataatcgtcgaataaatttacactacaagaacagatgttccagatcttccccgttgcctttccagcagatgcaccaaccaggggaaatgtagaggaaaggcttcctcttttgcatcctatcatgggcgttcactttgtttaaagacacaagccaaccaaacacttaaacttttgatggtacaaagcttttccataaaatcctcgtccaaaacagacctctaacagtcgggtttgatgtaaaccaacaaaaggttgatttacaagaaaacaaacccctaacggatccagcttccaaattcgactatcttccaaaatattcagtaccttcacatgttccaccttttgcagtaacgaaataaggcttgagacctcccgatctagtaagtttcttctaaacttgaagttctaactctctacccacccacctgccagcccctcgtcaacaatcagctcttttatagttgcattccttgtcttaaccactggtaagaaagggaagaccaatccatagagaatcaccaagccaaacatcttcccgaaaacaaatactatctcctcttccaattatgaagtgtactagtccaagatattcatcatacagatatgaaatatccctccacgggcctttaggagatagacgacattcgtatttagtgtcccaaaaacttatcaaccttaccatatcgacttaccaccaccttgtgccatagtgaatttggctctaaaggaaatctccacagccatttcataagcatacctttatttctcatctccaatctcccaatacccaatcttccctatcttgtggcctgaaaacctcatcccaagccactaaatgttcaccacttgctaacttgctaccttctcaaacgaaatctcccatcatcttctttaatgctttagttactgcatttggcgctttaaataaggatagaaaataaatggggatagaagataagactgactaaataagaatcaacctaccccctttagataaaaagatacatttcaatccatcgagtcttttagcacatttattcagcattggttccaaaaactccattttctaggcgaacccccaaagagcatacctaaatattgcattggccatcttcctacttcacacccaatcctaaacacaagccttgacactttcctcccatccatacatattcccagcaattgacttttactcatattaacattaagtccagagatagcacaaaaggcttccactaaccgcaccaacttctgcaatgaggttctcatcattaacaaagaataaggtatcatctacaaaatgaagatggctaacttgaactttcttttttcctaccacaaatccaaaagatattgcctgaattgacagccttatccagcatcctcccaagcacatccgcaaccaaagtaaacagaaaagaagaaagtggatcaccttttatctaaggccccaagaaccacttaacttccccctcatcttccgtctctttgcaagtctgatgttgaagcttcagttgttcttcaactaacagagctttggaaaccacattggtaagtgtcctaggcttatattcaaccaccttcttcaccatctccctcggaagatttccagagaaaatatcccgaagaatgtgcctggaatacccactagttgtgttgcaatgtgattgaaccgattcttaaactccaccaagcttgtatatctgagagccataaaccagccaaatggcttgtcctcgattaacttcagcaattgaaaagcatgattcgaaactccaaccaaagcttgatcagatcttgctcctctaccatatgaaaccatagcctagcaacacccactaaacattcttgagcaaccagtatcttttctttctcaagaatccgattaacacggaaatagtcttcgatgcaatggacccaaccaaacagagcctctccgtcaaataacgataaagaatgaagagaaataatatttttattatatttcttttctgtgttatttgtacaacctagagctcatcttatatagagtatttacaaatcaaataaa

SEQ ID NO: 110946 - DNA, 4688 bp, Cannabis sativa
ggcggagggtatcagccgcagcctttgtcgcagcatcagcagcagcaacagcaacatcaggagcttgtgagccagtacaagactgcgattgcagagctgactttcaattcaaagcccataattaccaatctgactataatcgcgggagagaatctccatgctgccaaggcaattgctgggactgtatgccacaacattctcgaggtgaatccagctctacactgttgttggtgttttgttgtgttgatttctttgattgtacaatagatatggaaatgaaggaaaccaaagaaaaagtagtggtagtgtgaaaagggtagtttttatttatgatgcgtgtcttatgcccccataatatagtcaacaaaagtagtagtcttgtacatgtttaagctcaaattaatggaatctatcttggatgtgaagtgcttgttttggtttctgaatcaacttactctgaccggaagtttttacagtcttggtgcaagcaagaaaccaaatctttgttaattgcaattgaattgattgagagatgacgacgaagcaatgctaatttaattggttttttcagggtatatattaaatagttgcataaccggttccatctcataaccatgtgagtccattgtactcatatttgtcctgcaaatagtttgcaagaagtttttcagcaattctagagctgttttcttttctctctgcttgaaggcgattttcttgttgtatgggatcatagaacttgggttgtagcacgtctagagctgaaaaatctattatttggctttgaatcccattgtgataataaaagatcaaactttaccaggaggtagaactattgctgtcatgggcaagacctgactttgttatatagtaggctttggatttcgataaaatgctgttagactttaatattctattacctcaagagaccaacatgcatgtctgagctctacagcttgtctgacctcagatggtgtaacattttctttccaaaaacctttatgttggctctgcaaatgcaactaaactgctgggctgatgggtatttgcttgtgtgctgtcaatatagaagattacgacatgttacatctattatcttaatgccacggcaatcgagtggcaatgcttctttttttcatggagcacttcatcatttttttctgtacatgtttggctttagtcttttagcaccttaaatttttgttagtgctttcttaagtaacaagaatgaaggtcactcccgaaagctttatctgcaaaacaatttgctaaagatcttcccttttctgttttctcttggttctggtgtaagcccatttgcttattttttaagaaaggttggtatatatacacatatctaatttggagaagtaatgtgcaggtcccgagtgatcaaaagctaccatcgctttatcttttagacagtatcgtaaagaatattgggagggactacataaaaaactttgctgcgagattacctgaggttagttttcttctctgcttgtactatttgatttttcatagcatttaagttagttattcattatataaataaataattctgaataaataatattaaaacaaatttcttattgacactgagcaatgtaagtcataattttactaattgtgattaagaatcggtatgcacagctttgttttgtgtttattactcatccattaattccttccctaccaaataaacaaccttccctcttatgtatttctggctaacccatctgctgctgctatagctccacttttactgtaatcactctagttttcattttccccttttcaacgcgtttctaggtattcatcaaggcatacaggcaggttgatcctcctgtacatacgagcatgcgacatctttttggaacatggaaaggagttttcccttctcacacacttcagatgattgagaaagaacttggttttgttcctgcagcaaatggttcgtctacagctaatacaacatctaggcctgattcacaatcaaatcgtccactgcataatagtattcatgtcaatcccaaatacttggaagggcagcgtcttcagcagcttaatagggtaagtagttttgatgtcattggtgttttactcatggaattatgatattgaggttctatacttctatctaatgtgtatctctttgttgcattatcatattttccatcactttttaatttactggtgtcgttgtgaagttactatatcttattagcatgctgtgaataatatgaatgcttagaacagcccaatatgatgtgcttttcagacctcataacttttagttttagtatgagtgcaactttcaacttatcaaaaataaacttcctgttttcttgcaaatagaaattttagttttgatgatctgctaattttcttattactaccttgtacgtatgttgattctgtaataagataaacaatcatttaagagacatacaacatataaattttcagaaatatgacttttataatcttgctaataaggaaaagatagcagttttgtggctcattggatgcttatttaggaccttgcataatcaatattgtgcttatccaccgacaatcaaattgattattgagaatgatgggatataggagcgagcaataacataaaatgtatatatatgtataaactaataatggatgttaattttgaaggagattttcagtttgtttttttgtttaatgaaggcaaaaggactggctactgatgtatctgggtctattgcaaactcagttgaggatgtagagaacatggacagagcaacaaatatcaatactggacgagcatgggctgatccgtcttctaaattgaacgtatgtcatgtgaagcatttgacccagtttatttatctagttagtgctattgagatttgatgtaaacttgcaaaatttgcagcgttcacaaagaggtacatccagtgagggtattcatgagaagagtactgctggagagtatgcagactatgactacagctctgattttccaaggaattcaggcttcgggattggaagaggtggtgtaagagtttctgagtcagaacatgataaactttggcatggagatggtggcaactttgctgaatcagtatctggtcaaagaaatagtttcagtattaagcatggatttccaaattatccagctcctaaatctacaaatgttgtcaacactagtcttcagtcagcacaaaacgttacaagtagaagcagtggtggggtgtctagcagcagctggaaaaattctgaggaagaagaattcatgtgggatggtatgaactctagatcgtcagaccacggtgcatcggtcatatctagtaaattgagaaaagatcgttcagcttctgatgattcagacaaatctgtaagttttctttgattacgccctgacatgagattctagataccttactgagaattttattaatgttctttatgggatttactctattttcaaaaaattgtttttttactatccaaattatcctaagtgcgcacattttttttttcatgaatttgcttctagtaatgttgacctcgcatgtgcaggggtttgaagatcacgttaaaccacaaagtttacatgattatacaccaaggggtgataaagaggcttctgttgattcactttctgttgaacataaagatctacctggtcttgggcatcggatatcatctccgtggttgttgcaggaaccccagttgactgatgggttgccccgtcctgtaaattcaagcattggcttcacaacaaatgctgttttagggtcttctggggcacttacacaacaacggtttcaatctttaaagtctgggcagtcatcattgagacagcggccaccctcacctacattaactgcacgccatcctcttctttcatcgcaaaattcaacagatcatgaacgtgtgaaggcacattctcttagtcatgctgagtctaaagtattttcagggcagttgaatctgggggtgcctaacatacatactcaggattcattgcccatctcatcctcccatgttcgacagggaaaaatggcaaaatcactgccccatgatgtacaagcttcttctccttcagttcccacttttccgctgaggcatgcttccttttcacagcaagcagaagattctacagagtctgatcctttaggtctaattcagaaaacttctctacctcaggtttctgtttcagggattctgtcaacaaacagtaggtctgcatcagagcactctcctcttactgtagaaactttaggagactcaagcacagctagtctactggctgctgttatgaaatctggaattctttctaagagttcaattaccaatagtagtctacctaacctgaactttccagactcagggcagttgccatcacagtcaagtcagcctcctcttcccagtggacgtactcctactcaggtcatgaactcagggtctagggctacatcgacatcttcatcaggtcattcctcctatgatggcttgtcagcatcctctaagatacctaaaaagaaggtagagcagccgtcaaatcaacctgctcgaccactatcttcgtctcctgcaggtggtgcatcagaaaatgtttcgaatgttgcaaagaaagtctctgatccaatatctaacctccttagctcgttagttgctaagggtttgatatctgcatcaaagac

SEQ ID NO: 110947 - DNA, 7741 bp, Cannabis sativa
  modified_base (7673)..(7690): a, c, t, g, unknown or other
atccagacttctaacatgcccaaataatggattggacaaattaacctgtctaatctaatccagtcctacgtaccaaacgggcccataaattagcttggatgaggatttctaataataatttagacatctaataaaattatatatatttatatttggtctaaaaatatttattttataaaaaaaaataaaaataaaatttaatatcatcttaaataaaagttaatagtagtataaaattctatatttgtaatttctaaaaaaaaaaaaatttacggtataaatacttaagtttaactttcggttacaaaaaaatacatacttaagtttaatttttagtcgtaataatacccaatttataattataaaatttttgtaaatacctaaatgttaagtgttaagtaaattaccacgtggcaatccctaattggtgtaggtcattaaatttttattttttatttttaaaaaattagttacaatatactaataagaaaaaaagtaatttgtggcataaatacttaaatttaacttctggttacaaataaatacctaaatttaattttcggcagtaataatatctaaaatatattttctaaaatttctatagatacatgactgttaagtgttaaataaattgacatataataatccttaattaatttaggtcattaaatttttattttttttttaaaaaaaatagtttgaatatactaataagaaaataacacgtggataataacttcacatttaaccgtcagatatctactgaagttttaaaaatataacttagatattattaattataaaaattaaacttaattatttatttgtaattggaagttaaacttaaacatttatgtcataaattactcataaaaaaataacatatgaataatgattttgtatttgatagccaggtagctgtagagttctaaaaatacaacttaaatattattatgacaaaaaattaaacttaaaagtatttaaatacaattaggtgttaaagtatttattccacaaattagttaagtgaaaaatattaattgggttgagtggggtgggcttttggttgattggaccgaaacgaaggagaggaaaagagtgtattagccattatgcatagcagctcagtcttctcctctcttcctcctcctaagctacgactcaccgcactctactcggctccaaccaccgattccaattccaattccatggctgctgcttctccgaagtgggcccagaagaccataactctgcctcctctccgccgtggctgtcacctcatcacccctaaggtatctattctatgttcttgtgtatgtaatcatgatgattatcttacttacttactcctttcccccttgtttctcagattaccaaagaattaggtgatgacttatcccagttcaattgtggtttggctcatctattctgtaagttcaatttttgggttttctttcatctttccttttcttctgattatatgtatatgtgtgtgtacttattgttgggtgggtactatactacagtgcagcacacaagtgcttctctgaccattaacgagaactacgatactgatgttagggatgacactgagacattccttaacaacatagtccctgaggtgagccttctcttttcttctctttcctcaaatataattcaatctcactttttttttgtcaattttcttttcagggaaattcagctccttggaagcatacactggaaggtcaatcaatactctcatgagtctgtctcaactctttatgtaaactttgattataatgttaaaatgttgaaattgctatgtttcttaggcccggatgacatgcctgctcacattaagtcttccatgtttggttgtcaactaacgtatgggacattcttctcttgttcttatgattattactatcattccatctccatttccattggctattgctaatcctatgatatttttttatttggcaggatcccaattaccaacggcaagtttaacatgggaacttggcaggtataaatttttaccttcttaatctcatgtatatgcaaagtaataaatgttgttggacaagtgttttgatttaaaatcttatgttgataatatcaactcattctaactcaattactgaatgcaacaacatctgttataaacataattctgctatgtatttgcacacagtggagggcatttttgagcaatcgtgttgatcttactggccagattttattgtatggggtacatcctgtaccttccaaagatgaatcttgaatcaaatcaaatctgaaaacacaaataaagttctaacctttcaagaagtttggatctctcccaactagagctattgctttctcaaaaatctacacgaaattctcactggttccctctaattagaagatatgactgacctttgtatagacttatcacctaataagtaaagaaataatagaattataactaattagaatcacaaccacccaataggaacataagatattgcacctgagtatgttaggcgtgttaagcatatatgagggtagctaagtaatatatggtttcctcttgtagtttgaggttcgagtcaccctaatacactacttgaaagaattagaacataggcatttcattgatatcaaagagaaaattatgaggttccaaactcttcaaaacagtttggtgtctccccaaaaagtaatttactttctttaatacataaattctcactgatacctcttgtaagataggactagcctttagatagattcagccactaacaaaaaagcaatcacagtattctaactaactaattaacaaaacaatcgacctcataggaactaagctgagctaattaacaattgacctttatatagattgtttgcattattgatattgtcgttgttggtagtgtggatttgagatatctacataatgtttttaatgtatagaaaaaatagactttagaatgtattagggtgggctatagtgtcagggaatgccgacagttttaaacattcaggagtaggcatacctgactattttccaccaacgcctattccactcaattttgtgacggtcgaataggcgtcggtcgaagagaccgacggtaataccatacccgactcttaaaaacagtcggagaatccccttattttagtagtgttggaaactcaaaaattgggtgggtcagagctaagctctttgttcttggctgatccactctcttccctttgcttcgcaagaactcgactcgatctaagtaagtcatcaattcttcgcaaaactggcgcacttcatccctgaactcccgcacttcatccttaattgtgccaattatggtgtcaatagtctcctctatttccggcagatcctccgaccattcttggtcattttttcatgctttctttggtgccatttctatcctcctagttgtctgctctgacaccattttatatgctattgttctagtttagttcttgaaagaagtatatagaagtgaaaattacaaggttctaaactttgacacctcttgtaagagaggactagcctttataaagacttaaccactaactaaaaagcaataaaagtattctaactaactaactaacaaacaaaacaactgaccctacaggaactaagttgacaagcttttgaaattcacaaaacaaacactttcttggagaaatcctatgatcttctagagctataaaataattcctttttaaagtataggtactgttactaagtctaaccaatagaactagaacttttaaatcatcattcggagcccaacaacgcagttgtacaaagcactcaacaacacattgtttgttgtgtggcgacgcattgcctggaaggtgacatgtcgccctacaacagacaccatattgccatacaacagaccaacgcgttgcctgttgtataatcaccaggcctaagttttgcgtgtaacgcgtcatctcccagggtgatgtgtcatctctgggcttatccaacttgtcaaaatgtcaccatacacaacgttaactgttctaatatttgtttaatcaactattcccaaatttttaaggtatgctttgatacctctttcgattacttttgacccaaaatatgatttttaaatgcttacaagtctagttcaaatttcacatcctctattatgggacatcattaagggtttttgttaggcgtaaggataaataaaaagggtatatgggtcattgtaatgggagtattgagatagtatatatataagagtattagaagggttttgaaggagaggattatatggttaagtgagcaatagctcttgggagagcactgttatcctcatcatttattcaatataccattcactgttttcctataattgcttcttttcttactaaattgataagaaatttcaatcagttttacaccatattgtgtaagaccaatttaggctttgtttttaacaaatcctattatcctagcatattgtagagttatgcaggaatccagtttaattttcaattgaatgcttcttcttttgtaacgaaaatgactggaaccatacaatttctttaaaatgaaaaaccatcttaatattaaaggaaaaaaatttacatggcaaaaatgcaaaccatcttcaactattggctgccaatctactgaggtatataatataatacatgttctgacaattgactaccaatctgttatctgaattcaacattctaaataatagggcttatctaatattagctgcatttcttgttttttctcgtctttcttcatattagttctattgttattattattgctatcggtgtttcagggaatatggctgtgcgagcaccgtgactaccctaccgcgcgcaaagtggtggtaaccctgaatggaatatgagaatctgtgacttgtttgttttcttataaaactagtatttgttcaatgttaatgtgccattattgctctaccctcttatattaccaccaaaaagtgagaactcttatttataagcatgagaattacaaagagtgtagctgaaaaagctccactgctttaatttaacagactttattacatttattaccgcaacaaaatttaactgaaacaaaaactgcaactaatcagctaaccgagttaattatattttacacattagcatctatgtgcaagtgggtgatccagtgctaaagcatctgtaatggtatgtagctaaaaggttaaaatagaaaattatttttattgttgttgattattgtaataatatattataatttaaatttgtcaaatataaattaattttataaaataaaaaaaaataatagtaattttaattaaagtactattaaaaaaatttagtaaaaaagtaaggagcgttttacatttacatttagagaattctatctattttttattatagcgagttattttttgaatggttggaggttttttttttaagtcatactctttattttagttaaataataaagaaacttaacaagctaaaccaaaaaggtaaaaatcagagagaaaactcaaagtgagagaatttagctgaaaagtttgactcgaaaaagagcacaattcatttatttatattcagaaattacaaggcaaaaatagaaagttagttaagaaaactaactggattaactaactaatcttaagaaactaaaacaagtaaaatgttagttaatatcccccctcaaacgaaaaggggtagcaaccattttagtttgccttttagatacaaaaatcgatctgtggagagaggttttgtaagagaatcaacaacttgatcaactgttgggacatatttggcagataactccttggccctaatttgatcccaaagtgtagatcgatttctatgtgctttgatcgagcatagaagattggattagctgtaagtgctgatgctcctgggttgtcaacccagataactggtgtgtgaactggtgtgatgtgtagttcagataacaaattaactagccatctgatttctgcaacagtgttggctagacttcgaaattcactctcagtgctggacctagcaacaacattttgctttttagcagaccaagaaaccagattacctccaagaaaaatcacataacccccagtagatctctgatcatctatacagctggcccaatctgcatcagagtatgtacaaatatccattgaagctgctggtatgagaagtaagccatgcgaaatagtgcttttcagatatcgaaataggcgtttgcaggctttccaatgtgtgatagttggggcatgaataaactgactaagtttattgataataaatgcaacatctggtcgtgttaatgtgaggtactgcaaagcaccaagtgtgcttcgataaagagtgatgtactgaaatggttccccatcggataaggacaatttctgagtagagctggtgggactggggcagcttttgacaccatctagctgaagtcgaacaagcaaagcagtgacatatttgctttgagaaagatacatacccgcaacatctctatagatctctataccaaggaagtagtgtataggacctaaatcctttaaggcaaacgaagcatttagatcagctattaattttgaaatcaactctgagttaggtccagtaactagtatgtcatcgatatagactaggaggattattaaatcagattctgagccatagacaaatagagaagtatctgatcttgaagctcgaaaaccccactgcaagagtgtttgccttagtttctcattccagctcgtggagcttgttttaatccatagagagctttatgcaattgacaaacatgagtcggtttgtttggatcctcaaagcctctaggttgcctcatgtagactgtttcttgcaaatcaccatttaaaaaagcattgctaacatccaattacttaacaggccaagatgaagtgacagctaagattagaacagttctaacagtgaccgattttaggactgaacaattcgagcgggttcgaccgaaacccgagcaacctgcctgaacccgaactggtgaacccacaatttttttttaaaaaaaaatgttcgagcgggtcgggttcagcccagtaccctttgggtgggttcgcgggttgagtttttaggagtatcgagtttcgggttgaacctgaacccacctgccaacccgcatatttaatatattatatatttttttatttttttattacattatatatatatcaattaaaaaataaaaagaaataaaaataaaaaaccctaaaattgttatattatatatgtttaatttaataaataaaaaaataaaagaaataattatttgaataaaaaattaattttttaaaagagttgactgagctgaccgagttgatctggtcaaaccgtcaacccagtcaatctggccaaccgaaacctgctaatttgccaactcgtgccctatccgagttcgagttcaggttcgagttcggtttcatttttttcaacccaaaatcaagtaaactcatccgatgttcatccctagttagttatacttttcgattatggttgttatatttctattatgacagatgtactttagttagttcatttttcttattgtatacattttaatgaagattattttccccattctgttcatcttttcaacaatatctacaccatatcatatatatatatatactagnnnnnnnnnnnnnnnnnngccacgtaaatattagttttatgtaagtttttgatttgagattttgaattg

SEQ ID NO: 110948 - DNA, 3230 bp, Cannabis sativa
  modified_base (3168)..(3198): a, c, t, g, unknown or other
tttctaaataagggcccaaaataatttttttttctatggcccactaaatgcatatatatatatatatatataacataataataaatgatattaatatatttttctaacaaccaaaaggccgcatatggtagcagctggtttgataattaaatctaataattatacccaagtcatcaagtgacactccatggagtacaaaatcaatgagcaacgtgcactacaaacatatctgtacattaattacttttacttaattagatatattagaattgaacatgttatatattgcgaaaatactaaaaaataaaatataagtcttacaaaagataagagtagacgtacagtaccaaattattaattaaattacaacataacgaagtaatataattcacacacacacacacttgctggatcatgatcatagatttcatatttggtaaaacaacttctcaaaggttttcatgtgttgtggttggagagctatgcccactaataaactcccatcattatttggacaaggtataacatatgattttccctcgtacataaacccaccaggtccaatataaatagccctaccccatccaaaatcaacttcatcatagttaatcaacctaacccaacttgtaatcccaagatttgggcacacataagtgtttgtcttacgcctaatagaggacacattagcttgttgaagctccaaacactcaatatttgatcttaagtaatcattgtccattttttccaattctctatgaacataactcacaacataagatagtgattttgttttgagatcacctaccttaatcattggtgtagctgcaaaaatcacattaccaaaataaccaagtggaagttggggtgtcaatctgttggagaatcttccattcactggaaagtatagagttgactcttcatcatcggactgctcacgtgcttggcaaatacatctccaaatatgtgatgctaagctctcaaatgagctgaaattcttattattgttattgtcttctttggctttggcttttaaggtgtttaattgctccttgttgatattaaaaatggcaacttttgtctcattatttttgctattattgttttgttgttgaccatcaagattattattattattatgatcagctggcttacatgactgatccaatattgggttttgatcatgatcaggtttaagtagagttcgatctaaaaatggtgggatggtaatttcaagaccacgagcaattctctagaccatgattcaataaagtgaaaagctgaaattccatctacaataaaatggtgaatagcaatgcccactgatactccaccacacttgaaataagttacctaaaagaagatttaaacaaattaaaaaagataaatcaatcttatcactactatatttatatatgtatatgtatttaaaaaatttctttttttttttttttggaattttcaagacatatatccccaaactttgacatatgtattttatattgtgctttccaaactttcctttatatgtcaaataattactaaattagtgaaaacttttaatcacactaaattgtgatttattttattaatatatatttttagtcaacaatatatataagaatattaatttataaataggagaatttaaaaaaaatacttttcttttatacgtttgtaaagttttaaaattacaaaaatacattttatttagcaaaaagtaactaaaaaataacaagaaattaatctgaaccaaaaaataacctcataacaattaaaatacaactataattataaataaaaaagttcaaagaataaaaataaaaaaaaaaaattgtaagtaaacatttttttggtaatttttttgcaaacgttaattagtctattatgtaaattttttttataaatagtgttacaagtttttacttttttttttttttaaggaaggtttttacttttaatcataacgaatttgtaattaaaagtaagattttgtgtactgtactcattggtaaatctcaatggattaagtattacaatcttaaaacattctgaaaaattaaagataatattagtagttggtatatgtcaaaattcaccggaggtaacctaatttagcctataatttaagtgacagaacattttccgtaatgaaattaatcttgggaagaaaaaaagcaatctttttatataatttagcaacagtgtactacataagtaaatatagtacgtgatatcatatgcatgcatattatatatatacctgaactagaagaaatggataagaagaggttccaagagaataatccaccgttggagtcagactccgaagtattggcgtgggagcgaaatctccgaagtcatcgatgacagcggtggtctccgccgtgacaaagaggacaccttcttcgttgcaatcaatttcagtccggccgctatggtccactccaaagcggccggcaatgggataaaaggggacaagaaccttactaaggctttgtttgagaatattagcatcaaaaaaattgttattattattattattattatttgatgatctgaagaaatagaccactggattatgaattgggttctccatcaagtccaacatcgacagccaaagccgccgatgaggagttttctccgatggcttcaccatactcctctctttttcctttattatcaccatcttctctctgtcttaagtatgacacttcactatatttcatttcaattttataatgaaatgttaaggttatgtttggtaggaaggagaaagtcccatattatatggagaattaaaaagaagaaatattagtattgtgttgtatatttaaaattattattttattatttttaatatggttttattatattatttttttgtaaactgataaaaactttaagggtacattgcttaaatatttaaaataattgaaataaggagagttctatttgcaaattgaaaaccataaaataataaatacacctaattattaaaaaaatatataaacttaaataattttaaaaaaaattcttttaatatttttataaattttttctcatattattttatgttaatttcatatttattttgattttattttcataattttttctaactcgggtatatttcttttattttcttaagaaaatttcatataatttttnnnnnnnnnnnnnnnnnnnnnnnnnnnnnnntataatttatttttgtttgatagatatatttt

SEQ ID NO: 110949 - DNA, 5473 bp, Cannabis sativa
ttttatttattttttaatattttaaattgatttataaataaaaaataaaaattaaataatttgaccaattatagagtaatacgtggttagtgacgtgacaattaacggtcaaatatctaaattctaagactgtaacaaaatgtatttttatccccaaatgttttacttaattattaatctaagcagtttcttatcacgaaagaaaacagcatatttagattatggaaagaaaatctccaatcaatgaaccaatcaatatgctggtgcattattattgcatttacttaataaaataaataaaatttctgaaaatataaactatatatatttttgaaaggatgacaacatatataaaaaagggtaattatgaattggtacatgtacattattagaaaaataatgagtattttttattaactaggaaaataatgaattggttatgtaataatgtttttttttttaacagagagaaattcaaccatataaatatatataaataaatgtaagatgataaaaaaaagtttctaaaaaaatttaaataaagtaaagaagaagaaaaaggggaaaagagaaagaatgaaactctgtgcctatgccatatcagtaagcccaacactctcacccacacagtcacaactccaccttcaaccgtcgctactgcctcaattcactctcattctctcttcttcatttactgctcaactttcaggctcctactccttcactgttaccgccaccaactctcgcccatcgacatcaactcactccctccattaccatctcattcacaagaatcaaaccatcaacaaggaaaaagaagacaaccaaaatgggcaactgtggtactagagaggaatctgcagtggtaaccaatgctcaaggtcttcttttctaatcctttctcccatttctcagatctaatctttctacattgctctagtactcttcatttcatttctttttcggttttcttcttcattttcccgggaaattttactctttttatttttagttttttttaggacattttttttttctatacccgcactgaaatcccaattgaaaaataaatgtaagagcaatgtaactattttttttttttgttttgcgcatgcatgattcatctttggaaattgaaattaatatggtaataattcacattagggtttttctgttctttgttcaatgaatgtattttttttgggtgggtcaattgcgcagtccaacagctgaacttgatatcgtctttgcctgttaaaaatggtgagaagaagcaaaatcatcatcgttccatatcagatctgagcgatccctcaacgccacgaaactttgaggattcgagaaagaacgccatgctttacacccatgtcatctcctttaccctcttcgagcttgagaccatcacaaagagcttccgctccgattacatcctcggtgagggaggctttggaactgtctataaaggatacattgacgaaaatgtcagggttggcctcaaatcgctcccagtcgctgtcaaagtacttaataaggagggtcttcagggtcatcgagagtggcttgtatgctccttcccatactgagtcatgggcattttttattatttatttatttttgtatctaaatctctaacttgttacttttcttcaatttcgtactttcagactgaagtgaactttctgggacagcttagacatcctaatctggttaagttgattggatattgttgcgaggacgatcataggttacttgtatatgagttcatgtttcgcggaagccttgagaatcacctttttaggagtatgagcatctctatcttgactttttataatgtctaatgataattcttttacaagacatgcacaatcatttccttttctttttcgatgcatgcatatcagcattgtgagataatattaaccgaacggcatttttatgatatttgacccaattattggttcaatctttaagcctacccctcccactgacatgttctaggctcttagctcaatgtatccaatttatagggagtccactttcattttcctgtattaacttgtttgcaagtaactttattgatatccttttgactagtgtttgcaattttaactgttgaaattaacattagcaatggtcattaggagctctcgtgtttatgggaacttatcgtttaaaatttattaccttatgaaatatagcatttttgcttgttgcttggtaattatcttcttagttttcagtgggcctcttctcctcgttttcatttttgttaaagagatggtattctgcttggtatccagctacgtaagttttctacattcccgtaaattattgacctcacgttttaattatcttgtagaagcatctattccatttttgtggggaacaagaatggccattgctttgggagctgcaaaggggcttgctttccttcacaatgcagaaaggccagttatttatcgagactttaaaacctctaatatattattggattcagtaagtgatgttctaaagcttataatgatggtacaagttcatattgattactcttggtggtagaatgatactgacttcttttttttatccacattgccttttaatttgcaggattatacagccaagctctctgattttggtcttgctaaagctggacctcagggtgatgaaactcatgtctcgacccgggtaatgggcacctatggttatgcagctcctgaatatgtcatgactggtatgagttgcccgtgtgtgcttttggataatcaaatagaactaggctgcagttactttctttgttttttactaacaaatgaaaaagaaatagaaaagctcttttgactgtatatacatttttggattgtctttttcaagtgttttttttatacaagtgttgatatggtttactgaccactagatactccatggtgtattattaagttgtcttcactttcaaaagtttctatatttagatcctcttccattgacaattttcttcttattttaattttctgttaaccatggaggttttatttgttttgttttgtttatttttcttggattcttaagtatgataggatattagagtttgatgtacatgttttaatgttcctcagtcttttctcattattatttatttttgatgtattattattattattattattattattatttaacgatgacaaccttttatgtgcttttgcattagaaaagccttttggctttatgtgcatattgtcttaaaataagggtctataaaaggcagataattgatatagatataactttctgcagtataaaatacgcatgatgtgtagaagtaatgtgtttttcactcctgttttgggatctctgtttgaatttcggagtgaatggtgaataagttatgtgtatgcaaacaaatatatgtgatgcatgtgctttgtatgagttggagttgaattgaaagctctgagactagagtacatacagctaacaactgatttccattgtttttctttccagaattcatattgagtttgttgattttctgaatgagatctatataaaatgagcaggccacttgactgcaaggagcgatgtttacagctttggagttgttcttttggagcttttaactggaaggaggtctgtcgacaagacaagaccaagtaaagagcaaaacttggttgagtgggctaggcctaaactgaacgacaagagaaagttgcttcaaataattgatcccaggttggaaaatcaatattcagtgagagcagctcagaaggcttgcagtttggcatactattgtctgagccaaaatcccaaagcaaggcccttaatgagcgatgttgttgaaacattggaacctttgcaaagtggcaacgatggaaatgaagtgtcatcatcattttcaatcggcaatgctggtccatttgccagaatcccagattatcggatgcgtcagaggtttacaaataatgttggccctggctcaaattgccgatctcctaacccaaattgttctccgggaggtcctgcagcatgcagagttcgatgagaaatgtcattattcgtgtgtatacatgtttggtgtgtttttttccccacccttttatgaaatggaaatatttgcttgttacatggctgcacatgcatcttttgtcacatgtacatgatctcattgtgattccaaacctgtgttaattattacattgttcttgtatttattttctggtcctgctcgtataattgggagttgctcagttttggatttgccaagcagattaaaagtgatcgagtcagcttttcccctaccccacgtccttgtttattttgtttcataatttcgttccactgtcgatagcacgggttttctggtcagcaagaaagatgattaggttgaagctatgttggagaggtctatgattaggtaggtgggggtataattttcatttagattttgaggcagagtcaatcttaataattgttgggatagtgctgcgcatgtaagagtgtacaagaagtctccttttcggttctttattgcaattgaatcaatggcttaatctcacatcaaataaagaatcaatggttctacggtagttctatgatggccaaagaaaagtttgcatatgttgaaacatgttagagcagattgtcatcaatttctgttatttttaaagtggttcatgatattaatgcttcacgcaatcgagtacttgaaaagttgctgattggatttttttgttttgttaaataataataatttacatcttgtatattttaaaacagtataaaatagtatccgttgctttgatgttgattatattaaaaaacattgggactttttcaataatacaatattagttaaagttctaattacttttacagtaacttggtttttgatgcaaaaatgcataaattacaagtgttaaattcaaattttctctccactccatatttctttgactaaatagtatagaaattcggcaacctccatcattacgacagttgaaatttggcggccccaatcttcaacaattaaatttccaaattcaaagaaaaacaaatgatgaaaaataaattcagagcaatggcctatttcagatattcaatcaacgataaaactaacctacaccttcactaacggagtatcaaacgagaccaatgaatggctagagaccaccttcactgagtatcaactcaaaggaagaaaaatgtagaggaatcgaaggactgaatcgtgggggcaagagcaatgaatatggaaagtctcagaagaaagaaaaaagttaaagtattttttattttcttttttgaaaaaaagaaggaagctgtaattttattttttttatttttaggaaggaaacttaaaaatgaatttaaggccttttacaaaattttaaggaataattatataaggtactatttttttgtaaaataattatatttttacgttcaaagaatgtttttcacatttttacggttttct

SEQ ID NO: 110950 - DNA, 2201 bp, Cannabis sativa
ctgagactcgaacccagggactcgattgcttggtagttggaaatgcatgtatatattcttataattttattattattattattattatattacacgactaaacattaacattttaaatattttggaggctgttctaattttaaaaattagatcctcacgaaaaaagtataattataaataatattttcaaatattatcatgttacgaatatatttaacaaaattaagcaccaaaacattcaaactaatttattaaaattgttattaatttataaaatatatcttttgagcgaaatataatatgaacatgaactcttgacaaatatcaaatagttttttcagcaattattaatattaacgatactatacttcaatttatttttttaaaaaaattgaaaattaaaaatatgtaatttacaatagcacaaatgattaatttttttcactcataaacaattttgatttttgatatttgagaaaaactagataaaaatatatgtacatatatataagatgatgaaaaaaataacggtttgacataataataaaaaatctgattaaataaagaaaatatttagttaattttttattaaatgcaacagaaggtttgacagaaataaataacaataatagaggtgtattttttaaattgggattgataaaagaataggttagaaaaaaattaaaaggcgttataaaaactaaaaaatacaacattttcaaataaaaacaaaaacacaacaaaattcagatggatctttttattattttggactctctgcaattgatctggttgcacacattataaattaatactgcgactaaacattttttttaggagttttattagactaaattaactttatattaatgctacacaaaaaaattattttaaaaaataatataacaaaaacaatatatatagttattaaaaaataagaagattttttcttagttcaatctttaattagatttagaagtacatacgttaatgttattaactaaagttctccttgggtttgttatttagtgtttttgtttgctcaagagggattgttttgtctttacacaaaaacctatttagagatggatgaatgatgatgttaggactccttattgaaagctaattataatgcttatcctagttacacgccaaagacattgtttacactattaaggaaaacatgaaaaacatgttaagtggacataatacattggatttctatttttgagtagagtaatgatacattcactcaaaattttgatacacacttaagtttaatatgaatttcaatcacttgtttttatttaggatggatcccacttatgggaagatgcaggtttgtccctgagagggcggtgcactcctgagtcgttttatctcctattttgaatggttctcgtttggtagtgtgttttgtcttttgatcattttgtttaaatgtttgagattttttctttgtgcaagtcaacttgagtgtttttctctttttgttttccttttcattgtaataatggtgtttagcacctttgtccattatgatgttagttttggttgtttgtaatcggcttaattattagtttggtcgttgttgggtcatctccttttgagatctgtgtggctttgctttcgtttaatctcttgaatttctcccgtcataccgttgaatgatatttctctttaaaatataaaaaataaaacaaaaaagatggattccacttataaaaaattgacctattatataagtatgtattacatttgtgtgttatttatatatatgcacatattcttattgattttaagaaaataccctaagagcatctacaacactaaagcaaaataccttaaaaaatttataagtggtcttaaataactacaacatacgtaattataaaaaaaatattagaataaaaaactttttttaaaatgctaaaatagttaggataatctaccaaaacactcagtaagtgtaaaaaattctattaatatatattgataatttgatatgtagtttactaaattaaacaagttttaatttatttttgtattaaatttatttaaatgatttcataaattaatattcatttgaattattgtgtatgtttttaaaataaaaaagagatatttgcggcataaatacttaagttttatgccgagtagcagataaatacttaagtcctatttttggcggtaaaaatacc

SEQ ID NO: 110951 - DNA, 7608 bp, Cannabis sativa
  modified_base (7213)..(7217): a, c, t, g, unknown or other
  modified_base (7575)..(7582): a, c, t, g, unknown or other
ttaggaaaaattcaaaccgcgaccgcactacaaagaatttcaaaccgcatttattttgcgatgcgagcggtttgagcagtttgatgaacgtccctactaacaacaattagtaatgcaacttcacaataatttccataaaacaaaacacaaattgttgaccatatactaccccctttctatattacattactaatagaaatcatgacgcacctaactggttaaacattttctccaaatatgcacgcaacgtgtggaagatgatggatagtagagcttgtatatgtgtgatgtccattgcaaggttcaaaccaaagagttgatccacagtctgcaaattgaatttaaaagcaatgataacaaacaaggaaagaaaactggtcctaggcttgttatttgaaaatcaatacgagttagcataaaataatcaacatatttgaaaacacacacacatacacagaattatccaaattcattgtctatatgctcgcattttaatgttaatatctgttactaggggggattatgaaaattaaagaggcattttttaaggtggaagatacaacatgactgcaaagagaccacctaattttgtaatatctattcaagtcattcgcacgcaagtcatcaagcattaggaggtccatatcatgggaagcaccacgtactctgtagtggatcaaatttaacataatatatatacctcctctatgattctgaaaacttcaactatggaaggtgcttgtctttgctgcgaagaaagaggttcccaatcctgcacattcacaaatcaaaactagtttgactctcaaactacgcacacaacacatcatgtaggttaaactcttttttcccaacatcccaaccaaaattgcacattactttgtaaagattggccatcataatagaaaatttagtcttaactcttaatgtcattgttttattctacaagtcgactttttttagagcattatatttgacaagacaattttcaaaagcaaccttttaacaccatccaattagacatggaacccacctcaagatcaaatgctctcccagtccattccagtatacgtgaatgctgagcaatcacccaatcaagaatcagaggtttagcaacttctccgatctgcatcaaaaagatccaagaaaaccgctcaatttattctcataaagttatcaccaacaaaagaagttaatggttcaaaacattaaagcacatcagcatccatttttgacattttctttattggaatttgtaccaaaggtcggattgtgtgtaatgaacacagcacaagaagtcgttgaattcctttggaaagccttgtttgttatgagacctacttaatttttctagaaagaacaaaaggtcttccagattcaagctgttactacttagaacagcagaaattgcataataaattttgaagaatggtactaagtactagagttgctgagaaacaattttcaattttttttttttttttgaaactaggatccccgcctagccctaaatatttgggactaaaggtactaacagaacaagagtaaatcatttggaatatgttagactataattttgttatatgatcaagagagagaaacaatgactaccaaatgtggtggggatgcggaaactaagatggaactaacagaaatataaatcgtgaggtcaaatgcaccattgtaaaactataatactgactggataatgatgcagatcgtgataacttgctcctgaagcagtgtacaaccttgttaagtcatgatccaacaaatcagcagcgggaagcactgatttaacatcttcagagagacatgagactccgtctaggtatattttctacatattaatacaacaaattaataataatatcacacaaagataattacttctgcattgtagaaactaaccagtttttctccataaatttgatgtaattgcatggcaataatcatcccggatttaggataccaatgatgtagtacagggtagaacacattcatctctctctcaacaattaacctaagttcgttcgcaagcaaacacaatggatgctttctcttcatctttgactcaagatctatggtacttgctacctaacaaataagatagtgaaacattttagctttatcactttacttaatactaaagagcaaaaaataatggtaagaaccaggaacagtattcaccagcttgtatgcagcttcagtagacctctccacatatgacttgattattttagcagaagccttgtttgaaacattcaatgatgtgaactgcatgcatataaagttatcagaagctaatatccatcataggaggagggggcaagggaagcggtcaaaggataagcagaaaaaaaaaaaaatctgagctctaccgatgagattgtgcattgagaagtcatgcattaaccacaaatatggattaaaacagtgaagactgcaaaaaggctaaccttgatctcaccataatgatcagaatttggaattccaagtattacagccaagctcacaaccctcttaaagttaccaggttgctgaaatgcaatctcataaagttaacagtgggaatactgagattcattaaccatgtaaagagattaactaaagcaattttatattacctacctgcctgaaatgaagatgatagtcttgcaatttacaatcacaccaattgcctattatgaagaaaatagcctgtatcaagcttaactttacttccttgcgaccagattgcctagagcacaataagctttctgcataatttctctctgtatcatcctctttgactgatgcaactttctgcagctcaagagttgcatattccaagagcttagcctcgtctgtttgagtaaactgcaaatgagatgaattcattggtagatgatttccaacaggactagaacattcttttggaatttagcaagttataagatgatacaagcaagtatgaagttgaacgtataatccatagccctcttgtaaaatattaccaggctttcctttttcctcaatctaataaatctacatcttgaagactgaatacaatacaacagaaatattttttttcttttacatgatcaagcaagtaaattgccatactttaggtttgaagaattcagtttaactgttatatcaacaagcatgttccatgtataaaatgtttacctgtaagaaaaggacccatccaaatatggcattatgaattttctgagtgatgcccaatgtagaccaagtcaatttgataagtgtcaggatttcatcagcttcctaaaaggtcaagtacataaattgagcttcgtgcaaacacaatatcaatgtatcagttgttaaagattctcaattccccatcatgaagtgcatacctctacgagctggccttcgtcaagaatatcaaacacacttaaaagtagtttctcatacagtctaacattcaagtgatacccagcagtccaatagtaggtttcactttcaatgccaaattgtccaggtagagatgataacattaaagctacacgtttgatagttgatagaacctcaacacgttctgaaggagacattgtcatgtcccactcctggtttaagcaaatcggccatcaattgcacataaattaagagatagttgtggcaagagtacctaaattatactaaactacctaagatcaatttttagttgcaccgtaggtacctgctgttagatgttgatgtgacagattagtttaaaatactatttgtggcaaaatacctaagctgtgcaaaattggctatattcatttatgacctctaagttgtgctaaaagtggctatgttcatttattgtcacatcaacgtctaaaggcaaagttaacaataagtacccgcggtgtaactaaaagttaatcgtagaaactctcgtcaacaaaatataaaataaacttcgcccttaagtacaacttaggtactttcgtcgtaaatgtgcctttaataataaaaaagtaaagaaattttgtatttcatgtggacatatttctttcaaacagttacaaggatatacctcagcattcctgatctttgcaagtgaccgtttaatggttaggtgctcagacccagcaagactggcagaatcatggagaagttcttccaaaataccagcctaaaagagaagttgtgaaaattatgtcaatcatgttcattgccaacaacagcatgtgcaaggtgtctatggattagaaaaactctaaaaaattaaaattcttgtcctagggaagaccatgagcaaaattttaaaaaggaaaaaaaaacagtaatattacctgtctactcttccactgcaaataagacttctcgtgcaaaaaatcagacttgaaagtgctatttaaaagacctagtgcaatttgaggaacgtcagctttcccacaggttccccttgtggaaaattgcaacctacgcctgatgcaaacatccattgcttctgaaatctaccaaagaaaaacaatgcacacgtgaaattttatcataaaacagaaagatatctaatagccatatccctcaagtataatgaaataatgaaaagtgtgcccaaacctccaaaaagattaattttggaggctattaattctgctgtgtacataaatttaaaattggttatttcttctttctctcactgtatggaaggaaagaaaagaacaagtttttaaggaaaactactcgatctaaaaacaacatttggcaataaaacttgattcaatatgctttgtcaaaatagtatttcaaagaataaaatagctattacatgcctagtcagcacaatgcaagtgtataaaaacaacacaaagaaagaggaaacagcaacttgcctgcatctgtaagcggatggtgtggatgagctgtgagtgtctgtcaagacattgaggcattttgtccttcttattcttcaaacctaacaaaaacttaccattcttttctttctttttatgctcaactttatgtacctcaaccctacacaaagagcaggtgtaagggaataaagagcgaaataaatacactgataccacaccggaaagacagcaaacctagagagagttattacccagaagacgagattgatgcaagcaatatttcatatgctgattcccgcaagtcatcatcagacaatcctttaagaatcccaaagccatgcatcagtttactaaagatgaaagatcagcaataaaaatacaaatttaatcttttgcatatgtatcatatattgacactcacacttttggaacataaaatttccattggaaaatgaagatattaccaagaattaaacacaaatgacctatacctgtactcagattaggcaatcctaatggaggaattttcacattttctgcagtctttggctgcatattcgttgctactttatgtttaagaccgtaatcatccccaactgtcccattgtacttcccatttgaagaatccatctctttagtagaacatgaatctttttcaacggttgcttgaactttgataggaggaggtgcgcgcagaggaggagatctgacaaattctgggttggtaagtagaaaataggaactccctgattgagaatatatctgtcgaaataatgcagcacggttaaaactaaattcaatacaaggcaattaaaggactacagcgtttttacaaaaataaaacaaaaaattaatgcttcttggactatcactctgctattattgaaattttcaaacgcttcaaaagtccccattatcttttcacaaggttaatgttcctcgttcctcactacctgattttaatatcaaatttagttgaattctctttgttatatctcttcacaggcgcgagagaacatgtcaacaaaacaaagagaatcggaagtttaccatggatggatgattgagctcctccaactttttctttctagcttcagaagcatcaaccacactacctgataaacagaacatacagtagcaagtcaacaaaattaaccaaattcactacgaaaattacagaaattcactaatccaattttaaagcacattaacaagtattcgaatcagtctccagctcaggaaacttcgcaaaaccaaggaaacaaagttaaaagaaccgaaaaaaatcaacaaaaagcactaaagctctaaaattcggacaacaaattaacagtaagacgaacaaacagtctcgattcagctcagcgaagtaaattttgtcagatacagctcattaaattttctcgataaccaaaaagaaatgaaacggtgaagcacataccggagatgatacaatcgatgacgtaatcgacactaagattgtcaaaatcgatgtccgaaagagaagtagctgtagtgacgccggaagacgacgacaagagaaactccaagagcttccgacggtcgcttcggtacctgtgtaaaatggaagcctcctccatgatcgtttcttgctacttcttcatcaccattgtcttcttcaatttcaaaactcagaacagagtccacttcgttcatccgaggagcgccaaagagaatatatataataattgtaaatgccaaaaagaaatggaagacaacaaattcatttcgaactatttgcctttttggttttagtccttacattattttgattattatattttgccccataaaagtataataatttatttatacatacacggcctggcaggcaagcgtgttcaacgcaggtatatatcagctatcttgcatgacgactttacattttgtcccatcaacttaaaaagtgacacgtaagcaagtaaactgatctccgttaaagtgctgggtttccgtcaaaattaaaattacatataagtttactgaaatctccgtccaaatcaacttccgttagaatgatgctttattttagtacaaaatacaaatctttgacggcaaaacaccttcgttttaggtgaaagtgaaagttacatctacatgttcctacactcaatatcttgtaataatttagatataaaaaatagagaaatttaccggaaaactttcttatattttaatttttatatgcttaacttttatttgtggcaaaattcttgaagtttattttttcttacaaatttaaggtttcaattagatattactattaaataccaactggattactactgtatcgacttcaaaattttaatgttatatatacacaggtgtatacagtagtcatctagttgatatttaacggtaatatttaactnnnnngtcaaatttacaaagaaaaataatcttaagggggttttgccacaaaaaaaaataaggaggttaagtgtataaaaattaaaacataagagagtttcgccgcaaattgctctaaaaaatatatatcttgtaccaataacttttttaaaatatgaataattgcggcaaaagttcctaaaaacttaaagttgatgcaaattagtttctgtaagtcttttggtctttaaattaactgatttggtaagtgctagcaaaaaggccacatgttgaaagtttattagtcctaataatcaatttaattaaaaataatttaaataataaaaataactataaataaatgagggtaaataccattttggannnnnnnntttgcaaaagttacagattggacctt

SEQ ID NO: 110952 - DNA, 2156 bp, Cannabis sativa
taagcaaaaagagattaaaatgaagcaaagagtaaaataaacaagaagctaaaaacccctccacccatgactaaacttttgaccacataatagtacaatagaaatataatatattcggaagagcccctaaaagtaatataaatccagttctaaatacccccaactacataatttctagttatagatatgtaaaatcattcagagatacgtgtgtgcattagccaatgaaaatgtaaattaaactttttggttttagcatgttgatcttctttgaacgcaaaatgtttagagagaactaagtcaagagaaatattatgaacttctaagttgttgcttctgtttttattgcatcaactgtattatatgattctaaacttaccttttcagttcctccatgccagtggtgtaagttattttgtttagaaattctgcagagtcgctcaattcaacagatacgatttcatccgttgctttatgaagaatcaaatcagcttcttgcagttgaggtgtaagaggaaggtcaaatgttaggggaaagaacattaacccattatgagtaggatacatagggaatgcacccctctgcaaaaattaagatacaaaagcttcagaacgcaatgaaacaataatttcaaatatttataaaactttaagtaagaccactgaagtatcaggtcaaaacaaggcgtctaggaaccccgaaacagaaaaggagatctagaaatctctctgtatgatatatttttcacatagaaacaatctgcaaatctacaacatcccaaaaaagtttgaaacaagaaaaaaaaaaggaataaggccaaaaaaaatgttgaaataatttcaacatcaactaggcgcatcctttattctagtctagagcatcacaaatcacaagactattattggaaattataattctctttctttgaacccttaacatgaacttcatgtggtaccattaagcttcattgctgttcaaaatcttaccttagcaaaatcttcttcgcgtgaaggcttcataatataacctactgtcacaacattgtctccaactgcctgcttgccaatcaaaacacatattcataataacacacattttgaaggtgataattttgttgcccaagtaagaaattcattttataattacattaccaaaacaagaggtttgcatcaaaacccttctaacctttttattaaggcggcaaatagtcaaaggcaattcctccaatttgttgatattatcaatgcttgaagcatcacatgggctggcacctacagcaggtgaaagaaaaacaatgtgatgtattactactaattcaaatcattgagagtaaaagctattaagtagttaactgataaggaaaaacatacttcccaattcaaacaggtaggaattagatttcatggaatcagtattcatttctgtgaattttcaacatttaaacaggagtcgccaaaatggataagtttcctaattcaaatctgaacagcccaaaacatgtctataaaacttacttaaagcaacgatctgccaattacagttagggggtttattgaagagttccttgtcatcatcagagagcaggagcaaaatagttcctctaacatgattccaagcaagcataatatcgttgatagcatcttctagtgaagacgaagatgggtccaatgaaaagcaatccatggagtagagtgctgccatctttttaagcagattgatctaatcaagccacacaacatgaatttttaatatcatcacaattgtatcaatgcatgttcaatcactgtgagatgaaatacaagaggagaaagaaatcacttcgaagaagcacagaaaagagccaattagacaagtagtaccttgtgagatgaaatacccggtccatgagaaattgcctggaaattaaataacaatagggcattaaggaagaagaagaagaagaagaaaataagagaatcaatagagagagaagaagaagcaccgtagggatggcagaatggcggagcttacggaggagggagtcagcggctgggttggcaatgtcatcatggaaaagcagagagtgatggaatatgactccgcctattacaccaccatttgcaccctccatctctctctctctctctctgaaactgaagtaaagtagtgacagaca

SEQ ID NO: 110953 - DNA, 3925 bp, Cannabis sativa
aaagctggggttatgattattcaaaatggagttcattcaagaaaaagttcataaaaacaaaaccttgataatcaagttcatatttcttaaagaaaaactcagaaacaataaaaccccaaagagaaaaaacgattaaaggaagaaattaagaactggggtaatgataatacgaaatgtagttctagaaaagttcataaaaacaaaaccttgaaaatcaatgggctagtttggaccggtgatcttcttttgcaacgaatgttcttgttgttgctctaaaagagtgatgattgttctgtgttgaaatttcaagtaaaagaattctctgagaaagagagagaagcagaaacttttaagaaagaatgtttgtgaagaagagagtggaaaagcgtgattgcattgttcggttttgtagagttgacagtttatatatgtactctgtttcaaaattcgaattttagtttttttttatatagccgttaattatccgaaaggcgttgaacgtagaagaattcagttatattccacatgaaacagcaccaaatatttctcaacagtcataaaataattaaatattattatgaataattgctctatttgtagaataaatttgaaaaggaaaaaaaataacgacactcttttaaatgtggtttatttaagttgtgaataaggtaatgtctaaaccttttcctagttgttttcgaccaaaagtgatagagacgtatagtctgtaatgtataaattgtaatatcttacaaatcttcaattaccagttcataatctactcaagctaatgcttttgattttcattagtgtccaattttcctagagtataaattaccaatatatatataaatatgtgaatactgctattcatttattagctaagtatgttctccgatgattaataattagaggaattactacttcctttcatgtctattgtattatgacgctttgtattaatatgatagcaatttatctcaaaaaaacagaaagttgtgaataaggcaatttattcatttgaggataaaaatagaaggtaacttgctattgattttcacactttatttgattaactttctacaaatttgcaaagtgagagagaatacatggatgaacattatgacaaagcaatacaattttttgaagaatttcaaagtaaaaaactaaaaagtggtcattttttcagagcctttaagtctccaaaggacattaaatttttgagccattttcaatttcttctgtagtagtagtagtaatagaatctctggttaaagtatttttcttggccttctcagcctcaagttttctcaatgtagttgaactaagcttatctccactagaaccttcagaaacaagatccaccacttcaatctgcattaaatttccccaacaacaatacatgattaaaatctagaactgggtttgataatccaatatcagaagagggtaagaaagaaaaaaacaaagtcaaaaccttcagttgtgaaagacctctttcagctctctttttatttactgaaattccacctggtaaagtctccttactgccataaccaaaatcagtcaaacttttcttcttctatttcaataaaacccaaaacaatatttcaactaattcatttgaaaaccccactataatgactaaatcatattagttatcatcataatatatagatttcaatgaagtgtgaaaactaacctgaccactattgcttccaaattttcatcaactatagaagggccataagggtctatgattggcacagcttccacaacgagctctggttttatagactatcaccccatatgtattgttggtcacttagtcatataattataatataaacaatcaacataaaagaaaagaaattcgaactttgaatttagttaccttaatataatctttaacattaccaatcctttcctcaatgggctgtattaattcagcaaactgcaatatatatatatataaatacataaactaattttgttaaagaaaaaaattgaatctttacataatttcatctgaactggcaaagcaaaattacctgtttcttgatcaacatgggctggtcacaaactccaatcacaatccgactccttgcgagctcggccgatgcctgaaaaatatcaattctaccattcaaactttcgagaaataaaaatcaaaatcaaaaggtgtgtgagagagagagagagagaaagaaagaaagaccttgaggaaacgacggtgaccgtcgtgtaatcggtcaaacgtaccaccgagaaccaccgctgcataagtgttgggtggcgaaatctcccactttaccactgattcttccattatcgccatctgtacaaagcttgaacctttcgttaagtggttggatggttgggttgggttggtagttttgagccgcaaatggtttttttttcctctctggacgtaaataggagattagttagagtaaatactaaataggagattagttagtggtgatgaaactcaagtgtttgggttgtgatcaggtacagcgaacatagacaatggaacatttttgtttcacattacttggaatattgggcactgacttcgatgacttttatgatgatatcattattagagtgcaaccatatatcatagttaatgtttattcacatgaatgaatccactaaaccagcaagaagggtcaaacattaatttggcaaagatttaatgaaagtcaatgtcattgttttctttttagcctaacaaaaatatctcatctagtttattggtggtaaaagatgaaagaagtgcaaatatgaagtgtgcttttttacctttgtctgtgctcaagcttttgagctaagagttctttcagttttgggacctcaccaactagatttccactacccaatccttcaaaaattcatcaaagttagaatttttacacaagagtaaatagaaaaataaatgaggtaaaggaagaaaaccaagaatgactcttatcttttgcaaatttcttttggggaagagagagagatggccttcattttttaaaaagaaatgagaaaaataaataaaaaaaaatggttttaagtaaattaaagaaccaaaattaaattaaataaaaacattaaacaagaaaatgactacctataccctacagccttactccaccaacccaagttacctaatttttaaatttcattcttaattatttttaagttactaatttaagagcaattttttaatttaatattttttaacaaatttataatttaatagagattctatttcagccatgacacaaacacattatatataactcaaaacattttgaagcaaatacaatttattcagaaatttcatcaaacagtttacatgcacacacatttcataaatctgtaaaataattattaagctcaagatagaatggaagtaaggaattgtttcagaaatttaaattgagtacaacacataagtttggctgtggagttattgaatgaagaaacgcagatgatctttgatgagtcatgatctgtatttggatttaatgaaaacgtagatctctcgtttattatttttagaaaaggatttggattgagaatttgaaaacaaattaccaacctgtaaaaactcaatatgcggcgacgactttcgggtgcgaacatcgaagctcctggacgttcaagcaccttcctctccgtcgtcgaaggtcttggccattcaaacaccttcgtcagaaagaggggatcgggagagagaagagagaaagagaggagattagggctctgttgtagaaattttctggttttgacgatgaagtgaggttgaagaagatgacaaaaaaacgtacatactattatttttttacggtttttttttatttttatttgtgttgttatttatttatttttttttttgaaaaagtgattaaaattactcatgaattta

SEQ ID NO: 110954 - DNA, 4908 bp, Cannabis sativa
  modified_base (4876)..(4876): a, c, t, g, unknown or other
tatatagttactaaattaagctacgcaaagtgatgtagtgttcatctgacagaagcactatgtctaagcagctgcaatatttatcttccaaatcaaaaatcttgctgcctgccaactgttgaaagaattaatctttatttatttatttattttttttatttcatgtactttttcttcctttacaatatataatcttgaaaataagtacaagtattgtacatggcatgtagattcctgataatcaagaaatttgtcatgtaacttgttagtaagatgtaatttatttcaagatgaaatgaccttggttttgcgctgggaccaggaagctgcctcaggtatgaaacttgtactacatccatccacccacatacaatattggtttttaaacaaatctttctgtgcttgttttacatgtatccatgttcttgtgttccttaaatattagaaggaatattttcactaccaatagttacctcatagctagtcatatgaatgctaaactgatgtatctcacttgctattcacctgcctttgactaatttgagacacatatggacattgtgattacaaatgatgcacgacatatcttaaatttcagttggcctctattacaggcagatggtgataaaaagatagaactcaagccaggatttctgatggaacatgacaaggatgtaagtttgggctttgcatttgatatcatagtacaaaacgaaattgctttcattgacttatggcttatctatactctctggatttcactacaaattatggtaatgaaatttgtttatttatttctagattggggcagttgtagtaggatttgatcgttatttcaattactacaaaattcagtaagtttttcttataataatggatgtggccttttgttgtatctatatgctgttttcagtattttgtttgattatcttcttaccccagaaattatttgcacataaacgatacgtgatataaagcaagaaaatcataaaacgctttacttctaaagggctgattttaggtcatttgtctgccgcataacttatagagaatccattttttaaatctatagttagcaattaattattcactgatcataaattttcatttctccaactcaaggtatggaacactctgcatccgtgaaaatccaggctgtcttttcattgcaacaaatcgcgatgctgtcactcatcttactgatgctcaggaatgggcaggttcgaatctctttttcctttcttcattttgttattttggattgaagaagctcaactgagcaagaatttagacagacaaagcaagagctatgccagaaaagcttaaagcttaatcaaaactgattagcttgagtctctttatttatattcaccaagtttacaaagaagtaaaaagcaacttgctagtttgttacaacagaaaagacttactacaaaaaaccaactaattaactaactgttagtatagtggttatcatcccctcaaacggaatggcgaaagagccatttttagtttggatttaatgtattgaaactggtctgttgataatgccttggtgagaatatcaacaacttgatccactaatggcacaaattggcacaaatcgggctgacagttgctgagcaaggatttgatctctcataaagtgaagatcaatttcgatgtgtttactccttgcatgaaagatttgattggctgcaagagcagtagcactttggttgtccttccaaagtataggaggctgagatattgagacttgcaactcactaggcagagaggagagctatcgtatttcagctgcatcgttgggaagagcatgaaattaactttcggtgcttgatcgagctcctacttgctgctttttggaagaccaggaaactaaatgttcaccaagaaacacaacatagtctcctgttgatctacgatcatcaatacaattggcccaattagcatcactatagccttacagggtgtgtttctcatgacttcagctacaatccttcagagatgcctttaaggtacctaagcaatcttttacaagcttttcagtgagaggttgttagagcatggatgaattggctcagcttattgattataaaggcaacatcaggccttgtaagtgagatatggcagacctccaagagtgcttctgtatagagtggcaagctcaaatgcttccccattattgagactgaggttaacagtggcgcttgttggattaggacaactcttatagcctttcatgtataatttgactagaaaatctgtaatgtatttggtcttgactcaaatacattcctgtgttatctctaaaaatttctagccccaagaaataatgaacagggcccaaattcttgagaggaaagttggtatttaaatcttgaataagcttggaaataagagcatgatttgtaccagttactagtatatcatcaacatatactagaagataaatcagagaagaacttgacccatagatgatcaaggaagtatcagaccttgatgcttgaaatccccactcatataagctctgtttgaccttctcattccaggctcgaggggcttgtttgaggccatataagtccttgtgaaggagacaaacatgatcaggtttatcaggatcaataaatccctgtggctgctttatgtacactgtttcatttaaatttccattgagaaaagcattgctaatatccagctgcttcacaagccacactccaattagatgagacaacaatgctaagaacaacacaaatagtggtaggttttacaatagggctgaatgtgtcagcattatcaatacaaggtgtttggaggtagccttttgccacaagcatcaatttgaatttatcttcggtaccatctggatttagcttaattcgatagacccacttattgtcaatgacaaacatacctggtctaaaaggtacaagagtccgagtaccatttcttttgagagcaaagaattcagttgacattgaagtatttcaccttggatctttagagttgattttgttggtttaggctcagtttgaagaagtgactcctaaagaggatgcttagttgccaagtaagacttaggtttggtgatgccactttgagacctggttctcatagcgtgtcgttgaaattgcagcagtaccttgattggatggtgcagaaagagaagcactagaagtagtggactccatcagccttggttgatgtatctcagtagatatagggatagataaaggtaagttttgttgagaatttgaagtttgaggaatgacattggagggagagtttatggggaaaggaattgtttgtacatgtgacacatggattgggttacaaggttggagtggtaagttttggatagtagtttgtgtaagaggttggtaaagtgggtggaggatcgatttctcaagtaatatgatgatagggttgaggtataggtgtgatggtagggtggggagagttggactcagggagttgaagaagtggctcatggagattgagaggttggggagttgaagaagtggctcatggagattgagaggttggggaattggctcaggaatgtgggggaggttggggagctggctcagggatgttggtaggttggggaattggctcaggagggacatttgtggtagtagagaaggtagtaacagagtagggaagagaggggaatgagggtacttgattagatgatgaagactgagaattcaaggcaactgttgcagagtcttcattgaagataacattttgagccacatatattcttcctttttttcactgaaatagcttttgtgttgagaggaatagcaaagaaaaactcactattaagacctgtaatccaatttgtgagcattataaggtctcaagtaaggaaaacaagtacatccaaaaggtttaagtattatatagtcaggtttagaaccaaacaatgtttcatagggagataagttgtgaagcaccctggttggaagtctgtttatagtaaaaacaactgaattgaaatcatgccactagtagctaaagtctaaaacagacttggcaatcattgtgggacctgtctctttgatgttgtgcttcctttttgctcgaccattttgttgatgatcgtgggaacacggacgtctgaaatgaattccttggtctctcaaaaatctctcgaaggtcctatattcaccaccccaatctgcttgaacatatttgatgggcaaattgagttgtttttccactagacctttaaactaaatgaagacttcaaaggcttgagatttcaaggtgaggagaaaaatctaggtgtatctactatagtaattcaaaaaataaacatagtatttatagccaactttggatagaatatgaggtggtccccacaaatctgtgtgaataagctcaagtggttgagaggcccttgaattggacagagagtaaggtaacttgtgactcttgccctgctgacattcattgcaaaatcttagatctttaatagagccaatgtggggtaaataagataacgtgctattcaaggtgttagatgctggatgcccaagaatacaatgccaggtattaacatttttgctgacaaataatagaaaaactgtaggactacgagaagagtaagtagaagcatctaaagtttgattgatatcaaatttagtacatgaggtatatgtattgactataatacaatttgaagtactagaaacagaagccatggagggtagatgacactgtagggcatatccagagaagcttgaggatatatctccaagcatgtacaagacttgcttaactttcccttcgagaagcacaattttagtttgtttgtccttgacaaaacaacaatttttataaaacaccagtagaacacaaaacagancaactcaaaacaacagtagatcaactaaaaaa

SEQ ID NO: 110955 - DNA, 1933 bp, Cannabis sativa
attcataatattatatatagtaataagttttaaaactctgaactaaagttttaaaactctgaactaggaacaggctgctttaacctcaacaattaatctgtaatacattttagttttggtgaatgccgaaagcgttagtcccacatttcttattgtgtggaaataaattgtgatatataagttaaatgagctactcctctgattaccaattaattttgggaacaaaagcagctgtaggtactactaataaattaaattttggcataacaagaaatcatactgttgacaagatgagtatacagtagtactgactaatatatattgagcagtgtaaaaagaaatgcatggcaggaaaatgagctgtgtggcaggcaagcaagcatatattataatttctttgcatacattgttttgttttcactttttactcaaaagtgatgacaagattaagagtattgatctttgtataatcataacattacattgttaaaattcagggctaaatggtgcagtgaaatggaatattattgagtaaataaatatagaaacagtgtactgaatcgctctagttaattagtacaactgtacaagcttatttatacgtacacagattctgcaggccatatgtatatatatatatattccatgctgagttttctttcttattataatatttctctctccctccaaaggagtgtaaaaaggaaaatttaagcattcttatggggattctttatcgacatatccatcagccttaatcagctcatgaagtgatgttcatgttcttagccagaaagaattataaattttcccttttgtttttttgttgggtttggtaatattttttcaattagttttttattttttatttagattagtaaaaatatttttacaaaacgcattttataaagctattttcactttttaattttggctaattgagatttttgttctttaaactttaacatgccccttgaactttaaaaattctccctaaactattgagattgttagatttaaggacttttatttaatttcattcaattttactatttcagtgattatttatgtactaaaacatgctctccaaactttgatatctaccaaagcacgcccctcaaacttttacatgtactaaatcatgccccttgaactttcatccatgtttgaattttttttactaaaattagacaaaaatctctaatatcaataatctcaatagtttaggggcatttttaacgaccttaaaagttcaagggtcatgatttagtatatgtcaaagttcgagcgaaaaaaatcctaattagcctttaatttttttaattgaaaaacaaaattttaaaaaaaaaatcactttcaaaatttttttaaatagttttttttttcttaatcaatattttgcacttcgaccccaacatgaattttgaaacccgcattctagctctgaccctaattttaaactcttaccacggctccgatctagacttgaacctgaacccgacttaaataaaatcaaaaaataaaaattataagaaatacaagtagttatagagtatatttttattttataaaaacaaaattttataaacacaaatttacttttatttgtattattaaaaaattaaaaaacaaaaatatgactaatatccattaataattacatgcccccatgtatttatgtaatcataaagtgaaaaacaaaatcattaaatatatatattcaaacacaaatatatattaaattcaaaactaagagttaaaaaatagagaagatctaaaaaatgtgtaaaaaattatatattgtgttattatagttaaaaataatatttagcagataaatagagttaagctagatgtataagaatatttctatattgggaaatatatttctatttaaggaaataaatttttatttaaggaaataaataaataa

SEQ ID NO: 110956 - DNA, 1698 bp, Cannabis sativa
  modified_base (65)..(75): a, c, t, g, unknown or other
ctcttccgatcttaaatgttatttctgatctatattaatatgtaaatctaattatattgaaatgnnnnnnnnnnngggcataaaacccaacaaaaagcgaggtcaacagtacattctttaggtttcggttgctctttcattttctaacttagtaattagttattgcttgttgaatgtttatggatcttgttgttaatttttatttatttatttattttgtgtatttcatgtttaataaattttgattcttttttttggaaaatttttaggtttgtaaatggttcattatttgttttgggagttattagtgaagatatttatggatgcctgcaatgtagcgtatcttgtggtttttttatatgatttagttgtattgtgtgaatggtttttttattagcttaattatattgtcaatgtagttttaaaattatttctgttataatattcatgttccttttttgtgttgatgtatatctatgttggattggaaatacaagttacatccttcttattgttacaggtccaagtgcgtctctacatgtacttacagtgttattgccaacattatgaaaagaatttcgcgagatgtgatgaaaatattttgtgatactcaatttggtcatgtcttggatgttcttgagtacaagttttattcccaatttgttcacaaccttttgtttagggtggtacaacaggacaatcgtaaggaattttggacaaaaatttctggtcattgtattacgtttagcattgaggaattttatttgacaatttgtttggattgcatttataattgaaataaaatgggattttttcaataatcacaccagtttatttatatatgctttcctgacacaaaattaattgaccataagtctatttgaggatgaattctttggcaagaggtgggaaaatgataatttgttgggtttgaagatgattgcaatttacattattcattgtttttataagtaacacccctaaggaagaagtatagaggcctgaaatagatattattgatagtgatcaagggcagattgctcatgcgatcaagatgaagagtaagtgtgagagtaatagagaacgtagttatgatggctggtatagagtattagggtatccatgggtatttattgtttggtgtgatgaatgttgtcccaagatattagaatctttttccaaacatgttgcctctatgatttctagaattcaaaattggtcaaatgatgttaggcatgagatgcaaacgccatgtttgaaggaattgagattgaagattttttatttgcctctgaagatggtaatgttaagttttttttttttattttgtgttatgaatgtgattaacaatgctcctcttacatgatatttataaatttgaatcaaaacataagaagtgagattttaatatattaacaaagtttttgacatagattttaatttagaactagagtataaaattggtctatgtaatttagggttgagttcattgcttcctgttgtttaaatgttttgatagagatattgagaatttacaatagcttgagttgtatatttcttaatccaaatatttaacgcttttgaatatccttcatcaatatctatctatatctatatataatataaaggaaagcacaaaatgagtttaggtggcatcttagatttttttatactatttttaaaatttgtagttttttt

SEQ ID NO: 110957 - DNA, 8191 bp, Cannabis sativa
atttaacaatctcaatagttagaggggaatttttaacggccaaaaaagtttaggagtacgatttactacatgttaaagttcaagagaaaaaattactaattagcttttttttatggtatttgtaattctatagatttgtaagcttgattttaaaatctcatatttgatgtttaaataaatcatttaaaaaaattagaaatgtcaaagatatttttccttcttctcttgtatttagctgtgccactctctttgtagctccacctacccacctccgtcagcttctgattcgaagttcttcgtctatgtcgtcagtctggaggtctctttcagacactcaattgatataatcttaggtgattttgagtctctgtttggtgagtgtgatgatgagtcggtctgcgactgattcatggtcacattttggatctctaaaattacagatctatatatatacatatatattgtacatatatacatgaaagaaaaagtatatatattagtgtgaaagagattggctaagattatttcaagctttagggggttgagtaggtgtgtgactatgagattatggaagcaacttgaaactttggattaggaatgggctaggtgtgtttgccaaatctagaatgaaggaagaacttacagaaggataaaactgagatggagaagaagaataaaaaaaaaattggttttcaatatacgtgaatttatttgtttttaatttagtatataaataggtgagaagtgacagatttcttttaagtttaatttaaatgtgtacttttagccaatgacattgagtcttcaaagcaataaatttatgaatgacaatagcaagataataattatgagcaatatgaacatagagaattttatagaaatttaactccgtgattatagtaatagcctactccccttttttgttgtattactttcaagattatcaagatcacaaggaaccaatcaagtgagtttcttaacaacctcgatgaaagcttgcaaatattttggcagcataagcactctctcaaaagtctgaaatcagatccctaaacaatggaatggctccactatttatagagaagatacaatgaatattgttgcttaaaatgatgagaaaagaaataggaaactacattaatttctagaatctctcagttgtgcgaaaccaatccacaaacatcgggatttaaacatactataaatgaggagatatttaaggaaaatatctttgagaatctaaatacaatgggtccttctgggcggaggattacatacaagagttgtttggatgttgcttactgaaggcttagacctaatcagttttgaggataagccctcatgaacggaacattaaggaagcacactctgtccatgtcttaaaatgctctccgcgtgtcactttgctcaatgtcacgtcaccctgtgcaaaaattaggataacatttacccccaaatctgtgtgggaacaactcatgcgtggacttattcggtctgctagttgctcggatgggtgacacatacttaactctaagtgttgtccctgatcatacatgactctatgtgagattaagagtttcttaccatcaccaacactaagtgtttcaatttcattataagccatctgagatttaagagttccattgccaaatgtgacatgagtagtggctctagtatcagcataccaggtattgtcatctccaaaatcttgaacaagagtagtggaatacgcttgaggatcatagtcgaactccaactacgttagatagcacgatttgggggcttctctagtttggaagttgtccagttcttgacaaagtggtaatgataaataggagcagtgtgactaatacgcagacaaacttgacaaacaactcgtggttgattgaatcaagatggacccttgccacgacttgtgaattgttgagaagcatcagttgttgggagtctagagttggcatatggttgaacacctctagctcttccatttccaaatgcgatttacttgcattttgacatagagatcgatcattgaatggtgatgttccaatcgactttcatgcgagaaaagtagggactatacttcttcaatggacaaagcatcacttcttgaagtgataccagagacaaccaagctaaattttgggccaagactatttaacagctacataactaaatcttaatcattaacaggggagcctgcgaaacaaaaagcattagagagatggattggaccttatcaacgtattctgagatggagaggttgcctttttgcacattggagaattgacccttgagttggaggcgacaagttttggtttaactagaaaatttttgttgcaatgcacgccaaatagtaaaagaagtagttggcaaatgaggcaagcaaactttccgacatggatgatcgtaaccaagacagcaagggctgatctttgcgccgctattgttagtatccaggattcggtgcaccattaactagctactgcggaggagagggacgccaataaacaggatttcatcaaggtcgtgtctgatgactgtaaggactacctgcgatttctaagagaaaattcagacgattcagaataatggtgagggatttcgagaaaggatttcattgtggctgtgtagagacagcagaagcaaaggcattcgacattggtgtagaagcaaggacaagtttggaggttgaagaaggcatgaacgtgagttaaaagacaattgataccatgtaggaactcaaaaagaaaaaaaaaaagctaacagagaattagcttagcaaaagctaactcaactattagacttaacctttttatttatagacaaatcagtattaagattacaaggctttttaaccgaacaaaataaagactaaccttaaacaacctaactaactaattcaaataacaattaaactaattacttatttgggtgttaacactccgaacttttagtttcttatcaatattgcagtattaagtaacaatagttttgctgacttatctttttattattattattttgcttctttaatttattgtatcaacaaaactactcttaagaaattaaaagtttaggggagtaatttgtcaaaaaaaaaattgaggactaatttaccaacacttatataataaaaagtttgggaataaacaaaaaagaaaaggtagaaaaaagaatgacactataataacaaattgacactgactgaaaaataccccttgggattatgaacaaatcaaatatttgtaaataatggaatcatgtgcaacataatccagcaatactccaagacctttaagaaatactttttttttcccggttatatttataatactcgcatgcaggcaggttattaagacgtggccgatggtgcttcaccggcaggtccggttcgggcgtttaaaagtggttgtagggctttaacaacaatgctcatgttcgggcggaaatccgcttcatattgaacacacaatgcagcaacagcagccatctgtattaacatcatcatcaactattagatatttgattcttatgcatggaaacaaaagctatgtttctttgtcatcaatgtattagttttcaaaagctaagtaggcaaataccttggcgactgccttcggagggtagtctcccccgagtcttgcatcgatgcattgtttaactttgtcttcactaagtttaggtgtagcctaaaatatcaagggcatagtcagctcagttgcatagatagatataactaaacatagttcttaaaagttcagaaaattaaaagaaatcatgaagcagaatttgcagaaaagagattgattttgtacccatgtcactagactctgttgtccacgtggtaatgtatgatcaacaggctttctcccagtcagaagttcaagcaggacaaccccaaaactgtaaacatcactctttgcattcagctgtccagtcattgcgtatctgccaaccataatattttttttttcaccttagtgattagattagagatatatctgaaatttacaacctttagaattgtcagtaattaaagacgctttgtgtatctcatcacccacgtacactacaaacatgtaccatagttcttacagaactttggatgctcaaacatgatcaaatatgtaaatcttatgagaaacaaattatgagttatatgcacctacagacagacacgactatatgaatttgtatatattcaaatgtaagataattacacgcgcacacaaatatatgtatagttgtatatatactagtatgcatacgcatcaaaacatacagatacgtgcgtgtctgcaattgtaaagacatttataagaacttaagaggaagaatccataaagggcttactcaggggcatgataaccaaaagttccaagaacacgagtggagtgaagacgtgctgccatatctggagcttgattagacaaatcaaagtcggcaatcttagcaacatcatcatcaaatattagtacattgctagacttgatgtctcggtggatgatatgagggtctgccttttcatgcaaatattcaagcccttttgcagcccccacggcaattttcactcgttgtgcccatgtcagaacaggaccaggctgtgcccctttaacacctttccttcctacatggacacgcaataaagataaaaaaacctttctgaaatttggagaatccagaattcccatttgaccatattgcaatcaatttaaggttggtactctcattaaaagtgagtgaaactccaatcaagattatacattatttaacttgaaagctgtcaacataccatgtagaatgtcatgaagagatccattagatgcaaactcataggcaagaatacgtgaatttccatcgatacagtaccccagcaattgaacaaaattatcatgtttcagccttgaaaccatagagacctgtaaatttaagcattaatatacaaaatgagttcaaatctacaagcttatgcaacggaaattcaaagaaacaaacaagaatctgttgctaaacctgggctaagaattcttcgtctggttgcttgctagcatctagtttcttgattgctgcagcttccccacttttaagtgttccatagtatactcttccatatgatccctctccaatcaaagagttagttccaaaattatccgtgatttccttaagttcatctgctaataaagcgggaacttcaatgggctgaaccttcactgcttgagaacccttgggcacagtttctgaggcatggtaacccccatcatttcctacatcaagaaactaaactcagtccagtaatgataaaatcattgaaaatgagagaaattgaggcatgaagaacaccaaataaggttaaacaatatattccaagcaaacgggtgcgtgtaaaagaggaacaccattgtaatgaagaaaataaaatagaaaattatccaagtcggcctgactaaacaaattctcactgcgaaaaggcatgcatagtacattggaagaagggaatacctgctgaactgcgagtcgggtatgcacctccactttcagctggtttatgcatatcatcatcttcacaacagctgaagcaactcatgattctttaatctcgattacagctgcttgcttccaaaaaaaaaaatccaaattaatccaataggtcatttcacatataaatgcggaaaactgatgacaagctcaagtgtttcgactaaaatgcaaagctaatatatttgagagaggaaaaaagaaaaatcaactcaaatttccctttcttctccaaactctctcatctgggcttaaattctaagtttattacaaagcaaaaccaacttttcattccgtttgcttaatccgtaaacttaatactactctcatagaacagtggggtattcgatttggatcgcacctcaggaaaatatgacaaattattagcaattttattttaactttttctgtttttaaaaaattttcaagcaataattcattaaaagtcttgagtattctctttccaaaaatcatttaaaattctactacagacttcagctacgagtcagctttttcagataataaagaaataaataaataacaaaatacagaaaaacaaaaatccgatgagatcgctccagctgaccagaattttgacgatctaaaacacttacggcacgattaataaccagataaaagtttgaaaaggcaaagagagagcataccagagtatcagaagctgaagcagaaaccagtggtcgatggcaagcacggtggaggtagagatctgaggttgaaggagggcgaaggataaggcgaatataggggtgcgtaggataaaaagaaagcgccggagaagcgagacaggaagaaagaagaagtaaaaggatggtgttgaggcttgactttgtgttcactaaacagtcctctcttaggtgaatggattggattattaattaatctttaattaattaaataataaattaacaaataaaaaatacaatactattattattattattatattagacgcggttgaagattcacagctagctaacccagcttgaccagccagccaccactactacgaccgccacttcttaataaaaaaatagaaaaagaaatatcaggtggatgacgtgttaaaatttgattggttggatatgctgactgctcgtctccacttcaccaaggtgtaacgtccccggtcgtcgcgtacgtcttaattaatttttctttttttaaagagttaaaaatactttattaccgctactgcacaatctttttaagtacaaattacggtgattacgcccgaatctaacggatgcagtctgaaattaatttaaaaaattagaaagacaaaataatagtaattagaaagagaaacagaatcagttttttcactgatgaaaacgacaagagataacagttgtgagaggtgtcgttttcctaaatgggtatactgtacgtatgtataatggaggtttactttttaccgataatgcccaaaaaaacaaaataaacgacaatgcaacgcaacaaaattagaaagcaattttactttttttaagagagtactttttaatattataagggtcatttttataatgaatttacaagcgaattaagcgtgtgataaaataaagggtaaaaataaaagtaggaaggtgtttgttgtggactattattataaagttgtgtaaaagagagtgttaacagtttctttgatatttcttttcttctattaaagatatattttcttttgtttgctgagattcttccattaaatatttgattaattattccccacgtttctaatttactaaagtcttcttcatttctttccattttgttttggtcaggtttgaaacaggtctcagtctcacaactcacaagactgtttagatattacaattagtttgatttcgagatacatgtatattagagtaaatatcatttaagtaaattgaaatcaatcacgttctcaaaaaaaaaaaaaaaaagaaagaaatcaatcacgtttgttgtttggaattcatgaattaactttgaaaaataaattgaagagatgtgtaaataaaatctgacgcaaaacatagtaattttttgcgtttgctgtatatacgccagttaacggaactgacgctaaaactatatatatcggttaggaactaatggtaaatgagaattttgtagtagtggatccttttagatggctttggaagatgcaatggtgtcaaagctttattttttagtggctctccatcttgaataacttcttcaagggaaaatttctttatcaatttcttgctatttggaaatggttactcctttaccagatgaggattcatgtctccaattgctaaacactcccctattgcatccgaagaacaaatggagtaaaaggcattgaacgttacttgctcatcttgagctctgatggtgaggtcttatttttcaacatcaatcaagattcttcccatcactagaaatggtctccccaagatgattggaacttctctatcttcctcataatccagaataaacataggcatcaagttaatgctcatttttaagtcaactagttacaaagttaaagtggttagttatcaaacatgtgaacattgactcacggtaaaaaatttcctttggcgtgcttctaatgattgtcttccaacgtgcctaaatctagttatcaaacatgtgaacattg

SEQ ID NO: 110958 - DNA, 5503 bp, Cannabis sativa
  modified_base (5464)..(5471): a, c, t, g, unknown or other
tcaattctgggtccgccactgtatacaaagataaaaaaaaattagtttgagaaaaaaaaaataaaaagagaaagaattggaaaaatatataaaaaaagagaaatagagaggaagtagagagaaagaaaaaaaaaaagggtaagcaactgatttaaaataaaaagcttttttgaagcttttaataaataaaaaacagtaaaaaagaaaaaaaaattaaggaagaaaaatataaatgcaaaaatttccttgtcaaagtataaatgtatattttaaaaaaaataataataatatttggtgtaaatttctcattttattttatttagagcactcctatcacctttatcctgaatttttcaaaacacttcaccaaaatttcactttcttcttttaaaaaaaattactttttttattttaactcacacttttacattacctcatatatcaatttgtttatttatttctctgtattatttaaatattatattttaaaatgtattttatttatataaacaaaaaaaaattaaaaaaattaaaaaaattaatgaaaaaaaaatagaaagaggaaagaaaaattattaaaatattatttgaagaatgaataatgtctctttacatatagaaaaacactatttataatgtaaaattttaagtaaaatgaataatgtttttttagatgtagagaaatactattcataaataataatactaagtcctattttagcatatattatttatactttactttttgagttattttgaatgcattgttgtaagtgttcttattaatatccgatcatagggccattattcttgacactgccttatcaaactcgaaaggtttcaaaccttttcgatttttagaggcatggaccagagacaactcttgcaaggaggttattgcccatgcttggatctcttcgggggtgaactctgcgaagaccctccttagaaacctggataacaccaaaagagcactacaaaagtggagtcgagatgtgtttggggattgtgacactcaaatcaaaatcctggaggggaagatcatgcagattcagagtcaagagacttttaatgatcttatcgccctcgaatctcaactcaatggggaactcatggagtgctggaaacataaggaaagtatttggaagcaacgctctagggaactatggctgaagaaaggggacaggaactcaaagtttttttcatgcagccactatgatcagaagacgaaggaaccaagtcggggctattcgcgatgctgaagggagaagacaggaaaacttcaaagtcatgggaaatatctttaatcagtattttcaatacctgtttagaagttcttacccttccattaccccctgaaatggaaaacctctatgtctcgaaggtggggactgaagacaattcattgattaagactattccttctgatgatgaaataactaaaactgtatggcaaatgcaccctcttaaagcccccgaacccgatggattctcagggtgcttccatcgcagttactggaacatagtcgaagacaaagtcatcaatacagtaagagatttctttactatactggaatgatggatagtaaacttaacttcacctacatttgtctaattcccaaagtcgagaatcctgataaagtggagaagtttagacccattagtctttgcaactttacatacaaaatcattgccaaaatcctagcaaataggctccgccccatcatggataacctcatttctcctctccaattccgcattcattcctgggaggtggattgcggaatcgtctatcctcactcaagagattgttcataccatcaataggctgaaaggcttgagcggattgatggctgtgaagctcgacatgcacaaagcttatgatcgaatggagtgggtgtttctacaaaaagtgcttatggtaaatggtttcgatgctgaagtgtataatgtgataatggcatgtgtaaacagtgtatcttattcgaccctcttgaatgaaagacctctgaagaaaatatacccccaatgggggttgagataaggagaccctttgtccccatacatattccttttatgccaagaagttctttccaaactaattcaaaaggaagaagttgagggcagagtccatggaattaagatcgagaggaattctcctccaatctcccaccttatgtttgcggataatactattttattcgcaagagctaatgtctgtgaagcctaaaacctgatgagatgcattaagaagtatgaggattggtcgggacaactctgcagcaaacccaaatcaaatgtcctcttctcatccaatttgaatagagaagcaagaaggtctttattatcgatgctagatgtcagttgtgtcaatagtaatgaaaaacacttggggaacccgcttatcttcaaaaggaggaaaaaagaagactacttactactaaaggaaaggatgaaatcttgccttgagggatggaagatgaggcttctttcttatgcgggaagaacaaccatgatcaaatctgtattaattagtttgcctgtctataatatgtcaaccatgaagattccaatctcgacttgtcgggaaaaggatgctttggttcggaaatattggtggaatggcaatctggataaggatcgttttttggctttaactgcttgggacaaaatctgccaacccaatagctttgtggggggataggattaagaagatttaaggatatcaatcatgccttattgtaaaattggcatggcagcttgcttgtcctaatcctagatcgtggagtaactgtttactacataaatactgttcgaaaacttcattctgggaagttaaagtgaaaaattcagattcgtatggatggaagaacatacttgaagctagaaaggtaatctaaaaaggttgtctcacgttaattggcaaaggtgataaggttgatcttcggcaccaaccatggattccatggttaaattttctggagtttcgcaaccttatggagacatgcagaaactaattccctctgttaaaaattgttgctgatttgtcacacaacaatacctgggatcatgaactcacctgcgagttctttggtcaggagattggtgcggagatagttaaaatcttcagacttcctcctgaggagaatgactatttgatatggaaaaacaatgttgtcgatactttcccagtcaaggaggtgtacctctcagatcaaggaagcaggtttgatgcacaatgtgatatttggcggtggatatggaaaccggatatacatcctagaataagtatgatattatggagggccatcctggatatccttcctactttagataggctaccttttgttgcacaaaaggaatgtatactatggtcccacggatatgaatctggtttgcatcttttctgagattgtccaattgctaaggcagcttggttcggtggtaaattcaaggttcatagttctaatatcccaggggattctctaaaagagtttgttattaatttgtgcctaatgttttaccccgcagagagaacctatggactggatgtttgatcttagaaatctagtcacacagaaataactactttttttaagtgaatgagcgttaatggtaagtgcgttgttgacacaatccacagaagatttgaggaattctaagcatcagggaagactcttctcgggagaaaagtgattctcaacctcgaccaaactacaatttttagactcctgatccaggggatcacatcttccttgtcgatgcctcctggatgattggtattgcaggtctggctgttgtctggtgcaacaattcgaccaattcctggtcttctaaagcgatccattgccctgctacttcttcccttgagggggaggtccgtgctattctcatggtactctcctgggcaaaggaaaatgatctccacaacattactattgcctcagactctctaacgttggtgaaagccttttccaatagaaggcgtatcctggattcgcagctttggaatgtctccttcgagattttgaagttgttaaatgattttggtatatgtaatctaattttcgttaaacgttaagataatgtaattgcggatgggatagctagaagtgcaagagagtctagcctcaatgctggtgttatttaaggggagggcccccccggtggttcccattacctttccctactaatgaactagaagttcttgcaaaaaaaaaagtgttcttattaatattacgtattcaatgttatttaattttggttgttcaaaaatattatctaaattcgagataaaatatacaattgataaaagtttttttattatataaatactattttaaattttgtatttttacaaaattatcattaattttttttattttagtattataattctgactctatatttataaagaataaatagaatttttatccttaaactatgacatttgaagaattttactgcctaaattaactttaaagggaaatttgattaaacgtgcttaaaaatggtgtatggtattttaatataccacattaaaaaatataggaaaataatactccaaaaaatcttaaacccaaaaataccctccacatttgtacgggtgtgaagccatggtctcggtagaagccataattccctcccacatcagaaccacttacgatctggcaacgaatcaagctttgctgcaagaagcgctggatttagtagatggagctctagaggaatctcaaatacgcatggcagcctaccaaaagaaagtggcaaaatattttaattccaaaggtaaaagcaagaagtttgccattggtgacctggtccaaagaagggtcttcccggcctcccaagagccgggagtgggggtacttgggaaaaattgggaaggcccatataaaattatagttgaaataggcttcgggacttataagctagggttgaacatttaaaccagaaaacccgcccaccccgccccgacccgctactaaaaaagccaaaaaattaaaaacccataaattcgggtcgggtccaacccgaaaataggccacacgggtatcgagttcgggttttaaaaacacacacaatattcatcgggttataatccgaaacccgcataactaaaagtatatatatatttttattacctttaaaaatagtattaagttagtaactattaaatataatataataatactactgacaaccttaaaatgaataatattctttacaactcaccacttctgcttcactcatctccccaccaccgcaagtccaccatctcagattcttatctccatcttcttctccagcaattggctcagtctggtgacggcgaggctctccctaacctccaaattctcccaggcgtcgactcctcctcctccaagaaagctccgcccatgaccactgcccagccgcccactgctgccactatagcttttactgttggatatattttaccannnnnnnnatttactaccatgtatgtttcactaacatcct

SEQ ID NO: 110959 - DNA, 5021 bp, Cannabis sativa
aattgatgaggttaacccaagttagattttccaaacagaataatcttattattaagtgttgttatatgtggattcatttaatattgtattgcattattacatgacatgtatcattatatatcatcaaagaaaatttagagtagtctacacttacttcttggcccccacaataaatgctaaggtggctatataataatgagctggtttagctgtacgtctggctggagtggaggtatagtctattttgatcacaaaaccatcacatgctaagcatgttaacgtaatttcaacttcaacacacgagagtttgggtgagttttcacaagaaaaaatcaactgtgtaattctaataataaaaagattaatagattaataaagagtagctaatctcataaaaaatcaattattatacatgactagctcaaatgggatcattaaattgtttatcaaattccacgtgacactttttatacaatatgtgagaattaattgcttttgtgtgttgtaattacttctgtctcaatctttttattgtactttgttttctccatgaacccgcttagcattggatcaatatgtggcatagctcaaaacttaatttaaacctattggtatctgatagcttgcaaagcatgtaagttgagttcaacacgacaaccccaggcaattaattaagctaataatggcttattctactgtcccaaaagaatttggatatatgaaataggaatatataaagtttttcctaggcaataatcactttttaagctggtaaaaaataatactattacttgcaattttaaaatgtgaacacaacaagctcactattttccaaatccaaaggcaaaacttcttaaaccattctcaaatataaaaacaattatcaacttcgttaaaaaagaaagtaaacattattacttacctcattgtctttaccttcttgttatccattccacactctccaccattaaactagatcaccccaaaatcaatttcatcaaaaaatttcccctccatatatatgatatcttgtaaaattaagtcaaaaaatgcaaataatttttcttattcagactcattattttattatataatttttctatttatataaaaatatatatattttaaaaataaaatagtagaactagaaaaggaacacagagttaccttatcttttttcccctaatgaatgtatatttattagagttagtcccacattgttaatgtgtggaaataaattatgatatataagatgaatgagctactcctctcattgccaattggttttgggatggaacctcattcatcttatcctcaaattctaacatggtatcagagccatttgggatggaacctgataagtacagaaccccaattaataggtagttcattcaatcccacctaataatttttaacaaaaaacaacaaaatttatttcttagctagtcaataataaattttttattttttattttcagaaaagaattcaagaaaatgactttctttccttcaaataaataaaaaaaatatttgtagggacttataaataaatacataaataaagtgagtaatttgtaacttatattagctagcctagtgtttcacatttttcctaacaaagagtgtgaaggtctcgatttcgaatccttcttcttttaatgtaaaaaaaatattacacttatctaaagagaaatgctaaagggcactagtggttcttagcaccctccgatgtgttaatattgctattcgtccaactaagtatcgtgtcccatataatgtatcgctagccaatcacaacgtgatatgtcgagaaggtgctaggcaccactgatgcctaatagcaatgctcttatccaaatcataataaacctgatagaattttgataattgctactttagtatggttaaatctatccaaaataaaaaataatatgaaaaaaattgttcaaaaaattaaaaaaagcttaacactattttgaaccttgtgttttgtaaaaattatcaatttaatcatttaatttgttaaatgacaaaatagaccctgaattgattttttgtcaaaataaaacttgataataattcgatataaagatgttatgacaaaactagttacattttttttgtatctattcgtattagaaattgtcttaaaaataaataaaattgttgaaaattgagcttatggccctatttttatcattttagaaaatataagatctattttattatttaacaaaataaaatgtccaattgttaacttttgcaaaacatagaatataaaatggtatttactaaaaaaaaaaaaatcttaaaatacgcttaaaacgcaccgtattacttgatgctcggcaaaccacttgacacttgtcactctcatatatcgtaatcagaaccaaaacgcaccgtattagattcccttaccaaaccgaacaatttggaggcagagaagagagagaaggaagaaagaaagaggggtacagagtcagaaatggccacttccgcatccgtggatgccgtcgcagctgcaaatcttcgttctgtgctgcaacgcgtccagcaggccgcagaacggtccggccgagggccccaatcgatccgtgtcgtggccgtgagcaagaccaagcccgtctctctcctccgtcaggtttacgacactggtcaccgttgctttggcgagaattacgtccaagaaattgtcgaaaaagctcctcaggtttaaattttttaacaggaaaataagtttgaattggcatcttaaagatacacatatgaattatacatgtacataagttaatttgtttggataaattgcagcttccggacgatattgaatggcactttattggaaatttgcagagcaataaagtcaaattgcttttaagtaagaagaattagcaaaaatacttcatcattgacgaaagaagaatgttaaatactaatctttagttaatctaattttatgcagatggtgtgccaaaccttgcaatggtggagagtgtggatgacgaaaaggtaaggactttgtaataagtgtcaatggttttcgggcaaaggtttctatgtaattttaatttatgaagaagtatgtatgttttgataaatgtttttactaagattggctgggatagttttcttgattgcctttggaaaataatatggttttgttgtgtttcacattttaaaattgtgaataattattttatgttgaatgcaacattttagaacaagcctctgtttagttcagtacttgcgtaatttatgtaaatgtgagatcattttatgtatcttcaaatggcatccagctagtatggcatgcttagctgagcacgtttgactttaatgctttatgggatttacttgttgcactcaatatgtaatgcagattgctaatcaacttgatcgttttgttgcaagtcttgggagaaaacctttgaaggttttggtccaagttaataccagcggagaagtgtgtgagttcacttgatcaatgtattttgcaatttagttgtgaaacttgtaattatttctggagttttggatgtatttcttaccatggaggataaaatgactagtaacaaagaactttcatgtttggctatgcttctctgtaaatctgcttgtaatgagttggtgtagttttttatgtcatttactttgttttctccatgaccccatttagcgttgagttatattatgacatagctccaaaaattaaaccaattgatgatttagtcactatcctagatatgattaaaaatgtacccgaagagctgtagatttattgtccattcgaagcgatcttctcttagtttaaaatgaagtctgacttctgctaaataactgcagcaaaatctggtgtagagccctctggatgtgtggagcttgcaaagcatgtaagtttgagatgtccaaatcttgagttttctggcttaatgaccattggtatgctggactacacatcaaccccagaaaatttcaaggtactgtccacacaaatgacttgcaatttcttaactttactcccttaattttcagttgtgattcttgaactttgttaactcgaagtgtttcttgtgtcaggcattagcaaactgcagaactgaggtttgtaaagctctcggaataactgaagagcaatgtgaactatcaatgggcatgtctggtgactttgagttagctgtaaggatttaatcatcgatgcctatatcatttggatattctcagtcaacagtttttttttttccaacttattttctaggccttgctttgagaaggtccccaccatttcattttcattcacattcataaactgaaataaaatgaaaatgtcattacaatagaagattaagaattagttatccgctactaatcaatgcaagttctgtgtataattgcttcaactaattgaaaaattgaatgtttttgcagattgaaatgggaagcactaatgtgagaatcggatctacaatatttggagcaagggattatcctaagaaacaatcctagttactgttctatgaactcgtagtttcatgataatttatgtttttgatagaactctcaaatggagagttgatggtttgagttgtattgtatgtgacctgaatggcttaactgaattgattagatcaacttgaatcatcactataagcgtgggtcaatatcttgcttacttttttaaaaaagaaaaaaaaatagttataacatataattattcttcttatgtgtaagtgtgtgttaatgttaatgtaatttttattattaatatccttgtatactcatgttatcttatcaatttcacatatattaataagtttaattcaagaaacaaagttttagagttgattggattttcttatttcactcttttttgttttggtgtgcgtttatttaaatttgtttggtcatctcttttcaataataaaaaaaatggaaaattctacaatgcactcccttaaaatggatttattaatgcacccctatctgttttagcatccgaaataatttttcaatcaaatttt

SEQ ID NO: 110960 - DNA, 8823 bp, Cannabis sativa
ctttgttggtccttgtattgtattacaatagagttgtaatatcttgattttcttccattgtaataaaatctctaacacttttcttggctcccaaacacaccattttgcctttttcctctaaatacaaagcttggatttcctaattaaaagtgtagaagtcgtgcgagttaagctctcgaagtgtgtcgttcatctaaagacgagaagaaacccagcagttagcatccccacaccaaatcaaaaaataagaacataatctgggggtcccttaattgttgggaagaggccccctccgaacacaacgacccaactttcatcaaagtagagtattgacgccaaacgcaccatatccaatatggaaaacagtagaatgcgtgaaactaactaaaataaaacccaaaggaagaaggatgaattgcccattcgaggagagcctaaagaacctaccaaacgaaaggaaaatggcacattctcaagaaaacttcctagcaataagaagcctaaattaccgcaggaatgtcaagctaagcaggaaaatagtttatttttaccttgaggcattcgcaaaatcaacacccaaggagaaaaagaaagaaagagtacacgcatgaccaaaataatatcacaaggccttcagaagtataggtacttacaaagtgatgatcgagtcaaagacgaaggcaccaggagacaatggcgatagtataaagcttgacaacacctgaggaagagaataaggaagtctggtttgctaaaaaattcttccagtttgaaagctttgaagacttgaagcagagagtaaagtgtgaatattgaagaaggaatgactatttatagcccaaaggacacaatctagggaatttagggatcctacggggccctttgattcccaagaaatacactttaaatctaacagctggggataactcataacaagcacatttatgaggagacatttgggtactcgagtattcgcttgacaccctgcatttatgaccttcttaggaattaatgtcaggaaagcaaataggcatcatcaaaactacgatgaaaaaacacgctgatagacgagccaactcctatgcaacacgtggctcattcatacaagtggagactcttcgtttaccacaccacgagtcctctaggagagaactaaagagtcgaaggttaaagcaagttccacttcaaatttaatgagttggaacttgaagggtaaatgttgaacatattttttaccaaaatacgtggcaagcgcttgaggcaccatgtgacaaagggggcccacctgctaagagattaatactcattattatgaaagttctccatttagtctgagacacatccagaaaggatcacggaccctttgaagaatggttgaaagaatgacggccttggccatccgagaagtcacgaactcccgaatcataggccatttcaagacttaataattcacataacgcaagttccaaagtaaatcactatagacgactaatttggcgcaggattaacatcatcagaagaccatactgttttaacaacccatttatctatgcaaataaagtggtgattatattttgcagtgtcacatcagccgtatatgagataaatcttgtcccaccaaactcctactacagagactaaataaagcctagagaaaaatgggagatgtaccattttctcctccgatctcattcttcccttataaataccggtagacagtaaatgtaaaggggaccttttttagagagacgaatatagtgaatttcgtaggctgtaaactgaatattctttgaaactagagaacattctaaccttcagtaaaagtgactcgtggactaaggctcattaacgctcaaatcacgttaaaaatccccatcctaatcattcttattaatatatgagtaacatttgtcgaaaaattcgatcaacagtttgtaaaaagaaagtttatattttgtgtttcatctaaactaaatagttttaaaaaacaaatatatgtgttgttatttttggtaattgtaataagtttgttttttatgtatgtatgagatattggcggtaatattatctatatacgatttgtgacaattaactcaacaaactgagtttttagtggtaaaatcctctaaactactatatcgttttaatttttacttttttatccaaaaaattctgtaagtgccaagtaaactacttaaatgtatacacgtgtacacgtagtaaatttttagtagtctacataagcatacacatgatactttgtaattattttgtattgtatatataaatatattgtaattttttttagtaaatgtagaatacatatgaaaaaacccctagataaaaccaaaaggtgtccaaactcattaggtccttgcttggtccaataaattttccattttggttgaattaaattaagcccaaagagagaaagaaattgatcgggtcaacctgccaataggtagacctgatcaccctccaactcagttatttggcgggcgagtacgggttcttttttttgttagttgtgttttcgctaatattagtagaaactgtaattttgttgctcataatgtgactaagtgagcgtttatctaccagaagttttactgtattttgattttttctattcttgaacaactattttgtaacgacttgagatctaagtgttttttttttttttttttaacgcttttcataaaataaataaataaataaatgttgagccctacaaaagagggtaatgtctattgtcgttgacatggaacgagatagccaatcggagacaaaagaacacgttgtccaggccatgtagaaaaacgacgaccaataaaagtaaaaaagaaatctccatatttaaactgaaactccacgcttattcaggaaagacccagaaatatttaggtgcatcaccatggcttacgttgaacgaggttagcaatatcccctttttctcaatctttcccttgtttaatcatcgatcttcgaattatgtatctcatcattttgaatcacatcaattaatgctattacaaattttggttttagggtttttggtccccgaattaggctaatgatctatttctattgtctcgtaccgtttgatatcacttgggactttttggattttggtttatgtaattcgatctgtatggttggcgtgtttttagttgcttatgttaaatttatattttgggtgtgtgtggttaaatttccacagttgaagaagaccttcaattttgtttctttttctattcaacaaggttgatatttttatgatacttttgtgctggtttcagtttcattgttaaatagtattcaggtgttgatgctaaccttgattcatttgatgttatttgagtagtcttatgtgagaagaccggtgaaataccgaaggaatttttgagttgtgataagtggcatagagttatttttttgcaatattttatctcaccaatgttaaatgtatatacatatatgatatatgaggagagaggactcagcttgacaatgttattctaagtttctcaacaggataaagtgattccaaacatgccccagagaacaattgatttattaattatctgtgttctgttaaaggatgtggatgttagtagtgttaattcttttgtattatacccccctctttcttttttcagtgctcattattgttaagttctattggactactgatcatgaatcaattatggtgttttcatcctaattttctgtcctgaatttgtttatacctggtcttcaagtatacaaattatttccattttgtattagtcaagtaatacaggttatctgctgtcgacacctctggtaattgttgtatctccatctgttatggtcagtaattaacaccactctcgggaattcaacttaatagggtacctagattagttaccatgtttgtatgtattttttctgctcaccaatttaacagtatacgtaagaagtttatgatccatagttgtttctgtccctatttacgatatctccttttaaattttatggtggttagcctttttctatgccatcttatccttgaatgtgccgtgatgttatttactctaactttgagctctttcatgtctattatcattgagttaagtagggccaattatctcatctaagtctagtgtagtgtgtggagcatctttgtcgattttcttaaagaacattcccataagtttggctattggtacttttagcaataaattgctaatttttttctcttaatgtgatactcaagtttctaaattttgttttatgatgccacccgttacttgtggcccatttgtttttgaacttcaaccttttgtataagttatatattgaatcaaaattgtttctatctaccttacttgggattagcaaattagtatgagtggtttctgtgtatcagtgagacctgcgttagatgtattcgaggagtaatatgtcatgtattgtatgttgtcttgaatatcggcttattgctttgtgagctgaagtgatcaaagtatgaactaactgtacataattctgtaggcgttgttaaatcaaagcgttcgatatggcgactcaagacaataactgattttttttggtccattgtaaacctcataggcgtgttcttctcaaccatgttctcggtaaaatctttatcacaagtgacaagtctttaggattagtttttatttgtaacgagacactgcttatattttcttgacttttatatggtagatggaaaagtcggatgcctacagaaaaggctcggcttctggaaagaaatgggatggcggtggtcctggaggtcctgggggaggaccatatggtggtggtggtggtggtccacgggggcctcgaggtgggcttgacaatgttcgtggattggacagtgttcgagggcctgaccatagtaagttcatcatgagcttgtttcgacttaagtttttattttattatttttccaaaatattttctggtctttcactcgctaaatcaaaacgtgtttatactcaactatcagattctttacctgcctgtggttcctgctgcggctgagcgtggactatgtggaagtgcttgaagcgaatacattgttgttttgtttggaatgttatatttctgcataattaagttgtgaacaagtcttccaacaagaggacataggctagagcaaactgacttaaacttataagtatatattacaaaatttaagtattggtatttcatgcacttgtataattttattattaccattgtgaactgatgtggcacttttcgattagttggcagtttgcgaaaactgcttagcaactgagttgagactgagaggcgccatgaagagagagagaatgttgcttgttgagtgagaaaagaagaccattactgatcagtactctggttatctttcctccattttctctcaaccatgccccaacaaatgacattctatattctaaagaaaggaccctgaaaatcaaatgtgctattttaaaccagtgatgtgaaatcaataactaaaatcatttatctaaacctaacctatgatctacttttcaaaaaacagtgtctcgaccaaattgatggcaaagtaattgaagttaatattagagttttttgtggcaaaatcttttcaactgtcgtttcacttgcatttaaccttctaagctcaaatttcggcggtaaaatcccccaaactactgaactaatagcaaatttaaagtgtcattcagttaattgttactatgggttgcttatatgtacacttttgtacacataacacgtttatattggtacacgtttaagtgggaaagtgtttctaaagctgaaataattaatgtactaattttaatgtcactttttttgcagacaaagtttgtgtgcccatgagataatattaagtttgtggactatgaaattttaaaaggtttgcgtgactgacgggccaattgtataaaaaagtggattgaaaatattgaagagcttggataggagagggcggacatgttaccttcagacggagtaactcaggaggtgtgaaataattgtattgcttactggaacacagaaaaagaaaatatacttaatgaaattattaattttagtaatactttacgttatagtcaacaataaataattaattttaacacaaatatattaatttcaggcaagatcatcaaaaaataaagaaagttgtggtaagatgaaactttaaggaggatggggatcaaagcctatttagcacatgttgtcgatggggtaactttatatatttatttgtgattgataagtattattttttggaaaaataataatgacacttatttttacttaaatataagctaacctcgagacaggagaacttctaaatattgtggatacttttcagaagttccactaagacaaaaattagcgcaaggaatacgcgcaacaagcttatgtaagtttacattgatatttattaatttatgaatatttctttcaatttgttttgtattcaaattgactatttaatttaattaatttttgtaggaccaaatagttgaattggttgtaaatcaatcagagtccattgaggatcaacctgctgaggatgctatagatcccactcagtagccatgagacctgcatgttatgacgcaagtactaggtgagtgatctcgacatttgagaggttttggccatctcccaagattaaaggcagttgaggccaaaagagcaattgccacgacttcttctgtctcaccgactgttactatggaacaatatgaggccttaaaaaaaaaaaaaaaaagtggaggaggcacatcatgaatctcagtattcgaagcagcattatgaaacacaacaactctacatcaagctattccaagatcagtttgagtatctctctcgggttgtgcctggtttcaacatgcatcatatggatcttctgtcattccccactcctcgtggtgctggatcgtcatcgcatcgtcccacgactcaaaacaataatgacgatgacaatgtccaactttaaaacaatatatattttataattaacttttgaacttgacttttttttatttttttcgaacgtcttttaatattttgtttagttactaactttagtacaattcaaacatgtttatatattttagttcggtcgggatactatttaattataaatgtgaatattgttcttgtttaattatgtttctttcaaatctaatttaatatttaaaattaattacaatactattataaattattaaaatataataaattattaattttttttaaaaaaaaaataaaacaaaggctttcacctacgcatttttgtgccagcaaaacttaccttaaatcctaaaccctaagactttttccggtgcataagtgtgccggtataggtcattcccgcaaaaatccatttggaaagtaaaggttttgtcatcgcaactatgcgccggcaaaacctttacctgacaaatgaaaaaacacacaaaactttaccagcgtaaagatgcacagacaaaagttattttacccgtcgatgggcggatttaggtccctactttacaccgacgtagggtttctcccgatgcatagttgcgccagtgaaagcatgtttgactggcgcaatgccaattgcgtcagtaaaaagtcttttacaaagggagattcgtggacaacttttactagcgcatttatgcaccaataaaagtttgctagcgtgttatgcctacttttttttaggtcagtaaaagtaacatttcttatagcgtttccaaaatgcctcatactaatggagtaagtgaaacccttattttcaagccaactcttatatatttttctaatgtgagacttgggttaatattccaacatatctctatcaacactagtaggggtattcattagatcaatatttttaggtctatctagattcgatccaattatatattggatgttagattttaacatctgatctgatctaattcatttcaatcatccaatagatccaacatccattggatgttagatttgatcggttctatcaattggatgtatttcatgtatatctatttgtttaatttggatttctctaatattttagacctataatttttttgattggattggatccatccaatcctaaaaaaaagtaaaattttaatgctaattattatttatatatatgttttttaacgtataataacataaaatcaaattagtcaaccaaattaaataaaaatattaattagtttgattgaatgttagatgtattggatttttggatacctcatctaacatccgatcaaatctaattagatattaaaaaaacatccaatccaattcgatcacaattggacatctaatatttagtggttagttgtaattgaattggtcaatttttattggattgaattgatttatacaaacccctaagaactagtatgcttaagctaataatcatgaattttaaaagccaaaagaaataatgttctattttttttttataatagtaagaatttactaaataccttgtgatataaagtagaactttagaaatttattaatatatattttttctttttgataaaaacaaataatttaaaattttaatttattgaaacaaatattgaaagtgcctctgaatactctattcaaaaataattcaaaaatttattataaaaaaaataaaaatattaagtcccaatttaagctaaatataaataaaaataccacaaaattgtaattagttatatattggaaaaaaaacagaaaaatacaagaaaggaaaaaaaaattacaaaaatactatgggccggcccattaaacatttataca

SEQ ID NO: 110961 - DNA, 31345 bp, Cannabis sativa
  modified_base (29844)..(29847): a, c, t, g, unknown or other
  modified_base (30792)..(30804): a, c, t, g, unknown or other
  modified_base (30911)..(30920): a, c, t, g, unknown or other
gagaccaacgggaggaggggtgggtggagatcgatggacaagagagacgagaagaaagggagatcgagaaagggaggaagacggcgagagaggagggggatagtccggaggcatgggtggggttttggagaattaagattttcgttttagggtgtgggaaatggagaagaaatatgtgagaagaactaggtgggcatgtgagaaatagaaaagaagtaggtggacacgtgggaaatgtggcgagaagtaggtaacgattttttattggactcttacaagggcctaataaatttacgaattctatttaaactgtcgcctattcttgtaatcattattataaaccatcgggaatactaaattatttgaggctagctcaagtgaccataggagggtgtgtcttggaggtcctggttcgagtcccaagttatacataattgtaatatataaacgcttaaataaaaaaaaaccatcagaaatactaatttttttcgacgattttaaacagttgtttaatttttttagtgacggtaaaaaaaaaatatttttacgacggtcgcgaattctcacttttatagtagtctttagaatttcttaatttagtaatactgaatccgaacctccttagtcgtattgacttgagaaaattttgaatagattatttatttggcaactcttttaactaaagctatggaaagctccgcaacatcaaactaaagctccttcttctgtcgttggaattggaattggaattatgaggaagaggtttcaatctgaaggatcttcctcggccgactcgaaccagcccatttctcatgataatccctcacaacctccaacaaaagccccacccccacacaggtcgcctttcgtatggttgactttgttcgtcgcaattgtctattcttcgtggaccgtttaccattaccaatatctgagcttgcctttgcctctcactgccgaccaagctggcaaaaggggtttctcagaggttcaagctcttaaccatgtcagggctttgactgagttgggccctcattctgttggctctgatgctttgaatcatgctgttcaggttggcgcctttccatacatattataacataaatatatgcgtttgtgtatatagctgtgaattttctctagtatatggttgaaaaagatgtaactttgttatgagtagactgaacttatccatgttttgttgctttgttactctattacataagtatgccatatctttttaggtgaacgaccaaaatgtgttttcaaattatgatgtgattatagaggaagacaatgatgttcgtggggttatctataatcaatgaattattcataataggaatatttttagttaaagattagtatttgtgattggtttgacctttttcccaattcgctatgcagtatgttttgtcagcatcagaagagatcaagaaaacagcccactgggaggttgatgttgaagtagaacttttcaatgcaaaaagtggagcaaatataatgactggtggcctgtttaatggaaaaactcttgtttattctgatttagatcatgtcattgtaagaatctcgccaaaatatgtgtctcaagcgagagaaaatgcaattctggtctcttctcacatcgatactgttttctcaacgtatgctccttcatccttgttctctttatttctagtgatgaagggcatgtatagctgtttgacttttattagagcatcaaaatcttagttctatattgttgcagtacacatggaagtttatgaatactaatattctgttcttctttcctctggcattaatattgtttcacatgaatgtttgttgaaaattcttgtcccctcctactcacaaaaacatatgttttacattgttcttgttaatacattattgcttatcaagaagtcattctatgttggtgaaaaattgtcacatatgtttcaggggaggtgctggagattgcagctcatgtgtagcagttatgttggaacttgctcgaggggtttctcagtgggctcatggatttaagcactctgtaatcatattgtttaatactggtgaggaagaaggcttgaatggtgctcatagctttataactcaggtaggaagcatctttcatataatcatctaaatgtggtgcaaagctaaagtacattctttcatgctataaatgaatatatgatataatgaggttgcactgtttttcaaaaccttgtgctaccataatggttcaaaatcagaatatttgatcgtcaatacacgataggagacaaagaagatcttatattgacttcaaagcagagtacagaattgtattgaatcagcaaccagaacttatatttactgcaaattatggtgaaatactggctgaagctctttatgggcatcccagtgatttccaagcatttagaatatgtgattgttaacatacaggctgaagctctttatgggcatcctagtgatttccaagcatttagaatatgtgattgctaacattcaggctgaagctctttattctgttagctcatgagatgcagccaattagtttacgcaaatgtttcagatttgtttggtttagtgccttgtatctgtgttgctttgcatgaaaatgcttacttattaatttaaaataccctctacagcatccctggagtaaaactgttcgtatggctattgatttggaggccatgggtattggagggaaatctaccatatttcaggtctggtagaattttacttactgttctgtattatgtgcaagcataatttcattcattaacatctgtatcttttggttaataggcgggtcctaatccatgggctattgagaactttgcattagtggcaaaatatccttctggccagattatttcacaggtttgtgctatttctcgaatcatgaattaggcccccactccctgctccttctcccaccaaaaagtatatgctgtttgctctgcgaaacattcttagaccagagtgactttgttacaacaggatctattttcttctggagtcattaaatctgctacagatttccaagtatacaaagagcttgctggcctttcaggacttgactttgcttacacggataactctgcagtatatcacactaaggtcttctttcactgctacaaaatatatgtcattttttatctcattgtttttcagcattctgattatattctggcttgatgaagtgaagtttgcaacaacaatttaatgggagtttgtacgaagaaatccaatctcttgctactattatttgtcttgatttagaatgatgtcatcaaaatcaaagctgaatatttgttttgtacaaaaaatcgaagctaaattgactttttcattgcccttgactttttccatagatttgcaagttaaattggttctgtgaaatgtaatttttgtttgctagtcataatagttagtgttcatacaaatgatgcctatatctataaagcatcagcatatatatactttgatgaaaacttttgaggcggattttttttctaaccctccaaatatttgcagaatgacaaagttgaactcctgaaaccaggatctcttcaacatcttggagaaaatatgcttgcttttctgcttcagattgctagatcttctgacctttcaaaatccagtgcagtagaagctgaggaaaatgctgggcaaaacagagccatatattttgacattttggtatagttacaaacttacaatacacaaactgctataccttcagaaattttacaacgtgtttctaacacctttttcaaaagtcagtgtagttctaatacttgttgctttctcaggggacatatttgatcgtattcagacaacacttttcaaatttacttaataattcagtgataatgcaatcacttctgatttgggttacatctttgattgttggtggttatccggctgcaatttcacttgccttgtcaagtttgagtatcatccttacgtggatttttgcagttggtttagctgttcttgttgctttcgctctaccctttttatcctcgtccccaacaccctatattgcgagcccatggttggtgtttgggctatttgcagcaccggctcttgttggagcattgattggtcaatatattggttatcttattctccaaaaatatttgtcaaaagtatattccaagagaaggcagctctctccaataattcaagctgatgtagtcaagtttgatgctgaaaggtggctctacaaagctggatctgttcagtggcttgttcttctcattctgggaaactactataaaattggttccacttatctggctcttgtttggctggttccacccgcatttgcatgtatgtttagatttacaagtatcttactttggttttgatcaataacatttgttttgttataagaaaatatagtacatcaaactctatgttttgatctaaacacatcttaatcaatttgttctactgtaatcttcagatgggctgcttgaagccactctaagcccagctcgattacctaggccactcaaactggctactctcgtgatgggcttggttgtaccaatattattatctgctggtaattttattcggttggtcgacacattgattgcaacttgggttcgatttgataggtaattatagctgtacttttgttgaaacacaataaacaataaacactcaaaatcaattttttgatagcgaaactttgttgtacatctctgtgtttgcaggaatcctggtagcactcctgagtggctgggaaatgtgatagttgccactttcattgcagttgtcatgtgtcttactctggtgtacctcctatcatacgttcatctttcaggttttcttccttagataaattttattcaatcattgctgacattgtcttgcttatgcatgtgcgttaagtttcatataataagtttgtgaagtaggtgttgtcaatggatccaccttcaagacattcaagtatgatttataatattgaagttgttgggttcatgtcaagtaactcctacccaaaataaaacagatcatctatctgtgataaatgaaatgaattttggtttaaagtatcttgcagctgtttaaaaacaaatttgcctgcacaattattatgaatttcttaaccattttattagttatcctgataagaaaatgaagccagcatggaatgctaccgtacttctgtctcttcttcattactgaatggtagctttattgtttcatttacaccatttggcactgagatggaaataggcttatacaatcttcttaattaaaaaaactagctgttatagagcttcatcttaatgtaaaataatgcgcacacatttgttgctacactaattgattcctttattttttttggagttgccaaatgatattttctgtttacattttttatttgatgggttgagcattaatttattcttcaaattgactgttctctcttctttgcttcatgaccaaaactcaaagtcacaactgatgtgtaggtgtaaagagagtgactatcctctcatcctgcttgttgcttgctctctcacttgctgtcgtaaaattggaaatagttccaccatttaccgaacacatttccagaactgttaatgtaagtttgtgtgttcactcttattgtgttatcttagattttgatgttccgatttctttacttcatattaaagagagatggtcacatggccattagtgacctcctcccgagtatattgagagccctaaacctattgttattgagcaaagtttaatgtatgtatagttgtactagtgaggcactctcacattcagtttttagatttttcaagttaaaagctttagcccataggaacggtaggcctccctccacccaatctccaacctggcctggccgtcgaacccattcctaggtccataataaaggcgaagacagaagaggtgcatttgactgagtgggtgtttttgatcatcttgttacctgcataacatggataatctcattttgcctatgccaatccttttttttttggtgtgtatgcgtcttcaatctttttcttaactgtgaattacaatttcgtgtgttattcaggttgtgcatgttgtggatacaacaggaaagcaagatcctatctcttttgtttctatgttttctgcaactcctggaaagttgacaaaagaagttgaacagattaatgaaggctttgtatgcggaaggaacaatgtcgtcgactttgttactttctcagtcaaatatggttgctggacccaaaatgatactgaaggcggatggagcaaatcagaattgcctttgctgaatatcgacagtgatactcaagggaagaaaaggatcactcaagttgtgattgatacaagattttcaacacgctggactctagcaatcaactttaaggaaatcgaagattttgcgttaaaaggtataactaaaatttgattatgataaacacagtcagctcctgaccttgtcctatagctaaaagtttgatttttcatacacaaattcacatttttcccatcttttggattttgaaaattaattgacggaaatgtttttgtgttcaccattttcgaatcatcttctgatgtttgacaaaagcctcattactacattctttagtgtcattttatgctctctctgattcttctctacctctcaatctcagatgcaggcagctcagatgaattagtgccagttggtggcaagagcagtgttgacggatggcacaccattcagttttcgggggggcagaaagcaccaacaaagtttgttctaacacttttctggcaggaaagttcttctcgatcagctgaggtcgtggacgggaagaaacatgatctccagcttctgaagctcagaactgatatcaacagacttacaccaaaagttgatagagttctttcgaagcttcctcgatggtgttcaccgtttggaaagtccacatctcctcacaccttagcattcttaagtagccttcctgttgacttttagctcttcaatttctaggattttttatttttatttatttatttgggaatagaattagatgtatattatgaatgagttgcatttaataaatttatcatatatatttttcaaagaagaaaaggaagaaaaagaattaccttattttgccttctttttcagtgaatatgtgtttagtttacacatatttcgttatagtatttggttgtggtaaatcaacaatctatttagttggttttttatatcttgatttcgattgtcgaataataagttaataaatatagcatactaacaaaattgtcaaatttgtccattctttaagggttgacagttcagttacaaattattgtaggttagggttataaaaaatatatgcaatttaaaattaggttaaatgcaaataatgcaataattattttggttgagttagggtcaaccttgtgtaggaatgcacacggtgcaagtaattggcggaaagtgctttctctattctcattcccattcctattaagaattttaatctccatctctacatattccctctcagggacgagacacgaaatctctacatagatccatgtataaaataaagtttaatattaaatatttaagtatataaagaaaataaatttcataaaaatttaaaatattatatattattcagtaattattatttaatataaaaattaaaatttgtaaaaaaagttactaatatactaaaagaaaatgcataaataagataaaaaagtataaaatacatttttaaaaaatatgaataataaaaattaaaatgcataaatttaattttcttttttaatattaaagtgtttattatataatatagggggttgtaaaatattttttaaattggctaatgtgttacataggtaacgttggctccttaaacaagtgggcttgaatcacacttaggcatcaatgggtataaagtgctcatattatgaagaaaaatatgattatagaaaaatatttaaattgtgtttggttgtgtacggtaatatataattatatttccgttagttgaattacattgtttagttgagcacagaaatcttatatattattttaaaaaactaaaataaataaaaaatattttattattatatatgtttaatattaattatgcataaaagtataataattattcgtaaaaaatatatttattaattagtaaatataaatctcattctattttttattaattaaaataaacatctacatatattttatcactatgtcatttatctttatttgctatgtcatttatgtactcaatctgcataaaattgatatataacacatatacatactacatactattgtcaataacataaaaataactcaattaaaaaaaattacaaactaaatatatatcctaatatttttttttagaataaagcataatattaatgctatttacatttattgattaatttcataatgttattcaaactaatataactgaaaggggtagactttttggtcaagaaaaagataattgggtctggacaaaagagcgtaatgagcgattttcttacaaatcggcttatcttattcaagctttacaaagggctccttgcgaggttgtcccttccctttggaatagtaaaatcatggagaggcataaggttctttagtggagcatcttgtcaaacgctttaccaattaaggttattctaaagaagagatttcatgttgatgaagtgaagtgtcctatttgtgggtggaggagcaatcaatggagcacttgttcctcaagtgcattctagccttccatttgtggagatcttctttgtggtgtattttttttgttattgatttcggcatttgtatgtgggattgggtcaaattcgcatggagtctaaaaactaagggcatcaatgcagatgagatctttctttatgcttcagtagttgtttgacactacaatcataatattaataatgtgaaacattgtattgactcaattcattactcttatgaaagatttgagagcttctcttatccttgcttctactccaatcctggtgaaagattggcgtcttcctcctcaagattggctcaaactgaattgtaatgttaaagtgaggttggaaagcatgtgtattgcggtagttgctagaaactattttggagaggtggtttgggttagcacgactagtttggttttttaggatgctctttgtggtgagacggctgcttgttgcttagctctagaaatggcaaagctcaaaggttgcaagtgcatcatagtggagagcgactttagggtagtgatcaattctctcaatcacaaggtttcttgttgggagattgagaactattcttccttttgtaataggctgtctacttattttgtcggttgtttattttcttgcacttttagaatttgtaattttgtagcctataatgtaacaacgtggacatttactcaaaaatagtatggtagcttgtctgtatcgtccattccaactaacttattttgtaatgactatgagatttaatttcttgtcaatgaacgttttcattttcaaaaaataaataaataaataaataaagggataattcaagcccatattttttcaaggaatcaacattaccttcctcaaggatagctatattactgaaggaataatattacaaagttaaaagaaggtaaaccctcaaaataaacaatgtaatattttatattactattttcttgatagcattaactcattccaaacaaacttttatattaatttgaatagtattttaaatgggtaaatactattttggaccatgtattttgcaaaagttaccaatttgactatttattttgttaaatgacaaaatagaccatgtattttcccaaatagtacaaataggaccataaactgattttttgtcaaaataaaatttaattattatcagatctaaatgtgttatgactttatattttttgtatctgttcgtgttaggaattatttttaagttggttatattaaaaaaaaaagttttcagaaattaagctcagggtcttatttttactattttgaaaaatacaggattcattttgtcatttaacaaaatagaaagtccaatctgtaacttttacaaaatactgagtccaaaataatatttaccatttttaaattaataaatgaatttaaataacattagaaatatatttcaatatatatttagcttgtgagatagatttttttttcttctaaaaaaattgaattattttatatcattggcaataatataatatatgggacccgatacaaacttaacgagattctttaaaaattattttcttaaattatataatatccaaatacttaattataacaacattaatgtacagtaataccaataaaaatgttaggtattaatagtatcttctaacaattttcataaaaaaaaaaaaaacaataataataataatattaaaaaatcaatctttggtgtcgtcttctcatctgcaattcacaatttttaataattttttggaagaggggtgagagaaagtgagaatctactgttctcattctctgtagagagagagagagagagagagagagaaacagaggaagacgaaccctccaactccaagacatgcggactgtttcattgggattatcggcatcttcaactgccattaactgttctgctactgcaactgcaacgccttctcttctcaactctttcaatcccaacaagccaaatccttacccttctcctcttcctagggtttttaactccactcatccaatctctctcctttctctctccaaatcaggtaccttacccaattctccgttattttggaaaacaaaaagaagatctttttcttttatttttttggctgattcaaagatggttttttctttttctgtttcaatttcagatttggagttgttaaccaagaaaaaagtttccctgaaactaatactaaaatatctgcgtataattcttctgtttaacaaaatttctagcctttaggattagattgtggttcatagcagtttcaataagctttgctttactacttagtttcccttaagaaacagccatgtacggtttgcaattgaccacagcttctttcttaacattttctaagtaaaggaaagaagagaaaaataaggctatgtttagtgtttggtgaggaaagaaaaaggtggggagaataaaaaaaaattcaatttttcagtatgaatttttttgttgaatctgtgttttattttcttttcaatacaaatttatttatttttattttttcaaatccaactttgaggtaaatttgtgaggaataagggagggaaataaagtaatagattgttgggcatttgtagtttcccacttcaaagattacttttggttggtttatataagtaagtagtctgctttgtggatgtaggagtgtgcagagctagtcaagtggttgacttgtttccaacagtgtcccctgagattgttgttcgggaggcaagattagaggactgttgggaagtggctgagactcactgcagctccttcttccctgagtatgccttcccattagactttgtcctaaggattgacagaattgtgggaatgctggctggattttcgattccgaatggttgtaagagaacttgtttggttgctgtaaccagtagctcacttgatgaaacattcctcttaggaactcaagacttaaagattggaggttttgatgggaaaattagtcttaataaagggtatgtgactggaatcttaacagtggatactgtggctgattttctccctaggaaaggacctctcaggcagagaaggtgagtgagtttttattaaatttgcttctagctataagtgaggttttgttgcattgagtaaatttactttggattatagatgaatcctgccactctgttaaagaacttttcagactcttactttccctcaactagaaataatttgtgaagactaacaactaagtagaatccttactgtgacagcaactaagtagaaataacactaggacataatttaattctaacaatcacttaataaatagttctgctcaggttttgcatccattgttaaatttgtctagacttgtggataactacaggggcttgttttctaaaatgtcatcttcttaactacaggactggcattgcatacatatcaaatgttgcagtcagggaaaaatttcgacggaaaggaatagctaaacagctcgtagcaaaggcagaatctcatgcacagagatggggttgccgagcgattgccttgcactgtgatctgaacaatcctggagccacaaaactgtacaagagtcagggtttcagaagtatcaaggtgccagatggagcagcttggcctcagccaaagacctctcctgatgtcaagtttaatttcatgatgaagcttttgaacaattctaccactgcttagattctttgaagaccatagaggaaaaaaaattgaaaagataatgtgaaaccaaaaaacaatatgtaggatatctgatattagcttgtatatattataatcggcttcaacttgctttgtctgcataatttcgatactgatgtgttttatgtgacatgaacattttgtcaaacgccaaagttgtatagtcataatttatttgatttagcgttatagttgtaatattggtacatatgttatgttgagataggagaatgaggaaaagtggttggctagctcatcaaacatttcatgtagattttgagagaatggacaaatttaaagcttctatctcaataataatcgttgttttgtaacttagctataattataaacagtaaataccacagcttctagtatcttaataatgattggagcattattctcctatttctttagagtattttcaatcgagatgtaaataagtgatgcaaatataaaatgtagcttactttgttaaaagtctaatgattggagcattattctcatttctctcaattttttctccatttctttagagcattttcaattgatatgtagataagtaatgtaaatatgaaatatagtttactttgttaaaagtctacattaatggtatgctaaattatgatgcaaaaatctcacataatcaaaagtgatctaaatttacatcacaatatagcatgatgtaaaatttacatcacaatactattttaattttataattatgctatttttaatattttataatttaattttaactaacatactctttgacattaaataacttgcattattattattttattattaaattttacatttaactttgtattattattattttatattttttaataaattattaagtgagcattaaataacatattgaattttacatcaagatttataattatgcattctaaaatataacccaacttttacttctaataacaacaagtacgatttaattgcctttaaattttaacaagggaacacaaattgaagattttaaatgtaaaacattttagctatacaacacaattcggggcaataatatttgaccaagatgcatttttgattgtaagttcatttataaaggaagagttaatagacaaaactcacaactgctgaaacataaaatgacataaaaatttctaaagtcttcactttagaattattctatagccaaatgttggtcaaccttaaacttggcaagtgttttcaaaaccctcttagttactgcagccaaaaaagaacacacaagaagttgcaacttaaagacaaggaattgcagcatttgacaaatgctaaattattatacttggacgaatttgtccaaggcagatgtgtccaaagccgagaattccttcgtagccgcaagcacaaaatggccaagcttcacagcatcatcgtggctcgatgcctacaggggttcaaattgcattagccagagattaaatattacagcctagcctaagcagaaaaccatatataagataaggcttcaatacctcaatgttcaaaggaagcacggggtcatgaagtgaaagtctgagaagaaaccaacctccgaagccagaaactcgaacctgttagcaaaacaaattgggaaattgaatcaagagcacatgacgacaacaaaactgaaaatgttaaaatcaccaatatttaaccaatgactggcatctcgattgcttccaagataaatttattaaattgtatgcaaattggttttaagaaagttacaggtttaaccccatgtcagacttacgccttcataatttacaggagcttttctaagcatttcatctgcttcaatagagttctccagatgtttcaacactgcttctccatagttgcggaatgatctggaatcactaatctattaggtgggtcacaataaactcacagcccatatttgtaaacaaaaagtataagatagcataccctcctttaagatcaggatgattttgattgatctttagtctcagttccacagcaacagctggttccttcaatccttctacaagatcagtcagtactttgctgccaataccctgtcctgcagccctggctgaagcaagtttattcaagattttgacctgaaaaagtgaatataataataataattagaaaggaaaaaaaaggacggaacacacaacaatgaaggaaaatgaaatttgtgtacaagttgagtcaataatctaccatgaggtatgctccatcatcaagccagtggttttccttaagagctccatgaccactagtttcaattgccaaatgtgattcctcgccaattgagttctgtcacaaacgaaacaagcttcaatttgaaaggtttaatgacactaaaatagtactttataaactaatgccaacaaatgaacaatttgtactgaaatgaacgttaacagtgagtacacacatcattaggatagaatagtgtcatttttaatcaccattctgaattccagtagttggaaatttctaaaagaaataagacatgtcgtgcttaaaaatctgtattcaattgcagaatttttgattgctttctaaccagtttaattctcaagaaaacataggcagctaagagatataaactaccaaacgaatagcttcatcgatgacattcttgtagcctcttttaaagcggtgatgcttcccccctgcaaggaatttgaaattataatcgagtcatatatgttaaaaagatagtgtatttcccattgcagattctgccttaccaagttttttctcaataaatgtggtcagaccatctgatgtcacactgtctgtaacaatagttgttccaggatgctagggtaggggtaaaaaaatgaaaaagaaaagagcaagatggtttaaaatgatgaaacaatagcctaaaagaagattgaccatgaaaaaaaaaacttacttcttcaagaacaatggcagacattaaggcaatcagtcgattccgattgaattcacgaccagtagaatccacagcagcagatctaaagcaaatacttgattaacataataagtataacaagtggataatgggacttgcaaaaaatgagttacctgtccacatctgtatcgaagatgatccccaaatcagccttgttatcaaggactgccttagtgatagctttcattgctgtcttgtcctctgggtttggaatatgatttgggaacatacctgatttcagaacggacttttatttcagaacatcgatctattattaattggaagaaaaaaaaaactgaaagaaaagaactcttaagcattcaagatattatttactcaaaaaaaaaaaagcattcaagatattaccatctggctccagaaactgactaccaaatgtgactgcccctagaggctcaagcaccttagcctgacaaaacaacattttattgtatcaataaaataaacacatcacattccatatatttaagaccagaaaacaagagcaaaagcaagaactgtccaatttaaagcagttctaaacacagtcaaatcttcaaatccaactttcattaatttttttatggggtggggaaaaatatagcaatagtgctttttccatgtaaaaggcgttatcaccatctcatcatttatataatagaatcccataatcaacaaatactttcatataattcttcaaagatagaatagcacaatcatgaagataaaacaaactttaagtaaaacttcagatggaaacttacggcaaaaaatccccctgctccattccctgcatcaacaacaatgtggaacccttccaatggcttctctgagattagaaaaatgcagagtaagtaactaatatggtctcacctcaaaggagctgctgctactagtgaattagagagaacaaatttgtactggacatagaataagaatgcagtatagtacagtgcacgtaactcgggagaactatattgaaatatctcttaactcaacaaatggagctgatctactaaccaatccctacgtacactttgggttactttaaaggcctccctctcccaaagacgagaattttccaataccaaattctctttcctctctactgtcctcaattagaaagaacatattggaagtgaacctagaataacaatgtgatgagaatttaataaagtacacatatttcaagaaaactaaactgaaatagctcattatcagacatcctttgcaactccaactatattaactcaatctctttttctaagacttcaatactcctctccaccttcttgtaattatttacccagaatagtgactgtaatgccacttactatataaaaaaacattatcttattaggttagtaggcccggaacaaaaagatttatagtaccatttcggtggaacacataggctgaatatggcaaaaaccatacctagatacttgaagatcagttctaatatagatcacactaacttaggagaaagttatagaaatagctatttattaagcgacgaatttggtctattgaccaagccctacataaactttgggttacttcgaaaagttgccactcccacagacaagagagatgtattaaataattctgcataattctctactggcctccctctttctttttatataatcaatcagtacaatcagtgtaacggatatcaactgagtgttactaatattaactgactaaaagaacagcaagtccaaaatgtcgcaactatcccatatacacaagctgcctatcacaatattaagttcctcagatatagcacatagtcaggagtgagaaagggatttgatcaagcatttcaaatatacctaaattccccgcagcctttcgaactgcattcacaagtccagatgtatatacagacatgtaatctactctctttactaatgcagaaactttctcctcagaagaagccattccatctttaaatttactgtatatatctgcagcgcgttccaggatgtcctttatatcaggttttccaagccctccagcacttgtgaaaaatttgaatccattccggttgtatggaagatgacttgctgtcagaatcatttgactagttagccttaaaaaaatacagtaacaaaaaagacactaaagggtgtatgcccatttcctatgcagtgtaaaacatatctatgttataaatctaacaaaagagacaaagcacctgttatcattatggaaccgtcaactggacataagtaagcagcagaatctgtcagtgtgctattaaacattgctggtgtagatgctaatctgcataaaggaaaacaatacatgtcatgcatgacctgttaccgtcatgagtgacagaaagacagtagcttaaatgttcttaacgacaaaaatagacctcaatcaatacaaaactgtagacaactagagcataacatagaatataaccaatcaaaacatgacaaagcagcaaagcaattatcagccaaaccgtggcgttatctattgagtcaaatgtaaatataaaatttgtagataccaattgagcatggtgactggtgagtatctatttggtgtaccttatccaaagtattgagaaagtattaaaaaaaaacagaagaaagatttgggtatgatctttataaccagatgtgatatcaatgacctagctagaaaatataagcacttaaagtccaaagctagttgaatcaaaagtaaattatgcatgagtctatcaaatttgcaaatggcctactccaagtaattgttgacataaggagctcttcaagtatcaacaagaaatttacaccaattcgatcactaacccatattgaataacatccagtccagcaccagaaattcctcgagagattgcatcctgcaagttggataatcaaactataattattaaatatatctttttattttattaaatagatataagaaatacacaagaccatctcagatcttgaatctctacctttacacaccccttggtcaaggaatgatatacccattcagcattcaaggaaacatacgtacctgtaatgtttgtgcagatatacgagagtcatgaccaatagaaacacttaaacgccgagagccatcaattttcttcttttccactagccaagcagaaaaggcagctgctattgcttctgcaactggttcagtgagattgactggttctccctcaaccccaggaatggcaacacctcgaatatcactatgtaaacatcagcaaataagagtatttattaagttctgattacaggaaaaaaatgttttatgaaggtagaagaggaaggagggagatgaagaaaagcaataacagaaaaacatatatgaattgggtacaagttgtcttctaagcagaaaattaaaaacagtgataaatcatatagcacataaagtttatggaaaactcatctgttaccttccattttgaagctttagaaaatcaactttgtctagaggcgataatgcagtggtagatggagccgctgcacataagtgaaataaatacacataagtttcaaatgagtgttttttttttttcctttatagaactctaaccataaaaagcaattgagtgacaacataatgcaaaatggaatggggcatataatcatgacaacttgaatttttttttatcagttgtttcaatcatcaattatgcacttgatatcaacctgtagcgagaatctagaacagaccattgcaatgaacagttctccggttagcaaaaccactctggtaatttgataagttgcgcaaatgcatggaagagatgtcagtcaatgttaccttccctccttgaaagggaaggaacttgcgcatataagggacaaaatggtccccttgaaattgggtgctggactgtctgttttgtgggtaccattgtgacacaaaaacattttggacaatcttccctgacattgctgcataaaaatttgccacttaatcagattcattcttgtgtaacacacgttttggtggccttagattgtcaaacagacgctctaagattgacaattcatcgttcataagttcaaagaaacgattcactagttcaactacataaattgctgtgttaccttctttttttatgaaagaaaaagtaacgtaaagaaatacagaagcaatgagtgactattagctagagttttctgagtcatatatttaacaaagaaaactcagaaacccttataagttgaattcaagtgggagaagtctaattcaaatattaagtatttccaacaacagacgcagaaaaggactgagaaggtaggcaccatccataacagataaaaggtcataagactaaagaggtgaaaaatcacgcacgcatagctaagtgcatcattttagcaccaaactccattaagaggagcttaaaacaaatctattgattaataatcaaaatccttcttatagcaaccgaaacgaaaagtaaggccgtggctaataataatcaagcattttaaaaacatgaaaacgtcagtggatagatatcagagtcgattgaattcattttcaatccggattcaatgtctgaaatgattttattttaaaaaaaaaacactttcaattgttccaattaccaataaatcacttgatttcctccatagctgagaaataaaccacaaaaatagataactaagaagagattgaaaaacttcacctgccatctgaactaaattcagaatttttggccgaatcccaatgaatatagtaacgagagaggaagacggagatatcgatagaaagcaagttgaaaaagagaaaagagtagtagtggagagtggttaggtgaaagaatctctcgtttttctaccccagctcagatgtgtttggcagcctcaaactcaaactccattgtatataactccttgacacgtgtcatgtaccttatagcatcttcgtagcatatgttaagaatgttaaaaatttgagaaatgctaaaaggaagtggtgttttgtgttaaactaagtatgaggtctcatataatttaatataatagtttttagggaatatcgctaacgaatcgtaacacgacatatcgagaaagtgctaggcaccactgaggcctaatagctatgctttaaaattttatacatcatttaaaaatataatattttattttatctctcttttacattattttttgaactcttacttctaaaaatactccaatgtatagtactttttagaaatgttataattataatatcactcattattatttaatatatatcctaatttttagttacaataattttttagcttcaattttttatttaaaaaaatgaataacattaatcttaataatttgccacataatatatccacctcacccagagatgttcttaacaaggtgaaatttacaaaaaaggacaaaataatacatttggtaggaatatcaaaataaaccattttatctttttggagcagtttgaaattgatttggcttataacaacattatttgggaaatttagcatttgaatactacaaggcaaaaagagagattaagtaattaagtagtctaaattgaagcaaatgaaaggaaaaacatatcaacagagtttatattacatagctcttgcactaattaattatggctcatcatttaaaatagaccactgtatattaatccaaactctaattactgtgtcaaatctcaatttcatctttgtaatatttgcattttcagatagtaaatttgtcttcaaatcaccaacttctgttctaatcttatccatttgcttactacactcctgaacaccattcataacacctcttagctccttctttatgttgagtttcgaaagagacaaataaggataacttaaaatggaatccaaatacagagcttccttaaatatcatgtcaaaagtttgatcaatcttgttctcatcatcaacactaaaatcatcttcatcatcatcatcatcatcaaaaggctcaaagagttttttaagttctttctcagctttttcaatcacaaaatgaaacctcctcatgacacttgtatgcttttgctggtactgcattagcaatttcagcacttcttttaacagattccattttccatacaataatgaattttctgagatgataaacataagatcacaaagattgaaacaaagatgttttccaatctcaatcatagcagaatgtgtacaagaaattgtgataaattcatcttcttgatcaagaaaaagcaagtcaatgaaagagaatagtccttgtgcttgagccttcaccgtttcgtttcgcctctcaatcatcatttcccgaatcctgttcttcaatccaaacttagtcttcactatcaaatctactgaatcaacagcaccagcctccattgaaagtacatgtttcgaagaattcggaaggtaatagttcttgatcagtttatgcttcctgttcaaggagatgagatatggatcattgatttccaaatcattgaataacaaatcgtctagctccaacttcaagtcatcttcttgttctttcatgtctttgaattttttctccaaaagaaaaagagtaaacttgttgtaatacttatgtggtgggttgagtttggctgaaatcttgaacttggattcattgttgccattttcaggatatgaagaaaagcactgagttagcaactcattaaactttcttctcacattttctcgatctttatggtattgatcatcatcactcaaggacttgagctcttcaatcatggtgtcattcgtttgaattgacttggccaattcacttgctaatgactccacaatatcccccaatgtagaaatattgcaggccattgttgtaccaagaaaatgaaaacagagagattttagaaaggggttgttaaactcaaaatgattgtgtaatttatatatatatatatctttcgttcaagaatcgagaactcaagtccgaaaatagagaagaaaataaactctctgtttcttttactgaagtttctctcaaaaaaaagtgtcagtaactaatttaactaccggaagtcaggtagttgtaacatcctattagatgtcttgaaacgacacaaacgacctttctttgaagagtttgaacgatgtcgttttacatgcacactttctctctctcttgggggaataccgattggtaagaaagaaagccagtcaatatgtccacaaaaatataaatatattgaaaaaactggcagaaaaaaaaaaaaaaagagtaaataatattttaaataagaatcgatggctgtttgcactttgagcctaattttaatcaattttttatttaacataaccaatttacagacagttaggaacagtaaagcctgtaagttgcatcaagttataaagctttgaaaaattaattaaactaattaataagctggattggaaccaaaaatctattcataattttttgatcaacaagaaaaaatggtggcttactgttattaattagttaatttttcagtcacaaaatataacacaagggttttgaattggtgtaacaaagatttgagactgttatattactgacaattaattaaaaactcttacaaaaaatatattgtctttaatattggattggagtacataaacatactaccaaaaaaatatatcttatcctaaaaaataaaaacaaaatttcctaaaacaaatgaaacagaaaactgccacactatttcagagaaagacaactttgtgaaacaaaaacaagctataaaatacactgcctattccgaacaaaattctttcactttaaaaagccacacagcccccagattctgatcttctctccagccattgtcaccgccttccatacatgtttttctaaagtttcaaaatctacagatttttttggtcagtttctgatgtgttgtatgagtagacgagcatgggttttctatgcgctcttacaagaagaaaatctctgcatgcaccagccactgagccacttttcttttcaagaattagaaagtgggaagcaatggtctggccacctcggatatgcacgcttatacaagctcatgcatacggtatcatgctgctgaaggaccccattgaacaggcacttcatagcccctgtatcaaaaaagaaaaaaatggaaatgtttaaggatgaaatcaatgttgaggccataaaaaattctaaagagcgtgtcatcaattggtaaccactatgaactgacattactagcataagctaatctagtaaaaatgtctataatatgtgttaaactgatttccaattactaaggatattgaggaagtaattgaaatggataatacataatgtgaaaaagcgatctaaaaagttattcttgagctaggtatcttaccatgtgtaccaacaggttccttaacgcgaccacggcgaccacacttggagaacacttccacaggctgaaaccaccaccaacaaaagaaacagtcatttaatgtatagcgatttattttttttaagctacacaaggattgtgcgaaaaattcagggaaaaagtataacagagagtttctcaccttgaaccattttacatcctcagggttatgaaacatgtatcttacagaagctttcaactttgatactctttgagggtagctgcaccacaaaatatgcttcaatgttaatatatcagtcataagtaaacattttataattataaacatacaatcatctgaacatttacgttgtaagatgtaagatgtaagattcatgcagtggagaagtaaagagcaaatttattctttttttagttggattggcacaaagaaagtaaatgcacattaataggctatcaatcctaacattttaatgtaaaatgtaaaacaaatggaaaagggaattacatcatatcacagattattaaagttacataacacaaatttttttcaaaagtaaacttctaaaggatcaagtaacaagagagagcgttctaaaatatactagcaaccacattttcatataaacaaaagaacaaatcatacccagttaaaataatcttcttcaaaattatcctgtctgggtcaatacttcttagagaaccaacagcagcaactgaaggggcaacatctccttcagcatatttgaaggctattaaaggaaggggagggaacgaaattggagcataaactgatgccatggagaaacgtccagcatgaagaaacctctccatcttgtgcttgtttgaattcatgctatcagtagaatatattggcctacaaaataataaaacgttaaattaaaattctaataaagttcaataatgctagagctcttaccgttagaatcttaccttgcaataaattggcgaaaaccaacgtgaaacactagttcttctttcgatttgatgggttcagtatatgtgtcgagctttttaatgctgcaaaaacaggtgaactaagtcgtgcatccatttgtactgaacagaacaacaaaaacggcaaaatgccaacatgcacatacctgaaatgaaggacagacatcttagactcgtgctgcaaaagcccacaggctatgacaggcattgtttttgaagagatgcataatttggaagcaacaccactgggtacttctttaatgtatagctttgtgtatgaatttgccggtacgcagtcatccctgtctacttgctccatttctaatgccttagaaagaacatgcttctgtgttcgtgcaaaattatcaaatgcaaaaattctggcatagtcttgaggtaacgattcctgaaatccagagaaatgcaatgttatattcccaggctaaaacatccaaatactgaattataatttatatatataatatatatatagcatttcaaagattactttgggatcccatgaagaggtacgaaaggacttaaggcctctatacttggcgaaccgctttctcgcaggaatatctataggggtatccacttcatcgggaaactctgaaacaagcaaccataaaaatgagtgaacagaataggagctcatctgaagaaaaaaaagtttggtctaatagtggagcatgcagctattatcatttgcaaaatgtgaaagaaaacttaataaaatgcagaagaatttgtagaatctcaacaagattgtgagagcttcaaataatttacttatagcaagcaaattttcaaactgtgtcatgaatttgttcaatcaaaaggttacgaaaaagatacataccctcatcatcagcgtgttcttttttcagtttttgaatttcatttaccaactgctctctagtcaagttttcaccatcctgcaaaacatagatgagaagcataaacatataagatttacaactcttttatccgcccacacatccatattaaagaataagtatgaagaagatattgtgtgtacatgccagtctgataaattagtcttgtttttacattgctagtctatcttcacatataagatattttgattaaaagtatggctaggcattctcactagtaaacagaaactcacgtcatacaaatttcttaaagtcaaaactcaccatcatcacagaatcaacatcagtttcttcatcagagtccctcaagttcaaagaagcattatcatcactaagatcataatcattagtgttcttttggccaggaaaatcactccccctttcatctaataccatgccatcagcttcatcatcaccactatcaaaatcctcttcatctgtatcatccacaatccaagcagcctgcaaatataaattgctaacaaaattgaagactactggaaaaaaaaaaaaaacagtagagataaaatagaaagtcaaacaagtcactgaaaagaaactttacagacctggtattctgaagtgcctcgaggaagggtccgtgttctcaattttttttgttcatgatgtttatcagcctcagcaatttctgcttctgttggccaagtctgttgcaaaatttatagttttatcacacttacatctcacaaggaacatcataatacatttatttttttaatgagctgtagcaaaatatgaaataggtttaatattgtccagccaatcatcaaagactagatactaaaaatagttgtaatctgccaacagcacattgaaagagactaaagtgcacaagaaaataggtcatgcagaaactcatgcttttagttttctcttctaacagtcaataactacctggaaaaactacactattgatagtacaagaataatttggcttgattaacgtacctgttcaccagcaagaggatcaggtacattttcaacaagtaaaggctcctgcttcaacggatcaggaaccaagcaacgaacaacctaataaaatagaaaacaggctgtgaactaatgaatatctgaaatctaccataatcaataaaattggtatatgcgcaatgatagttttcattggctatacaaagagagaaaaccacatacctcatcactaatgtcatctgagtccataatatctgtctcctttcttgcattcaaaggatatgggtccttaagaatttcaattttacagagctggtaatccccagcaccagaaacatgaacctggaacaaaaagataagtctgataagatataactaccaattcatacaataaaaagcaagcaagtggatggaaaaaataccagttgattcaccgacaagttgcgcccacgcaaatatcctgtaagaagaagagtacatttttccgagtcgccactatctgctatgacatcaacctaagcacgacacattgaagagaaggatgtcaaaaaatgcatataattatcaaattactgtataattttccaaatcctttttctgggtacaaagaaaaagtataatggaatgtaacaaaccaaataaaacaaccccatcttgtatcatatatatatatgaaataaaaaccttttgagccatgagataagcccgctgacttcgccagtgagggactgaaagtctttgctccttgaaaagccacatgaactgcggtaaaacaaaatagatgtgagagatggaaggaagtaccctccttctaaacaatacaagtaaaacattggcaggttataaacaatgtcagttaattaattgcccaatcgacttcaactttaacagccaaccaaaatctatttcaattaacataccttgtgcaactcatccgttgtgtcagctggataaaacttacaatcctcaggaaactcagacacaagactagaaatacataattttttcatatcgtgtcttcttttcatctcatcgggaagatcctaaagacattaaggcataattttaataccgcaaaaacatacttttctttataaagaaaaaacctttttttttcatggcacttctaataacatactcgaattagcacagcagtgcttggtaaaccaagagatctgaacactgaaagacattgacttccaaatgaatcaatgtagtcagatgtgctttcttcacatgaaaagcttgaggaagctacaaaagcaatcagatcagcaacctacaattcaacaagcatctaaaatgtaagaagagtacaaccacattctacgaggccctgaaaaacagaatagaaaatcaaaatttactatgttttatacgatttcatacctttgccatttcaatacatgacagcaaatctccatggggagctttcagtacctaaagcaaagtatatgttagatccttcaagatatttttcagtcaccacttcatatcaattgccctattcgcagctaagaaaaccataaacattaccaaaataataatttcaaaggagaaggaagttggccaattgtttaacacacaagtatacactgacaataataaagcaacaactgccatttttccaaaatgacgaagagagagagagagagagagagagagagagagagaggacgtatcataatctaactctcgttcgacatacatgctatttagagaaaaataagatgtaaacggcatctgaaatgtcccaaatatttgttgtacatgtgtggatatcaacaaaatgaaaaaaagaggttgttataatgactagtttgtcccaactcaattgttaccagaaacagattatagaccaaagcaaaagaaacactcttatatccaacaaattccaaaggacggttaagatagtttacgaacaaaagcttaccgttgtcctgagcttatactcagaagaagcaacagttgaggacaaagccgaagagctatctttagaaagtaatgacaaaatctcttcagcaagtgaatttaggttcacagcagcagaaagcccaaaaagaacctgataattaaatgattcaaaagcataaaaaatcaacacattccaatacattttgcaacaattcaatcaaaacaaacaccaaaagaaaatttgttgttgcagcaaaagacacaatgaaaacactcacaataacacggggagagcttgttgatccactggaggcccttttctctttcaaaatagctgcacgtttttgatctcgtagctacaaagtgacaaataccatcgcacaaaatacagttaaaaaaactaaaatttcaaaaaaaaaaaaaaaaccaatgcctttaatttcatataaaacacaaaacctaataccattttgttacgctgcattctagcagctctggctccctttccattgtgatccttagtaattgtactcttcgctagaatcacagcacagattcaaaacttagaaaacaatcgtaccaataggtacacaaataaacacacacattaactactataaaccaaatttcagtttgcgaaacgtaagatagtatccaaaaaacaaataaaccaaattcaaattcaagttctattattcatagttttgctagtgctaggtttgtaatacctttaagagaagttttgtgttcgtgacgggaagctttagaagcaaaacgagtcttgtgagctttgttgacttgatttcgcgaacctcccatggttggggcggagtacgggctgtggttgccgagagagacacgcagagtggaggaacggctagggaagttttataagttagggtgtctgtgtttcactttatgagtcgatactatatatatcaacctccatttaatattaaaaatcacctatataatttatcattttttttatttacaccttataaaattataaataaacttcattattaaaaaatataaacttaaataatttttaaaaattattcttaatatatttttttaaaattttttctcacattattttatattaacttcaatacttattttaattttatattcataattttttttaactcatgtatataattttttattttttttctaagaaaatttcatataatttttttattttaattttgtttatcataatatttcaaatataatttaattttagttgatatgtttattttttaaaaatatgaattaaaagaaaaaagtttaaaaaaaattagtacaattaaagatataaattnnnnataaaataaaattattaaaatgggttgcctttaaaaaaatttgtggtgtaaataaaatttccattaaaaaaatttggtaaaagttaccaattagaccctctgttttgttaaatgataaaattagccttatatttttcaaaattataaaaataggaccctgacctcaattttcaacaattttatttaatagtccctaaacaaaactccatgaaaaatacttcaagaaaccatgtacttgtttcctataaaaataaacaatctttttcaataataaataaaaatataattgtactaagtatctcgaatcacatgatatcatgaaactgttttactttataacaattccgacaagcagtgataaaactagctacattatttaatgagtataaaaacaaaatttataaatttagtagggataaaataaatttatgtgggatgaaaataaaaaaatatataaattttacagaaataaaataaaaatatgtaaaggtaaaaataaaaaatatatatataaattttttagggcaaaaatttatacacaaaattaatttgtaaaaagttaggggagttataaatgaccccatgacaattctaaaaatgttggagagtaactttataacaatcatgaccagcaatgacggaactagccacattacttagggccactttggcacaacttttagaaaagttaaaagttgcttctcaaaaaagttgtgacaaaaaagtgtttggtaagcagttaaaaaacagcttattgaagaaatcatttaataattttattcttaaaatacttagcttcctataaatgatattttagtaaactaatataatcactaaaataagagatcttccctttatctctattaagccaagctcaaacgaaatcatcatttcatttttatgtccagatagaagttatagattccatatatatgattagcgctnnnnnnnnnnnnnactatcatgttcccaagttgtacgtgttacctgaaccaaatggtaggctttaactaacaactctaagaacacaaataacacccttgagatcgaacctaaccatgtcnnnnnnnnnntcttttgatctaagatcaaccattgatattgatttagaaagatacaacggtaagattataatatctttaccgagatcaatatcggtcccagtctaatgtatacttcatacatctgatattagcatactttgcgaatgttctggaaataacataacacttatccaaggtgtaagtaagctttatcgctaactatcacatcagtgtaaagccagtgcactgatgaattaagggacattatcttttgaagcatataatcataattatcttccagtgtattgacatcactgtaattgtgaataactatatgttatggatttaatagaaattgtatatattaaaccataaatatgaaaattacatataaacataaataattcctaatcttcaattgataacaaatcagattatattgaaatagattttat

SEQ ID NO: 110962 - DNA, 6577 bp, Cannabis sativa
  modified_base (46)..(68): a, c, t, g, unknown or other
  modified_base (4249)..(4252): a, c, t, g, unknown or other
ttgtaactaacgctgcaaccactttaaaaactcaaaccgtaaattnnnnnnnnnnnnnnnnnnnnnnntatatagggtaattccccttattttttttcaaaaaatttagttaattatttattatatattacaaaattaaaaaaaaaaattgaaagaatttttttttaaaataaataatatttaaatttctaattttttattttttaaaaaaatatatttatatttttattattaacaaacaatatcaatttaagtttcttattacaattgataaaaatataatttaataatattaaaaattatttttatcaaatacatataaatttatactacagaaaaaaataattaaaaatatataaaaagtaaaaattttatatgacatatttttttatatatatttatgattttcatgaattagattaaaatattattattattattattattattataatagaatcttaatgcaacacattaaaatttataatttactaaatactcagtttattttttttttttacagttttgctatagtcgttttttcttaaagcacagctaaagttgtttttcttcgcagcagagctttactaaactaaccctaatattataagataggtaagaatatagagtttgaaaaccagatgaaaaaatgatagatgattaggtatgtgtgatatgaatagtactgtagctacagaaccctaatgtcatctaacctgaaaagaaagctgctcacacacacacactctctctataaccaagataagatatatatatatatatatatgctcacacacgcacgcataaacctctacacactcaacttttgcatttaatacacaccttcctagctcctaccctcaattaaaaacacctcccaccgcctcaaaaattaatttattgttattaaatgaaaatcattactaaatgagatgagaaatgttaaaaaatagtttttgttattaaatatcgtttattatttaacttaataaaataatttttaaagtactgtacaataatacctttattaaatttaaaaaaaaaaaatgctgaaagtagtatgttagtgactaacactactctattcggtgtcatactgttattaggataattaagtatcgaatctcatataattttaaaaaatatcactaactaattaatggtaaaactacttaattattgagcaccactaataaccaacgacaatggtgaaaaataaatgtatagtctttgtcagtttcaaacgtaggcccccacatcatatatatatagtaacgcacaccctcccttttactttaattattaataaccagtaatgtattaaatcgaacactcatataggtcttggtctggttggttggttggtttacttttgtcttggcttgttcttcccagtactatatatataaacacattttatttatatatattatatactataaaactcacatcagcaaaccccacccacaagatcatatctatcatcatcatcattttcatcatgttgggcatggaagaagttcttcttgagctgagtggagaacacataaacgagcaaggcttgccccctgggtttcggttccaccccactgatgaagagctcatcactttctacttggcttccaaagtcttcaatggaaccctttgtggagttgacattgttgaggttgatctcaacagatgcgagccttgggaactaccaggttaattaattaattaattacttcattcattattcattatctctttttttctcttctcacttatatatatttatcttataactcatgatcatccataaaaccctaacatctttttaatatatatacgagtacttataattcaaaactagctaggtgcctttactaaaaatccaacttaaacccttaaaaaaaaaatttagtatttgtatgagtattgttattgaggtgtctagcagtaccttttaggtagcaatttacaattatttaacgatattctttaaaaaaaattatatgaaacttgaacccgattcttatgccctagcgtgtctttaatatttgaagttgagctacttctatttccaagaagaagaagatgactagtttttggtcaaaatattgcaacttttcagtatttctacaagtccgtactgaacatttattctcaaatctaactgcatatcttttaaaaatatttcgagctggagccatatttaagatagagagaccatgcatataccatgttttgtttgaataacaatacataatatatgagttggcttggcagtggcacaatgagaaaagtgtaagacagtattaataacttaactaatttattctgacaaattaatttcaataaaatcatattatgtataataaatgcgttattaattatatatagtactgtgttgtttttcatgcatgcagacgtggctaagatgggagagaaagagtggttctttttcagcctaagggacagaaaatacccaactgggttgagaaccaacagagccaccggagctgggtactggaaagccaccggaaaagatagagaggtttacagtgcctccaatggatctctgcttggtatgaagaagactcttgtcttttacaagggccgtgccccacgaggcgagaagaccaagtgggtcatgcacgagtatcgtctcgacggtaatttttcatcccgtcacacgcgaaaggtatttttctttttattgaatcctttatatatatatattacattacacaaccttaaacttagccaaactcaagtggttaaggtattatttatttatatatgttatgctctacttcctcctccgcacgtgcgacgtgaagttcaagttatctatgtatgatgtatgtatgtatatgtaaatgtaatcatagatgttgttaatttgtccttttctgggttgacttatttttattgatttcgtgggagtagtggtggtggtgcatgccgatggggatggactagactgttattttcactttgattaattattataattaaccttgctgtgcttgtcaaatccattttcatttttatttaaaatatagggttatatatacttatagtagttttggattctgtgaaaactttggctttggttgttgtaacttgtatatgtgtaagcatttatgacaacattattattatttgggttgatttttttttctcttatttcttttccaatttgtataaaaatgcaggaggaatgggtgatatgcagaatatatcacaaaactggagagaagaaaaatcccatctttcacggacgacagagttgcttgcctgcgttgctagaagcccaacccactccaactccaatgaaggcatcatcatcattattagaagaatatgaattcacaactcaaaacccaatgcgaaccatcccaagccaaaaccttttcctgaacagtggtagtggtaatgacttgaaaagcctcattactaataacccagttgtctcccaatcacacctcttcccgatacatggtttatccaccagtagtaccatagccacaacaaacaaaaacccatcaatatcaacatcatcatcatcatctgtgttattcaagtccctcctctcacatcaaaatagcacatggaataataagcagcaatgccaagaacaaccattaactgttcccaaacagtgcaagacagagactaacttttctcatttccaagcagcaacacaaccactcctctcctcctccactcatcctgataaagataactataacaactttctgcctaataattacaataataataataccatgcttttcgagagcgatgattatggagtactggggctgttatcctcttcatcgaatgctgctcctcttcctactcatctccatgatatgtccacttcagcagcagccaacttcaacaggaccggctctcagtttcggactcccttatcagatcctctcatcaaactcgctggaggagaatcttggacacctttcgatgcttattaactctgtttcacaataatattctctgctcaactttttatgcatacgttatatatatatagtatctaacttcttctttaatgtataagtgttacattgctgaatcgaaccatatattacaagggcttttttttagctatgaacacataattagccatcccttcaaaaaaaaacacataactagccttattattatggggttatttttaaaatacataagataaaaattcacgggtagctagctctgacagaaatatatatatatatatatnnnnataaataaatatatatattatatattatatctgataaaggcaaacacaatcagaaagaaagtaaaaagaaaaaaacctttacaaccatgtatagacagaaaagaaaaagagctaggtacgatatgcaaagatcagagtgtggattcccttcactcttgtatcattactagatatataaatatatatatatattttaacgtttctttctgcacttcttctcaactgtctacattcctagctaacatgattccaagccaaaaacttatcaagctaagaaagaataatatacggacacactctgggcagtcagacaggctcgagtctcaaccattgtcttcaatttcagagcccactgagaaatagatatagataaaacgtgatgatcaatcttcactccaatatatattatagataggtataaatatctggtaattatagtcagtctctcttaaacttggctggatttgatgagtagtcgcatgcatagtcctctgatctgtttccacagcattgtaaattgtcagcagctggattaagctctagagatgaccctactactactaatatattaagcagaacaaaatagtgactaatcgtacccaatcactgcaatacacacaaaaggatagatttagatttccaaaaaatctctccaaaaagagaagaatatttgcgccgaattcccccacttacatacatcccttctcgactttcaattttacttgcctgtgtactgaaaaggctgaagatttatcactttgtgcacacaaggcaaacgtattagcctgctttaatctgaatctaatactaataataagcgcaaccagcaatggacaatgattgttgtttaacaatccaagtgaagtgaatcaatattacattcattgaaacaatattatttataggaaaagaaatgaaacaaaataaaaaaagtatcttaagaaatttaacggtcagtattccttaagaaaaacaagtagaaccatcaaaccttcaatgagcacaaaattgagcaattagagacaagaaatccttattacatactaaacttcaagagcaaactcttacatccatgacgaatttagtcaagatggccctgcattaaacaagagaaaaatggactatttcatagttagggggcatcaccaagcaaccaaacatcaactctgttttcaaatagattgatttgataaagacatatcaggagaaaggtaaagacacaggccagtgaagtaacaataaccaagagaaccatgataaaattagattggttagtacaaatagagtgcataaccaagtacacaacaacaactctgaatttaaatagattgatttgatcatagacatatcaggggaaaagttaagataggcccgtgaagtagtaataaaataaccaaaaagaaccatggaaaatttgaaataatattggagaaataaaagtacttatatgaaagccaatacattcaaaaagatctggctgccttattgtacgacttgttatgtgcaagaaacattgtaatctactctatgctctttcattgtcgttgtgacattaacttataattatgaagcacaaatgaaacaaaaagtatactactcttcatgattcaagtagggagagaggattggctgaagtatctgaaatcaaatagaattcctagagaaggtaaatttataggaataatactataattatcaagaatcccattactataattagcatggagctaatcttgatatcaaacaaatggtattatactataattatcaagaatccaatcacttgttaagcaagctgattggcagtctggccatcttaaagacatagttataatcctcaaaggagaaagcttgatctcttgtatgatgttatttactccaacatgaccggagacattcatgaatagatcgcattgttatttataaaactattggcactaagaacatcaatcaacttcaaataacaatagagtagttgtctcaaatttgatcaaaacaaaacaaaaccctaatcctaatcctaattgtaatcctggaaaataaagacaggaaacacgttaaggaggaatatacagacccatcatcgaaatctcttggggccaggcaaaacggcgtacttagataccaaggccagctttcttatcaatggttctcccttcataaacgccatctctttcactcttctccaaatccttcttcttcttcttttctgggctttgattttaaatttgcgaacggaaatttacatagtatactaacttttgccatttttttacaaaaatactgccagacggtattttttatttttttactgtgtttttttat

SEQ ID NO: 110963 - DNA, 1779 bp, Cannabis sativa
atcatttagcagccccttgaatcatgattgagaatcatcatttagcagccccttgaatcatgattgagaatcatcatttagcagccccttgaatcatgattgagaatcatattcctattcccatattgtaaacatgctattcatgtgatattaacatcttatatattaaccagtaatcagttatctgtaaccgtaatcttttaatttcttctccactttgttgtcttcgtctctaaaatatggcatgtttctttttgctcaagtctttgtatttttggttttggggctcatgtgacttgttcttatctgcaggcaattttggggggaactatccaagttccaactcttacaggagatgttgttttaaaggtctgaacagtaatgcagtgcaccttttatcgccaattgctttttcagttctgccgtcattttacattattttctttttaatttgcaggttcgacctggcactcaacctggtcagaaagtagttcttaagaagaaaggtagggaacccttttttattttgtttgcttggtagcttttctatttgggagtgaatttatttaatctatcaaagggtgggtatttttaagatagtttgtatcaaccagctttttattcttgcatgaatctagtgtcatatatagaggcattattaactagcacatcgtgagacttagctatattttctgtttgaataactattagtgcactgcagacttcctgcctttgtaatttttattttcgcatgctccttgcactgtgatttgttctattattggcagctacctcaaactgagtcccatttgtagttactcaagacatgatcattgctacctctttaaactatggaaatgattgattgtcttgcatgatgagggacctcttcatctattctttctgtttatattgatttattctattttgtggtattctgtgttttttcatgggttgttttctttggcttttttgtcattgttatgctattgtgtggcaggaatcaagacaaggaattcatattcatttggtgaccaatacgtgcacttcaatgtcagcattccaacgtaagtttcctgtcttctgttccgtgttaattgtagaagagttccatcttcgtcgttgaattttatagattgtgaaaaaataatgttatattttttgctttctacgcaggaatcttactcaaagacagcgtgaattaattgaagaatttgctaaagaagagcagggagaatttgagaagagaagtgctgctggagcatctggatgaaatgagaatagcccttttgatttattcaaatttcaaaccaattacggtaactaattgatgcatagtagaaaaagaaatgagaaggcaatttatttgtgctgaaatgaccctcccggtctggaaattttggagcgattttttattgtatttgaccttttcatttatattatataatatataatatataaaataataaatatgattgtttctagggttatgtattattatgttatcttatgtggatgacaataaaattttggtcatgctactggatggcattgtatatattggtttatctttgtttagtttatttgttgtgggatcgaagattagaaatactcttagaaattgaaatggagaattaaaacaattgaatgaatttggcttcccagtatttttgtattttacacttttatttgctatagtgccagtgtattgtgtagagaaatttatttaagagcaatttgcggcgaaacttccttatgttttgatttttatacacttaa

SEQ ID NO: 110964 - DNA, 5185 bp, Cannabis sativa
tgagctggcgagacatatagataataataaatctttcatttcataataaggattttttttttcttttaaaacaacttctcacctgaccagtggactattcccctgacaatataattaaattcatcaacgactctaaatccccaaaaaaatacaagtttatcaccacacaacgtacaacggataggaagggtatcctcattcatactcaactacaatgcaaatatttatggagacgactctctggaaagtgccaaaatgacttggtaacgaaccatcataaccaacacttttttagctacaacattttctatcaaaactaaaaacaaaaataagaataagaagaagaaaaatgcaagacttgacatccgctgtatgtgataacccaacaacagccattcgggataaacgactcaccaaaaatagaaaccccacttggctttaatcctttcgtcacatatggttgtcgtatattaagtccccatgctatagcttggtcgagccactcttcagatttgccccgctctgttatacaaatcaaacaaactgatatcagaaattaatcatcgtagtcaaaacaattcagggagattatgtgtactgtatacactaactaccttcagctgaagttgaatccaccagaaggaacggcaggaacctcactccctccaaagttgaatccggattgagccgagtcaccaggtggcattgtgtcatcctcttcctcgagccaatacgtttcaaggatctttacagccttttcatatatctctgtattgtcgtgactttgtagattctcaattttctccaacccttcagcatcatcaattagctgagcataaagattaacacctccagtgttacccaaattcttttcggcttctccaaccttcaaaatgttttcaagcccttccaaacatactgtgacaatcctaggatcagggcagattagaagatcacacaatggtttgatacacccttgatttactaagaacctgaaaccaaagaaaaaaggaacaaacagatcagcacatctgcacataaattaatcaacaatacaatcaagtaaaaaaacgtactttatttggtcatgagaaccaccggatgtagcatttgagatagcccaggcagcctcttttttaatatcaaactcagcattttgaagaagattaacaaggggggcaattataccagcctcaactacacactgtcatatgcaaaacataaaatacaatcactcattagaacaagattagagtttgtcaaatataaatcacacatacaatcactcattagtccaagattaaactctcatgtctccaaagattgtctagtataaagaggaaagaaactgaaacatttttgaattcagatcagcagctatacctgaatctgctccttgtttccagctgtgatgtttgagatagtccagcaggcctctttcttgatactcttcttataattgtttgtcaataaagtcagcaaacagggaagagcttgatgacttatgatgacctgaacagagtaacagatgcttagctcaagatgcaaacagaactccagttgaaaagtcatcatgcaaaattagagagtgcaaataattacacaagctaaagaaaaattgaaacctgagtttgcaaatcatctccagtgacaatattcccaacagtgcgaagagcaggaatgagcacagatggtgatgggtgactggaaaacatacagtcatagttcagtgcacaagaacaaatcccaaatatactgattactaaactcctaatgatattacacaaacaaaaactcccaagaaaaacctccaatcaaatcccaaatatacttaatactaagagcagtcgcaaatacaaaagtattaaaaaacaaaatcagatatcaagactcacagcaaaagttcaacaagtcgggggcacaccccggcttcaataactgcttgaattttatcatttgttccatctgaaaggtaagaaagtgcccaacaagcatctgtcaaaacttcctcatcatttgaatggataaggcgagcaagagctggaagtgcaggcttaacctgtgagaatggccaaaagagataccattagaatttataatttaaattaaccaaaaaggaaggctaataaacttttagtattagtacatcgagcatacaaatatccaacctgatcaaaaggaggttgtggcttgcccctacagaagtttgaaagggtccacgttgcatttctaagcatagagagcttagcatgctcatttaattgtgccagcaatggcagcaaggccccattaccaagtactagatcacgacatctgggggaatcacctgcaacattacccaaggcccaaacagcctacaaatgcaaaagggagaaccatgtcagtcactactactacaatattaccatataattccatcttctgaacaattacagtacaaatcaccttctaaaacacttaagagaacacattacaatattttcttttccacttatgtcgaaaatactttagtcaaaatcaaggtttagcaaagaaagctaggacatgcttaaattcaatacctgctcacgaacgtcatcacttggagaaccaagaagtttgacaaatatagggacagctccatgatcaattacaacctttgtgttctcagaggtccctgaagcaatatttgtgagagcccaagctgcttcaaactgtaggaaatacaaattataaaaatgggatgcattgagcaagtaaataatatttggtacaagaaattgcaaacctgcagctgtggaaagtcttccctcattagaaattcaacaaaacgaggaacaacaccagattgtataacttcctcgattggaggacttcgctctgtagtcataaaaaagtatacatataacatattaataaagcacaactgtaaaataaaatcagtgtgcggcagagatataattcctcaccaatagaaagaagcttcctaaactgagtagtagactcaagctgcaaattcccatcatccgagtctgaccaaacacccgctaccatcgaaggtagatgttctagctgcatttaagaaatgaaataaagttaagcacaataaaaattccaaccattcctcttcacaaaactgatattagaagtactgaagtcaatccaataaaaatgcagtaaaataacgataatagtgtttccataagtagtcaaacaaggactccgaccaataaaaattcaagctgcaacataaaaaacaaacttcaaattgatcgaaatgagttggcatcagtccagagtgtacaaaatcaaagttataaattcaattaaacccatcttcaaaaccctaaaaataaatatcaaaacgaattgaatcagctccaaatgagaaaaggggaatcccaaaccttcacaaaaccctcttagaacgaattcaacatgagcaaagcaatcaaagtcctcatcacaaacaaaaataccaacttaatcatagcaaagccgtagattataaaagtaataaactaaaccctacttaatcggcaaactctgcataaaaaccaatacaaccatagtccatagtcatcagactaccgaaccgaactgcaatgttaatacaaaatacttaatacataaaaatgattagtaaaaagacctttttctcaacagctgaggttggaatggaagtctgcaattgctgagggggaagtccctcacgacgcttcttctgaaggctctcttctctgcgattcttcctgatctccaccatattatcctcacggcgccttcgaccctcctcggcgtcgacggctaccttatatcggttccggcggacctcagtcctcgcgctcggcctcaacgacatgatgaagtagtggaattcgaaaccctagagagagagagagtaagggttttggggagaaaacaaagagagagaaaggagggtttgatctttcgaaggtttagagagagaagtgaagagaagaactgagagattatatagcgcagtgtgggagtggggatagcttagtcggtaactgggcttggatcggtttgaaattacgaaattgccactggttttgaatttgaaggtgagggaaaaagcgtatttgattggtgtgtgtgtgtgagtaaaaaactaaaaacactacaatttcgaaaaaggcctcgaaacgacgacgtattaagtgtttttaaaaaattaaaaccagtgcttcacagctttcttttctttattggtaacaaatttatatctttaatacgacgtcgtattatgtggatccaatcccaaacggctagatcgatgtctaaagttggaaagtacagcggtgttgcggtgttcagctagcggtgacacctttattaaaatttaaaaaatataatataataattcaaatcaataactcattaaaataaatacagattctttatcgaaaaataaaataaataaataaataaatacagattggaaaaaaaataaaaatttattattatttttgtttttaactggataatttattcaattatatacacatttcttttaaaccaaatgttttattttatttgttttacaaagaaggtagtagtggttttgtttgcatccaaaaatgcataaatacacattaatttacaattatttttgttttgtaagaacattgctaaaggagcttcaacattgcaagaaatagaaaaatcgaagtccctttattttctttggttcgtgtttgtgtgaagaagataagctaatttctgtttaattttttatttttgattgggcatagctttttaagtcgccacccataaaggataattaaaatagaatcaaagtttatatttgttgttaattcaaaacaacaacaccaagattcacaacacaaattgtagcaaaatcaatgaacttaataataacaaattatcatatacatatagtaaactcaaataactaaagttgaattaagaggataagaagacaccaaatttatcgtagttttggtcctcgagatcaaatgtcatttctgaccatactctagctaaaaaatatcaccaagctttcattaatggaggagaagaaagaatacaaacaccaatgatagagcttagaaaactctgaactcggatcttagtggacaatctcagcccttctctcccaatcccgagtacacccttaagttcttaatcccaaaggacttgatctctctctctctctctc

SEQ ID NO: 110965 - DNA, 2252 bp, Cannabis sativa
  modified_base (327)..(327): a, c, t, g, unknown or other
gagcagccagacactagatgattccccttctctcctattgaagccaaccacctaaagataactctcattattatgtcttgctagtccttttattacatcttcaataagcagcattatccaaaataacaataagaatgctttaataataaggactttgatccaaaaatatgatggttcgcaaaacccatcaatttaaattgtatctttcccaccttgccataataagaaattgtatctttctttcttcattattgtggttgagcattactaatttttccatcttaaggaggttgctaaggttgttatactacatatatatatatatanagagagagagagagagaagagacgtacatggtgaaaacctggagagtaaaaagattatttgcagcattgtcaagaggtaacttatgtaatcgcttgaaaatgtcagggtgttgtaatttattgctctaatttatgaacttgcaatgtctcaaaattagcaagaataagaacttaaaggaccaaaacacacatgtgttagaattttaagatagatgagttctattttaaaactatttatgcatatcttatatgtgttctgttatatttttacatcttaacaatatgggactctaactacactcgaaacataataaaaaaatttagtaaaagtaattaagcatcaaaacatacgtgcatcaacacagattattttctttctccaaattgtgtctctccccatgtcacaccaataatactctcataagttataatttataaattatatatttattaatttaggtggtgtttagtaacacttttattttttaattttttaatcacaaaattaaaagtaaaattgttgtattttaaaaacaaaaatgtgttctataaccacttttattttttaatttcaaaaacgaaaaaacaaaatgtgttctttaaattttattttcattttcatttttttattttatttaagtcaggtttgggtttgggtctgggtctggggccgaggtcggggttcgggtccagggctagatctaggttcgggtctagggtcggggtttggatttgggctcctatcccagggttgggtctaggtctggggtttgggttggggtttggatcggaggccaggtctaggtccaggtcggggttggggtccgagttcgagtttaggtcaggggtcgagggccagatccggggtttgggtcttagtccaaggccgaggctgggattcgggtccaggtcaggggctaggtccaagtctaggtccagggtcggggtctaggtttgggttccgggtttagggtccagttttgggtcccaaagtccgactggggttgaagcccaaaatattgattaagaaaaaaactatttaaaaaaattgaaagtgactattttttccaaaattttgatttttaattaataattgaaaagtaaaaacagttttataaaacatgtttttagaaaatattttcacttttctaattagaaaaaaaaacttattaaaaaagtgttaccaaacgcacctccagttaacctcaattaattaacaaatatggaaagtgtaagtgctatgttttctttgacaaattatgcttgttattagtttatttgttggttgtctagttgcatctgtgttgttcttattagtgttgattttttattgttgttaattgtatctattttatctgctcactttgtttttgccaagtcaacgtttcatctatttatacgttgttttgtttcttgccagcatgacaaaggtattgagggttgttgtgtttagtcgttatttagctttgttagtataaaaagctaagctagctttttctaaccacctctcatctttgatagaatcgttcttagattcttgctctagtaggataaaattcttctgtgtgtattatgtggttttgaggttgtaaatcattggatcttcaagtttgaaaaaggaatgttgatctgcgatgtttgatgggagttcagcttgttggaagaaaggggatcttgtcttcctagatttgagtggtcttagatctttgttcttgaagtgtattcaagttcttttagtatcttctgtatgaaatcatttaagtttacattgtttgatgtatatataaaaattggagaatgtatgtttgaatgatttcttagaggaggcagggacggagggactttagcccatatgtgggctaaagccctcactcaaatataaacatcaaattttttatatgtagatatatacatatattaattca

SEQ ID NO: 110966 - DNA, 8631 bp, Cannabis sativa
tttcaaacaataactaaaaatatttttttcaattatctattgtattattttaaataaagtaaaaagacctaacataaaactaaatatacgtgccttgcacatagcttttttctagtatatatatgtgttatgataaaactcattatatttatggtatctgttcatgttaaaatttatcatcaaattaattatattaaaaaaattattaaaaattaatcttaaaatattatttataccattttgaaaatataagatctattttatgagagaaaatcgaataagtaaattttgcaaaaaaaaaaattagaatgatattagtttcaataataaaaaggaaattgggaaggatagtttggtcatcggcattccgaagtgttaaaaccccacactcgactctcagtggagtctcccaaagctccaactccatactcgtacggccttcaaatctctcaacaaccatggccaacaatccctcccagctacttccttcaggtctatttctatttccttgttataattttctctttgattccttctttctgtaactttcacgggaaaatcaaactcattttttttggttggtttttcgttgtggaaattcgcagagttaatcgaccgttgcatagggtctaaaatttgggtcataatgaagggcgacaaggagcttgttggtactcttcgcggcttcgatgtttacgtcaacatggttcttgaagacgtcactgaatagtatgcctcttctcataaattactcaattttgattgaaaaaccctaatgcatttcttagggtttatttaagttcctttgctagctaagaaattacctgcaccttttacaattgatgtattaggatttggtttatttgtacatttcccccttacctttaatttgtcagagaaaagcatcaagtatggctttgattcttgcaaattttgtttttgaaaaaaaaaagattttttatccgggtttttaatgatttttcgattttcttctgtttatattcaattactttacatttcatatagttttcaattaaattttataatgaaaaattagcattcagtcttttatgtttgtttaagtaaatgtaaaatttgcatcttactggtaaatgggctatagctggtaaacagaaatttgaaagaaaaataaagagagtagagagttgagagtgttggctagtcatctatcatactactaatgaaacatgacttgaagtagagtagcccaagaacatgacatattaccacaatatgcttttgtgtacagctgtacatcttataatctattataatttctgtcgtataacttgtaagtttggtggtaagctcatggtttactctcatcagattttgggtttgatttttcatggggtttaattagcaatttattagagttttccaatggtatatgaaaaattaaaaagaaggaaatgttcagttttctctgatactgaaaaatgattctatatcacttttctgtgggtggacaaatcttaatatcacttttttttagatcattccgaattgcatacatctgttattataatatctcattctgtgtgagaactacctaataaagtgatataactaaacattctgtacgagtataatatgcccaaggatgatatcaatgttaggaaatatgtagactgaaagttgcttgatatcacctaaccctaactttctgtgcttctgtgttatctaactgttctgcctaatagtttattttaacttcttacaaccattttgggaaaagttacatctatctcgtttgtcttctttgccattgccattaagtcatgcgtctacatattttcacactaccatgggttgattgttattgttcatgacatcctgtgttctccacatacacttggtagttttttttatctggtcttacatgtttttatgtttgtctttatgtaatgaatagaattcatcggcaacccatgagcattaggtttagtgggcaggcctaaggtttgctcccatggagattttgattccccatgtgaaactacttacctatttgcttgaggtttctgcctcccaaagattgtagtgttcaagggagatcaagtataagaaaatataatattctaacttgtgtagtgcttctttattgaaatcacagcgagatcactaccgaaggaagacggataaccaagcttgatcagattttgctgaatgggaacaacattgcaattgtgagtaaaactgaatcttttgtttgcttggtgaaagcatattatctattagtatagcctgattgattcctgtggttatgaggtttccaaaccaaatattcttagctttgacttgttttcggtgagctttgctgtgagttcttatcgaatgctaacctaacatttttgtgcacaatgcagctggttccaggtggttcaccagaacctgaatgagaacggctaacctctacttcaagttcacgatctttgattctcacgcggttggagcagactcgtttttatgagaaattatgctccagtatgcatttctttattttcagcctattggattatgtaggtgacatggttgtaggataatggtgtgggacaaatcagctatcattgttaatgaaagtatgcttcagtatgctctttcttagtaaaaaaaaaaataatttgctaattgctattaatgaatgataaatcttgtttttttgggtactattatcaaagatatagggtactatttttttggggttatctcttgtgatgatcacataacttctaattcgagaaaagtgagaagcccaatgagagtgagatgaatatgacacgattaaaagtaatttgaccaagattacaagttaaagaattgtcatttataaacaaattaatacattgcatgtggctgctttgagattagtgctcgagcttataagttaatgtaccctttaacaccaaagaagtactatccacgaaaagtgagactaaatcaaattgcgtgattaaacatatttccatgaatgggggatttgaattctgatattgaattgaactaataacagtagtatgaaatttacttgttgcgaagtgaaggctttgagttgaggaattcgatgtgtttagtttgggtgattacagttttgtaggcagtgcctgcctgatggtttatgtgttagtgcttttatgttgtttggtttactcttaatagttgtatgagtggttgtttcttgggtggaattctcctcagaaattctatgccataagaaactaatatagaaatcttttattatgcttccaacaacattagaatgggaagcccctttcatctgtgagagattatcatatgagagtgttgtttttgcttccttgtaatcgaacaagtcgacaacttttgacatatgcagtttgtgtggattagaatgttgttctctctttctctctgaaagtactatacttaaatctaattcattttcttgaatctttaagaacaattcattaacaaaggtaaaatcacacaaataaattacaaggttctcctatcctagaaacaaattctaggctgaattcaatgttatttttacaatttttcaattttgaaatcaaatcaacaaaatacattgtcaaggtactcactcaagtaaatcagtttttaatcccttaaaacatacaaatcaaattccttgactcttcactcaagatttttttattagcgcagataactgaattctctttaaatttgttcagaacacgaacatgatctgcaactcagtttcacctctataacaatagtgaatctgcaccaaaacaaagaaaaagaagaatggaacaaagaagagagtgttttctctctcacacaaaaatcaatttgaaaggttagcttgaataatcaagaatcttctatttatagcaaccctaatttgtaactaacttcccaaacagagcagttagtaaagattaactcgcctaattaattcaaataaagctaatgtgtacaaaaaaattctgcaacaatctaaaggtaagacttgacaatgcatagtttcaacaagaggagatatcaactaaacattacaatgatgaaactaaggacactgcagattaatcaactcaaatataatttgccatacaaaatattgactgttacaatctccattactagtatcttagttagcagcatgaccaaattacttcatctcaaactttatacttaacatttgactttagtttatctatttcattcatgtttgacacacaattcaacaagataattaatccaaagttaaaaatcatgagatgctcaagtacattatgcttcttgtattatggtagaaataattattaagatgtcgtagcgatttttaatatttggctatgtattgtgctaaatttacgctcgacataagggtggggcagctagggcaggaccaacgctccaaaatgtaaccaaaaagtttcttttgaaaatactcaaaagtttcttaaaagaaaacttacttttaattttttaacatacatatggaatcaattcattatgcatcgtctactgtgttgcagcagaaaattccacctttgcatgctaaactcttggccattctagctggtttatagcttggtatccaaccacgattaacgcgatttagtattgaatcgaattgtcttaaaactatccaattaatctattcaaaggaggaaggttgttgagacattgacagtgtactaaattatattccttatttgtcttttttgagaatgtagatagaatttcttttgtatacggtgaaacaaatagggttacttacgctttagccaattatactttgactaataaaattagtgctaatggattgaagttaatccctcttatgctaatctcgcattgcaactagattcgcctatcctttgtaattatttttgaagaacttttgtttaaaaaaaaacctcatataacttatcaagttactaatgacctataaaattagatataaattaaagagtattaaaaaaaggataaaaattaacataaaaaatagatatacagtctaatcaaaacctctagtatttctctttatttgcattattaaccggtttatttaatgaaattaggattattatcatatttctctctaaaaaaagattattatttattaaagtaaactataattatataacaatgatattttataatatttgaatttaaattactaagcttttttatatttatatatatgtattatgcctatacgtatatttcggctaaatatcaaaattaattatcttttcctccaatattaataataacaacatctaatttttaaaataatatatttgaaaattaaggaaagcccaaatttaaatcttatccacacatacaatttaaaattgaatttaaactttaatgacttatttctctaatgaaattaggattatgatctattaattaaattaaactattatcatataaaaatatcaatttttaatatctgaatttaaatgtctaagcgtttttatatgtattatatttggttaatttaaattttggtaattatcttttctaaatcaaaaatctactcctaatacgattaggctaattatttttcctataaaaagaagagggtttggatcgataattcataattctcaagtactcaaagtcgtgaacaaatattcactaactctcttttcttttcttattttctcgagaaaatattcacaaagtgatcgatcaaatatgggtggtgcaattgttgatacaggaaataataatggaaaacaatatcctggaaaactcacatgtaaagttctttggacttgtattgttgcagcttcagggggtttaatttttggttatgatcttggaatttcaggtacctaataacaataattatcatattcatataattactattattattattatttgaaaaatctaattgtactttatttgatttgacctaataaataatgattaggtggagtgacttctatggattcattcttaaagcaattctttccatctgtgtacgccaaagaaagctcagtaactttatcagacgatcaatactgtaaatttgatagtcaaatcctaacattgttcacatcatcactatacgtagctgcattggtgtcttccattggagcttcaaagataactagattgttaggaagaagagtgactatgctttggggtggtattctgtttctgtgtggagcagttctcaatgcatctgctcaaaatgtttggatgcttattgtgggtcgtctatttttgggattcggtattggatgcgctaatcaggttaattataattaattactctcccattattcaattcatattcttaattttattttatatttgtttctataattatataatacaattttttatgtactttatagttatattacttattttttattataacaagatttaacaaaaattgaaaattatgatgaatagtttccatgcacaaaaatagaattcaaaatagtgagtaatttgcactagtataaagctaaattaaaaaattagagactcgaagttacacatacactctaaggcataggcgtgcctaaggctcacccagcttaagggaccaaattttttttttcctctttcaaattttttttccctgtgacccactttattttaggaccgatccacactaaccaaactaaattatgattgtttattacttaataagacttttttttttatttttttattttggatgctcaaaaagtgagctctaaacacgaaccgacccactgcaaattatttttaacatattaaattattccaataaaacgggtagagtagatgctatagttataatatacaaattcaattgtacatatatcatattcacattaaaatataaatttgttttacttaattatgaataatgaaaccataattaaacgcaatttttttaagatgtattatgtaaatatatatatttgattagagatccaaattctgactttatttgttttctatgtatatacacagtctgtgccaatttacgtttcagaaatggcaccatccaaataccgtggagctctaaacatgctattccaactcacaattactattggaatcctcattgccaatttactcaattacttctttgcaaagatcgaaggtggttggggatggagactcagtttaggtggagccgccgtaccagctctactaataatcgccggaagcctaactctacccgacaccccaaattcgctaattgagcgaggcaaaaacgaagaagccaaagatcaactcaaaaaaatcagaggtgtacccaatgtggatgaagagtacaatgacttagtcaacgcaagcgaagtttccaaacaagtcaaacatccatggcgaactctgttgacaaaaaaatacagaccacaattagtcttcgctatcggaatcccagccttccaacaactcaccggaatgaatgtgatcacattctacgcgcctgtccttttcaagactattgggtttggaagcagtgcttcgctcatgtcagcggtgattacaggtgtagtcaacgttattgctacttttgtctcaatcttaaccgttgataaatttggaagaagaactcttttcttggaaggtggaattcaaatgttcatttgccaagcaatcattacaattgccatagcattgaaatttggggttagtgggaatcctggggttcttccaacttggtatgcatatggattggtgttcttcatatgtgtctacgtggcgggtttcgcttggtcgtggggtccgttagggtggttagtacctagtgaaatattcccactcgaggttcgatcggctgctcagagtgttaacgtgtcagttaatatgatcttcactttcgccattgctcaagtctttacagctatgctttgccaccttaagttcggactgtttatatttttcgccatttttgtcatcatcatgactgtgtttatatacaagttgcttcctgaaactaagggagttcctattgaagaaatggctgtggtttggcgtgaacatccttactggaaactttatgttgaggaggaagaagttcaagttgttccccaaagtttggagatggtttagtttaattaattaacctttttagtgcttaattaatttgttagattttgttgatatgaacaatttttatgtttaccttagattttttagaaaattatatattttattatagggtatttttttagagattattatatattaattaattatacagttttctttttttggaataatattaattttacaaattaatcgttaatttaataaataaactgttttcttttatatatttatccttacatttcttggattcaagacctcaataactttaaaatattaaaatccaaagaaaatgttaattaaacaaataaaaagggtgatgtcaattttatgtatgctaaaattttaatatattttgtggtgtggtaactatatagttttcaaattaatattcactataatatctaagcatgagaattttagtaagattaatttgacacggtaattaaatgaatttattcacttcaaatctcaaagcctcaaactatattgcataacagtaaatcagggccggccagagggtagggcagccggggcctcggccccaggccccacaatttt

SEQ ID NO: 110967 - DNA, 6206 bp, Cannabis sativa
gctgaccttggcttagagaagtcaaggtgccgcacgggtgttctgctgcctgaaaaggtgagcccgtgacaccgagcttgggagggacccaatttttgtcgaagcgataatggcatactggtgcagtatggccgaatcgaagatagagttgacacaatggtcgattgttctgagctgggccatgataaccacctctagtggagttcttggttgcaggagggcaatatggagtgtttattgagccagagacaaccatattcgcttgaagcttcatgctgagatcatcaacagtattatgatgatcgaggcgactttcatgagcaagaaggagcgactgaacttcttcaaatgtaagatcatcactacgcgcggtgatgccggagacgacagagtcgtattcagggccaagaccgtttaggatttgtaagatcagatctcgatcttgaatgggagagccagcgatagctaacgaatcaacaatagtttgaactttgtcactgaagtcagagatagattgtccgcccttgcgaagcgtggagaattggcttttgagttggagaagacgagcctttgactagcttgagaacctctgttctaaggctcgccaaacaaagtgagatgtagtgaagttggcgactgaggcaagcacaacttctgtcatagaagcacgcaaccaagataggagcaattgatcttgacgtttccattgattaaatattctcgcttgaaaccaactgagcaggtgggggaatacctgcaagaagtatttcatcaagatcatgtcctatcacagtgggaagaacttgtgatttccaagacaagaagttagtgcgatcgagtttaatagtaagagtagaagtgagagaatgagaaaacggattgttcatctggttgggacgattgacggcagtatgagtaaggaccgtgttggtggaaggagatctgggacgtaacggatggcttgttgacgaagactccattgaagacgttagtcagaggcgactgataccatgtaagatttcaagagaaaaatcttgagagcagcagaatgaagaagaaacagagatgaacaaatagcaaaaagcttactttctttattgattagaggggtatatatacaaagtcattagaagctaaataaacttaacaaactaacttatagtacagttagagcaactaactaactacaacttgtacacttagctaacggtaataacagtactaacaataagcgacatatttgatacatacaacttgctcctatacacttaaaaaaaaaaaaaaaacttgctccaatacataaattgataaaaaaaataatcatagtttaacattgatacataattataatttaatatttgtttaaaagaatatatacaattttgttttctttatgatttattattatttttagtattaacattaaatataatgtaaacttttgactatatatttttaaaaaaattgtggttagataataatacaataataaaactaacaataaataaaaaaaataattatttaatgttgatctaaacaagtacataaataaaataaaaatgcatagcatatgctctgagtacactaatacatagaatatctattacgagtgatgcattgctaaaatatatttcattttataaaaattatttagttcttgatgttaaaaatctattatctaatttccctaatgtttgtgtatctcatattcgttcagatgctaaccaagctgctcataatttggctaaacaggcggtaacgatggatactgattgtatttagttaggggagattcctcctacaatattttctgttgttgtaaatgactctttgaatttataattctgtagtgctttattttattgtttttcattatatttaacaatcacattatataggtaataaattaataacaaaatatatttattttgaattttcaaataaaataataaaagagaatttaattaagtgttgatttttgtatcaaaattttatttataaagttaaaattttatactaaatataacacaacttttatttatagacattctatttttttttaattttttttttgatagaatagagacgttctaattttttttttaaatttttttgataatttagagacgttctaatatttgatcatctctttttgagagtggtattatggaagaatgagtagtagtatccttctggaaccatctctctataaaatatgctctatatctccccatcctccataaaaagcagattatcattaggaaaactgaaataaaaaaggatcacctgtctctctcactcaatccttttttaagtatatatatatatatatatatatatatatattctcaaccttttcttcttcttctttctttctctacaaatttaatttcattccaacattccattgtttgctttcacaatatcaaagttaaaagactgctactctttacaagcattacattacagtagtaatcaaaaacatcttcaaaccacaatttcaactacattacattacactactactacttggtttggcataaataatacacgtcgttgcaattctatacccattctttctttttctgtttcgtaccaacatacttcttccatacatatagtttttttttttaattgatttgaaaataaaaagctctaattcaaaatctataattatatatatatttctttgaccaggttgggcggaggttggattggaggccgcgggcttcagatcttgttcgtgggcgacgggacttggactggtcggcgaactgctgctagaggttttcttcaaaactgtaagaacaatttgcaggattttgttatatttggtttttaaaatttctttgctattgaattcacttgtttttctgtttttgtgttgatttgttccccgaaaaaagaaattcttgagaaaattgaggttgatttgaattagagaaggaaaggaagataaatttgtgagagagagagagagagagagaaggtgaagcaaaaacgaaaaagaaagaaaaatataagttcaacttaattaacactttgcatgatttgatcgtttttctgataatttggtttattttaatataatttgtttaaagaaatcagagaaaacctttactgggacaagtgtcgttgaattgaattacatgagaaaagtccacagacactagaaagaaacaactaactaggtctcactctgagactcagtttcgaacctaagacctccagccttagttaacatgaccttcttcttatgtagtaattgataagttatgcatttctttttgttttattagttgattgaaattgtaaaatcaattctaaattaacaagttgtttcttgtagaattaaataaattacttgtaattataataaaaatagtttttctgggtagatgtgtgatcatctttcttgcctttgtctttaaaactacaattgtttctgcaaaagtaacaattgtttatacattccatgtttctgcaaaagtaatagctcataagatttgatacaagccttgaaaatttcaatttctctttctgttatgaacagatgctctggtttcttctgtactagaaagtagctcctgtatgtattcaattccgaaattagtttgcaagatggtgattaataaataaaagaaaaaatgtaatctatacttattaacaataatatagaaaataataaacaagctggtgttttaatccaaaatagaaatatgattccaaatgatcttatagcaacaaccaagctatactttagtcttgtcattatttccaatttgagcatatttgcaagtttcgtttcttggtgttgtggattttcattatactgtttttcagaaagtatgatagtctttatgtctttactattctgtctttgaacaaataataattgtatttttctttcttgagatcatgtaggtgttttcttttgtaggatttctcatcacatgcttttcttagctttcgcttttagaaaattgactatttctcaatttctattcttttgtaaaaaggaaaaattccctgggagggtcccagtattttgaacttgggaatgattttctattgtaaacactatttttgataacatttgttacttttgtctaaagagtttaagtctacgattatacttattttatctgtattatttcttcaatgaatcttgggcataacaattggagtcaatgccatacttttggcccttgtggctgtttgactctaattacatgtttgactttatttgtgtggagcttgcactagaatagcattgcaattcttcgtaattgtttgtgtttttctcgcaaataaaattggaatctgtttggagttagaagaatgtattttttaagttttgtaggtttagagctaactgatatattgtttaagatcttattcaccatttagtaagatcaataactaccgtatgtttgtctaataagaaagatcttgagcaggtggtagttgaggtcattttcttttctcttcaattagaacaaatccatcaagattcatactatatattgtttcaattatagtttaaggacggcaatattgtgccataaggattataggtttgtgccataatgcacactcaacacaagtggattttttgactgaaatctttcaatcataggattaagggagtattttatcttaaaagtcattggctcgttttgaattgatattgaagcaacttattgctcacattattacccttttaatcgggtcaggtattacaaattagggtgataggccacataatgcttatgggctgaattgtaagggacatgggctgttgttttgaaggcctaggggctgtaagggttcagggaaaaatggacctggttgtaaggggttagataattacagcccatattactgtgagcattgctattacacacaaaaatttatatccaacatcacctagagatagcgctttacgagtcgttagctgtttttcataataattgttaaatttaaatgtgggacttgaaattaaattgcaccaatagtagtataacacctcaagtagtgttggacacctcaagtagtgtgggacaattctctattacattgggttaagagagtttggactagtttgcaacccaatgaaatgtagcatagccaaagagactaatcaaaagaaaaaaagagggagatggaggaagactaaactgaaggttaggagagattttcgtaatcaaaagattggcaactggtctgattttcaagagctcgaataaaaaaaatggttttgaaaaaggtccaaacctgagaagtgtagaagaagacattagtgaagataactaaagaaaactgaagcaaaaaaaaaaggagaaagttctttggtaaacgaaacataatgagaggtagaagaggattgggcataattgagggattctcttgggcctcatgatgaggcaaatgaaggtttgtatgctgaaaatcagttcacaacctcgaatagtagctattgagattaagaatggtaagattttgaagtttctaatcggaagatgatttagagaagtattttgatgatctctgcaggcttatgaactcataagatattggtggggaaagctttgaaatggttaccgaaaacgtggaccataaaagaaccacattaagagaataatgaaagggaaaaataaaaaggaggtaaaggaagataaccaatggggagagattgagggacatcggtcttagatgggactacaaattctagaggtttagacaactaagggaactaagaagaatgttagtagggagttggaaaacctcacattcaatgtcaacgacgttgagagtaggtcatagataacgaagcaattggttttgaacatatgagaggaagtggcttgacctttaaaagaagggtagttaaggaggtggtaagatcagttcggatgtgttagccttgcaagaaatgaaaagggagattatatagagaaaacttgttggaaatgtggaaatctagatttaaataatgggcatatctcccattccatccataagaaggtgaggaggtattgtggtgatttgggcttcaaggaaaacaaaggtgattgaataaattacatgggcggtcttacactatgtttggtaggagggagaagtggagggatggagaggagaggagggagagaggtgggaggagataacaaatccctttatttggcaagagggattgaaggaga

SEQ ID NO: 110968 - DNA, 5178 bp, Cannabis sativa
tgtttctgataataatttacctgatacaccgagtttaaggcaagtaaagaagattcctgggatataattccacttgcatggtgaagaagtaggcttctcagccatggaagtgcacataccaagactgcacccctgagttgagtaataaaagcagttaaattattatgaccaaataggctgttatattatgcaagtgatacttgataagggataatatgagagacggccattatatttaaaatcatttaagagtagaacgtaggttaagttcttacttcgactgaataatagatatgagagattgtaatagcttcaaaacatctgatggattcaactgtgagattgattttgttataacctgaaatcagagattgtgttatgagtatttacaaggcaataatttgataacaaccactaatgttaattagcctaagacatgaagagatagataccttctcatcttgggtaaataagcaatccaacaatatagcgcgatcatcagcatgtagagcttgcttaagaagaacatgaacagaatctgcgctaggaggcttaacaatagcagaagactcgtcaatttcattgctctttgctgtattatcttctgctagatttagacccgcaagtttttctcccatggttggctcatttgtatcgtcatcaacaaggactccgtcggcagcttctccatgacctacaattatcaaacaagcaagaaactttgttcctcaattattcacattttctcaatttgaacacaagtttctggcatatatgataaacgaatgataagaactcaaatttgtacatcaaaatattcagctttatgacaaataaatttcctgtgtgaggtgaacaaaagtgtgttatcccgaaacccctcttcaaaagatgtggattccaccttggtaagggaattgtatacagaaatagtaatgacggcatggcaaatgaaagactgcctgcacccgtattacaacctaaagtgtttcatcctatcaagtaaattcttatttcttaccaatatcaactatgtctcctgtagttgactgatctgcttcagatgctggacgcttcttacttgcttttttatttttctttggtgaaaccgttgcttctggctgcaaaccatctgtaataaagcattccacaatgtttaagagactaagcaagtatggcaaacattctatgatcttatgtacgatgcagataactaaaacgatgatcttatgatccaaacttgcaatccacataaaattgtctacaatgaaattaaccaaattactccacaaatactcttcacatttctttctctcagattactcagaaaaaataaattacaactacctgaatggtcaactattttcacaaagagaattatcaatgtcttaaaaaatctaaaaaatatagggagaatcaggccaaccttctctaaagtttcacgaattataaaaatactatggcaaccttttctctcaaagcaccgtcaacattagaaaagtaaattttagaaacataaaagataaatagagtggaaaatacatgtttttcagcgctgtcagaaaaagtcaaacgacaacagaaacaaaaaagtttatcacaccttttgcaactccattttcgaaaatgtttgtagtctcttctgaagcatttatgacaacatcctgccctgatttactaatatccacaagactgaactgggggtgatcaattgaaccaaaagctacgagcgctttcatatctttgctagcatctaaactttgtaatcttgcagcaaaaatagaaacgcgactattcttcacactttcaccgttttgtagggccttttcatcttcatttactttacatgttactttaattggattaacctcatcttctaatagtgatttcaaatgccacacataagctacacctgactttgagatcgccaagacagtcaaaccaggttttccattgcatccatctttacattgaaaagttaatggagtatgtttcatagaaagaacagagccacgactcacggtaccactatttttatccaaactccatacttgaagatgtttatctcgagagcctgacgtaattagggcaccagcatcatcagatatagaagcaaactgaacctggccctgatggagcataagtgtaactatcagtatttgaactttaaagatgaagaaactacccattacaaatatgctttagtaatcttaccatctcattagaaaactttgaaagttttttcccatcttccaaacttaaaacacatattttatcatcagctacagccaaaaaattcccatctggcacataaatgaaatatcattaagtcaaataacaaagtgatgtgaaggaaaaactaacacgtaatacattgatcactaaccactagaaaaagcaaaagcagatatctgctttcttgaagctttgaactctagtaaaggcgttccagtttctgagttcatttcagatacctttccattagttccgaccacatgcagactacgacctttatttgtaaaagataaaccagccactccactgaaaaaaaataaatagaaatacatgtacaaaactatcagttcatctgaattagtatcttgaccaaattattgtgcagatgaaatcatgcattctttcatgacaaacaaaacaagcagtttcttcaaagaaggcctctgatacttacatgcctaaacctttagaatgaggcctcatttctcattttttatttaaaattaggatcaaccccaacccctacaatatgtgaggaaaactatagcaattggctatgtaagtacctaggaggaactcgagcctcaaaccttatgggagcaaactacatacctgaccatttgagctacccttttgggttagaatgagtccctcgcgactactgtagcaaaccattacgagtaagaaaagaaatctgaagtatgtatgctacattttacatttgctattgtatacatgcatattgttcatacattaatgtttggtgtgtgtacattaataaatgaaatgaattattcttcatctgcagtaaggatgtagttttcaatattaagttgagtcagcataggtaagcttataacgaacaactcacaaccattggaaactagaacttagaatgaatatagaaaacagatacttgtcaacctaaaaatctagtacaaaaaattagtttaaattcagtcccctaattacagtcaaggtgaatttattagttacaacaacttcgtgccaattaataaagtctcaggaggtgctaatagtacaaattagttgaaaaaaatagctttcatacccaggaaaggagccagtagtttcccacttcctctctccagatgaaacatcaacaacaaagacatccccatcacttgagccgagagctaacaataaggtaccacgcacttttcttcgctaatatttgaaagtaaaaaaatcagacttcgggattatttagtttcaattaagtaacaaatttaataaacaaaaggcttccttgagtcttaaactacctttttcccaacaaaactgcatcccatacaagagaacttactaccaggattttcatccaactgcttccactcagagaataagctcccatcactcgtgctccaaatctgaaattattgatcacttcccatcattataggaaaattaagttcaaggcaatgcacaataattccttggagcaaagaacaaaccagagacatacacgtctactattagcttttctgtgcgtatttctaaacaacaaacttctgattgtatgcacttcgaaagcactttcatggtctccaccagttcaaagtataagaaatacataattttttatctccaaacctcccattttctaagcatttatttcaaagtaaaaaatcagcatatattttaaacatttttttcttctagttacatatgtagcacacataaaaataagcatatgcacacgtgcaatatacatgtttaataaattgatgtgcataaagggataaaaagatcttgccttcacttttccattagaggacaaaattgcaatgtaatcaccgtccggggtgaaagccgagattaggtgcttcatttgctcccttagaatctaccaaagccattcatataaagagagcaattagattaaaagaaaggattatctccaacttgtaaaagaactccgaaaccataaatgcagcaatttcgacagttcccactgatgatttcactctctagttcagaattttctcaattcaacaagcacaaacaaacaaacccagatattaaaaacaaaaataagacaacccatttgtttatccaagaacctttttttttttattattttacaattgcacaaataaattatacatattctgcttaacacacttcctcaataaaaaatccacctatttttaacatatacaactcaaagtgtaaacctttgggaaaattattattattattattattttagaaactacaaagggaaattgagcacaatagttcaatatatcaatatggccaaaattatcaaacatcacttactgtttttcagaagctacgaggccgttggaaaaacctgcggcgttggcggtggacggctgggaactcaaggcaaggaaaaagagaggtctgagttggaaagaattccgaagtgaataaaattaggaacctataacaacttatttatatgcctaaattaaaggaattggcgaatacatcaagttttttagttcaaaacttctttttggtgaggtatttagaaaataaacacacacacatgtatatatacatatatagcacaaaaatatatacaatatggaggcatgaagggtataagtgattaccagctcaaaatatgaggctccggcgatccgtcgtggtctgcgttctccggttgggggcgtgagggagcctaggagagaacggcgggcctgggtgggtgtgagagagagggaaaggtcaggggtttatggttttaggttttttgtatttcttttcattccaaaaaaaaaagaaaaagaaagaaaaaaaaacgggttttcggatcaatagataagcatactgggcttgaccttagtgggcttagactagtgataattataaggaaacttacaaaaatactgaaatttgagtgaatttttacaaaaatactgtcacatgaattttttttcaaaaatactg

SEQ ID NO: 110969 - DNA, 5631 bp, Cannabis sativa
  modified_base (5604)..(5604): a, c, t, g, unknown or other
ttgtcaattaaatatgccaaaatggaattaacaaaaatgaaccatgtattttctaaaatattaaaaataagactctgagcttaatttttaacagctattttttaatatagccaccttgaagacaatccctaacatgaacagacacaaaaaatgttaacaattgtgtcataatacttttagattggattattattaaattttattttgacaaaaaattagtttaaggtgttatttgtaccattttaaaaaatacatgattcattttgtcatttaacaaaacagatgatccaattaataaattttacaaaatacaaggtccaaaataatatttaccctatccatatccataaaaatgtctagattaaaaaaatatttaatatccacatgatacaagtcataagcctttataaaataacagttatacactaatatggtatacacatattatatattacatacataacataatataattataagaaacaccattaaaaaaaaaataccaacatatgttttgagagacggaaggttaaaatagaaattgtaataatttgtaaatagcactcttgtagataaatcaaaagaataaaaggtaagaatagaatgataaaatgatgagtgtcttcttttttatagaaaacaagtcgaacaaaacgaagtacatatttatggttggcatggggcacagatacataacaaagtttggatggatatacaaacatggataagaaaacaccacatcccaattgtgtgttctaagttgcaccatacacctaaaagaattggatgtacctttaggaaaaaaatagaagcctacaagacaataagtgatcccttaatcaaataaaagcttattgaaaagatgtgaaaccacaattagtattattggttggtgagaagtgtgaacccttcctaatcattaccaagccctttattgcccaatagttgatatgttttactctcttaaaatttaattaacaacctaatgaccaccacccgttaaacttggatcttttttctgtattgtttaacgcaattaatgcactaatttagtaattactataagatatctccaattctactctctatttttgtaagctaaaatgttaaaatagtcattaatattgatgttactcccataatgctccctaactattaaattattttaataatattttatcatttaaatttgtcaaaaaaataaattaattttacaaaatataaaaaagtaataatacacttaatttaaatactattaacttactatagaaaaccctgtatttattccctagagatgctctaatataaccaaacccttgaaaaataatcacagaaattaccaaaaataaataaataaaacgataaggactttttatagaaggtaacagtatagatgacttagattagtacaaatatcttcaaaagtagcttatttcaacgatttttttcaaagagagcatgtgaaatgacaataaataaactaaaaaactacgaataacaacgtggcccatgttatgcagatcacaacaaactttgaaaatatctttcgtcgatttttaaataacgtagataaaagggaaagaaataataataattctttaacttaataatgtcaattaaaaaagaagacaaaatagatgaccaatcgatcaaatttgcaacgatcaaaagacatatagaacacaagaaacaaacaataaatagtaacaatagtaagtagaccagattggaattaacatttaacagttataaactagttagcaaagtaagtatgccagcagctctacaaaagacagaatcacctagctagtcattagagtttttcaaaaaaaaaaaaagaggtacgattacacagatgattctccccttttctataactataaaaattcaagagcccaaaattcagtgggccaaaagggggagacagcacaggagtatacttcttcaacaaaataaatattaagaaaaagaaccgatgattaacaattaacaatcaaaccaatcacatggtattgattcaatcttaagacagcctagaagactatgctatcatcttctccagccaattcctactcgtcatcatcatcctacacaccacaaaaccaaaaaaacagtatcacaaattataaaccccaagttatggaatgaaaaaaccatgacacaaattagatattaaaaaaatgaattcaattctaacaaacctctccactgccatcttcatctccttcatcttcatcattcacctcagacattgatttctcagaaccttcttcctcagcagcatcagcaccttcagcctgcaaacaaacaacaaacaatgttgaatacacaaataaacaatttctagaagggtatatatgaatatatcaaaatcagccaaaataacacaattttgatatcccacttacttgtttcttgttatatgctttcatgtttttctcatactcaatctttcttttctcagctttggcaacaaatggtgccttgtcctgaaaatagtttgcataacattaccatatatataaatatatatacttgaaaaggttttaccactaataaaaacaaaatacacttacagcctcagtcatcgacttccatttctcaccagcagctttaccaacctaatatattcaataaatacacaacgtcagatcataatgaagaataaatatagattcctaagagcaaagttaaaacgacgaatatagattcttacagcagagactgctttgttgttagggttttccttgttaaattgcttcctgaactcctcccttgaaccaataaaattaaaagtaaattaaactaatattaagaactgagaattacactaacaaaaagttatttttattatcataaccgaatacttacatgaaaacgaagaaagcactggaaggcctcttaggcttgttaggatccttagcagctttcttcgatgctttccgacctttagtagcagcaccagcggccttcttattcaccgcaagcctacaataaatacgacaatcaaatttaatcttcatagatctaaaatcccatatcagcatagaaagaaagccaaaacacaactcacttgggttcagctctcttggatgtagacttagctcctttcatagtgaaatctgcaaaaataagaacgattgaactaagaaaacagatcgaatttggaagataacagagagagagaaagagagaaagagagagagagtggtaccttttgagttttagggttgaaaggaaaaaatgatttttagggtttgaaaaagaagggaatagaaataaaaggaaaggtataaagagatattattattattaagatttttttggggaaattgaaattcaattgcgcacgaaatgaaaatttaggggtttaggcgggaatttaaatttcatgccacgtcatcaatcctcgtacttatttcttattggtccattcttcttcttcttttttggccagtcttttctttccttttgtgtttcctttgtgcctggtttctctcgttctttttctttctattgtactgtagttctttttttccaaaaatatttatcattttcttttaactatttttaaactcttattttttatttattgtataatatgaatttgttggtcttaataaatgtatgtaatgaattatctttattcgaaaaatgtaataagataatagttatgtttctttcttttggattgttttcaagaatatttatattatattttaactatttttttttatttaaggcattatttttttactatgaattacttcatcttttttattttgactttgttgggtttaaaaaacatgtataataaattatcttttaaaatacaataacttatagttattgttctttttgtttctctattagtaatttgtattattgtgtcgtgtttgtgttaacatatttataatacgacacaaaacgacataatgaattagcatgtcacacaacaagcgacaatatatttataacaatttttagaaaataataataaaaaacttatgaaaaataattcgtgtcattgtatcatgacacgacacgattataaaatgtgaatacgactatagcatgacacgattatggtaaatactaacacaacagaattattaaatgtattaaaaactcaaacgcaaatgcgacacgagtattaaatgtgtcacccaaacccatttattttgtatcgcctttaagttgtctcatcgtgtcctgacacatcttgccaatctttcatttacgttatttttcaaaaatatttattttattctatttaaccatttttcactccatttttaattttgtacttgttggttttttataaatctatatataataaattatctcttaataaactagttcatttttttccacacttctcttctttatcagattgtttttcaaatattttttgacattttatttgaactttttttattttaattttttcggttataatatatgaatatgataaattacatctatttctattagtttttatagaatttgttcggatttattgtctagaatttctcccaaaatacgtggcaattctggagaaagccacgtggcgataggacccacactacggagcgcgcaatctagattacccctagagcttaatgttacaaaaggataatgacaaactggtcatcttcgagaggtgctaactagacaatgggcattcgctgcttcttcctctccgcgagtgaattcgacctggagaaaggtacgagaggacaggcgaagtataaacattactcgaggctaaaaacacagtatgtgcatttaatgcagtatgtggaagagcatccgacactttacactgaacaaacgtgcttaagagtttaaactcgtaattctctgattttacaagacctcatacatcaattgacggctgcataaatgaaatgtctaatcataattaagagatgagtcaagtctcatcaaacacctatagacaacctaaatatatcatggaaagtaggcatcatgccctaagatcatttttattttggaaattgtgcaaagcatgactcatgtaaacacgataagagtggccttttaccaccattatgagactataaatatcccaatgatgtataaaaaatcaatcaaaaaattatatgtaatgaatactcctcgttaatacagtgactcgtggattaaggttcattaatgctccaaccacgtaaaaatcttttcttctaccattcattaactacttcacacagctctaattatttgctgccaacaaccttggtcaatatttcggtgctttcattgagagttgtaggaagctcctaaacataaaatcataaataaccttgtggtacgatggtgatgacaagaaacacttcacgtccacaataacctaacgaccaaaaagacccaggagaagaagaggcagcgtctagggtggacgctgaaagagaaggagacaccaatgacctcgaggatacaaaccaagaagaatatgaagaatacgataaagacaactacacgaaactagttgagctaaggcaaaggtttgctgaccatgagattgttgtcgtcaaaagtgagtgttttaatatttatactcgcaagtgcacgaatcatttnggaatatagtgttcatgtaagtgcaag

SEQ ID NO: 110970 - DNA, 6513 bp, Cannabis sativa
  modified_base (6476)..(6488): a, c, t, g, unknown or other
tcatatatttttttttttttttttaccataaactgacatcgaagcgaataattgcgcgttcactaaagttttaattagatttcatcacaaatcatcgcacaaccaattatattattttaaataatataatgtttagattaaataattaagtgtgacaaattcaaattataacatacattatggagttacaaaatgtgtgtggaatgatcacaaaatatgagttgcaaatcttttaatttaatgatcatttgaatatgtaactctcacttctttttcactcttaaattagtaaaagatgttactaattgtttatgaatgcgaaagaatgataactattgaaaatatagctgttggagacttgatttattcatttataagatgtataaatggttcaaaatcaagtggaagtaatttggaacaccttggagaagaattggccaaagctgaaaaaatagtactagtaactagttactgttttattacatacaagtgcatacgttttgaaagtttgcaagtctttctaacagcctaaaactcctcaaaatcacccaattaataacataaatgcccaatttatgattggtaacatccaagtgctttatggtggtcattcatgttcatatgagagtgaaaactctataaatagagaccatattgttcacttgtgagaaatagttaaaatcatttgttgtggttagaactttgcgaggatatgctcatctttagatactaggctgagcatatgaggcttgataaatccttaaaagcatttttagagcttccctaagtgttcatatgagggaggaaataacttttaggacaaaggttcttgtgccttggttaagctttttgtcttatttttcttctttttctctagctttcttgtaatcttgatgaaatacttttatttatattttgagtattttaattgtaatcctcctattctctcttataataagaacttttctaacacaaccatcatcgttgttggacaaaatctaattttcatcattaaaacgttattttttttaatatctaatttttgtttgatatatttttttctgtttgacatccttaaattctactcttaaatttttgtttgtttcacatccttaatgtctaagcataataaaaattaagtatttttttttatttaataataataataatagaagtttctatgataaataaaaaaaatgtgtaaaagaaaaatagtaaagggtttgatttatgaattgttgatttatcataaaaatttaactgttgcaatattcggtgttggtttgttcgaatataaaaaaagcttttatgataaataaaaaaaaatatattaaaaaaaactttatcgtaaaaaattgttatgcctttataaacttcttttgaaaaagtaaaattcagagagctggttttcggtgatgcgaaaagattacaggttttgatttatgaattgattgacttatcaaagacaatttttgctatgataaattgtaaagaaaccaacaagaaaaaggtgacaaattttggattttgaaatgacattttttttttttgatattttgaaatgatatttatacattaaaaataacattaacagtcctagaaactaaaaccttcgcatactgcacaagtagtggtgaagcattacactgttccccaaattcattttgagcatggggagggggacgagaggtacaaataggataatgaatgtgtatgatgacaacagactcaacttttgccttctctagtgtggttgtgtctttgtaatgttcaaccaactggatttcacttagcaggagggcctctgtaataagctggaacagtagcagggaagaacatttgccttactccttcggccttgataatcgggaagatgattcctgatgcactctgcaaagaaacatcttagctttaagttttctaccctaaaacatatgggaagaatttagagagaagaagatacgaaaatttatgctcaccgaaaccaatcttgctccaatccacatgcgcttaggcgatggaaatggaagcaacaatcgaccaacaccgaatattgcaacagcaaaaaaatgaagaaccaagctcagtggacgagggtttaatcctgaaagaagagacactggtcctgttgagaaaataccacctaggcttaaataatcgaagcaagcatcacgcatttccttccttgcttgatcaggtgaagcacaaaagaccttgtacagagctccagccaatgtgtttatagtggatgctactggctgcaaagtggaagaattaagatgttaataagttgagcaaactatattgaatgctattataaatcttgacattttatgatattgcatcatgcaactcaaaatggcaacatcagagatcagagccagttcaattatgacatcaacatgttaattgagcttaccttacgcaaagtgtaaaaagattcaaggtatttgcagagattatatgaatcatttaagtcatgtaaaggcttcagaagatcacgaaggacaacaatatcagacaatgctacagtcattcctccaccggtaagaggatggcgcatgttaaatgcatctcccattagcaaggctccaggggtagggtggggagaagcaggcatgctccgattcggcattgtccttatgttacccttgtcaattgcagccacaaaggaatcaaaaatttgaggaggaatctgcaaaatgacacaatgtggtcagtttgaaacaaattaattcaatagctagaaaattcagtgacatgaaaagttgcaaacagaagaaaatattttgaagcagtagagcaagtataataaacctgaggagccaccacagccttcaagtacttcgccatttcaccatttgaaatagaaggaaccttctgtcctggaacatcaaccagacagcgaacttctgtactactaatttgatagaacaaaatgggagaaggatctgctagtataacatgcccgtgatttacatatggaaggttgcagttttccaaaactaaaccaacaaaacaagatggcacatctacctgcagaaacaaaacagacaaaactttaaattctcgaggactttcttcctaggaaaaactggctgactcatgtacaaactagaaaccagtttatctctacttagatttaactgcttcatacaaacttcgtaatctgacaagagtgagaggctacaaccttaggattgcaaagcgaacggcgtaagtttgagaaacagccatcacaaacaatagtcagaggcgcatatgccgccatttcttggccagtcttcgtcttgtattgcacccctttaactattccattttcttcaagcagtgtagtaaccgttccttgctctagttgtacactaaagaagaaaaacatataagaaaagagtattacaatttcttgaaagacaagagattatatatcagttgacaaacaaaaagccaaagatgcagcattaatttacaatcacaaaatatatacaatgacaaaatatatacctcggaagagaagcagcttttgcccgcatcctctgaatgaaacgcccattgtgaaagctccttccagccacatcggaatgaaatttctccaaggggtaagacagccgagtgtcttttccatccttgaaaagagcatatccaaagacacgctgggcatcaatttcctctacacaatctgcatttagatacaatctgaccttcatataaaaactatttctaccttcataggaaggaataaaacaatctgaaactactcattatcaagtacataattgtactatcacaaataatccagcaagttaccaagttcaaacagaatttaccttgaagtcccagctcaattaatttgagatagcctccaggttgcagtagttcaccaacaattctgtctggctccgttaagtctctttcaatcacatgcactcgacgtccatcctgcacttgaagacaaataatcaattcgaaaattgatctcacaaaaattgacttgccagtgtacaataggctacataaaagttggcagtgtacaataggctacataaaagataaaactagactgtagtattcgagcatgagtcagtagcaattaagttatgctgtttatcagaatatgagcattcatcacaaattcatggacaattataactttgtagcatgaattgagaagcaaactagggatccatacacacttaaatatgccagatttttatctatatatggacatatttaataggggaactatttaataatatccaattaaaaaaagttgcccaagagatataactaacaccataagcgtgcgtgaacttattttgcttaggccatagttcccttaaaatttgggtggtgtaactaaatacaatattaaaatgtttccagtgaaactaatttatgtccgagtggggtaagtataattctaaaacaaaattttattaacaatgggtcaaagtttaaaacaaaagattgcacattgataccgaaaagtccaacaagtacaaaagataatttgttttgcatcaaattagtgagcacacaaagtccgattatttgttggagctttcttcgggctaaattatttaataaaaataataggaaaaacaaatagctgtagtaccacatatgaatgacgtgaaattgaccaaaattattttctattcatattattcagctggagaagatttcttaaagattattttcgtaccgtttaatctaaaaataacaaatcaaaatcgatctgttcaaaaactcatctaggtgatcacaacacaaaatgcttttattaagactccaatcggagcttgcatataaattataggaatacgtcaaaaatcttctcgccataactattacagaggacagacgccataactacgaaattatttatcgcatacatgttcctacctacctatctcctttgaaagtttaattcatgattttttttttgaaaggttttattgatgaatctagaaaaattaaaatcaaacaatgatgacaaattcacaaattccctggtatctctaatcccataaaatcagctgcaacacttaagagtgataaagtttcaaaatactctcaaatttatttttcagagctacaaaatagataaattgagagaaataatccaaattccaaagcttaaaaaataccataaagtaaccagggcattaagccgtgtctttcgttttgattattttcctttgttgttcaattaagttggtgatagatatagcatataagaattcaagcctgtctcccgtactagaagtcaaaaagaatatagcaaaaaactatggattcgtttggttgcagagaaaattcaggaggatgtatatatatatatatatatatataaatataaaacaagcaagaaaacagatagactaccttgccgagtgtgtgagcaagagcagaaccagcgacaccggctccgacaataattacgtcgacgtcgccatctttggatcggcattcgccgttaatggccgtgatgtcattctggatacattcggttatcttgtccgaagaatccttcggaatcttgttcttcttgagaacaagattgtagaaagcaagaaggctgagaaaagagactgagatccaaccaatcacgaactgatcgaccatttccggcggaaacgacaaacaccggctggtccttcccggtcgttctcggttctgtctctctttcggcaatgcctgagtttttgtttttgtatttcttttttggaaaacagacccacccacgaggaggtttatgaggacaacgtgacactttttatatccctcgctcacaactcaaagtctcaaaacgacaattttacagctcaacatctacgttaccatacaatgctaaattgcgccaactcagtggtcacactcaccagccttagcctgcgcctgccgaaccacgtgttgactaataaaataactgttatttccccacctctcctccttaattctaatacgttttcgcacaacaagggttcaacattcgggtccgaaactgggtccacctgattgaaccgtctgctccgccggatcttaaaaccccggaagcctgcaattccatatcgaaacacacaatttcaagtttgcgtttcttggtcactagtcggtttgggcgtcggttcttatttggagaattttcatatgagattgagggtgtagtttatttttgatggcataaataaataatattatagggttatgagttttattaattttttttacatttatatggtttttttatgccatatttttgtaaaaaaaaaagtagaaattctatatttggaaaacaacaataaattttatcggaaaagtcgccgaaaaagtcaccggcattggaaaagtcaccagaaaaatcacagtcgttaaaaaattcgtcgaaaaagtcaccgaaaaattcaacgtccccggaaaaatcaacagaaaagtcaacgtttcgaaaaagtcactggaaaaatcaccagaagtannnnnnnnnnnnnataactaaaaatataaccggttata

SEQ ID NO: 110971 - DNA, 3977 bp, Cannabis sativa
acctatggccagccaagcttcaaataaggcctccttggccggccaacatttgcatggatcagaacacatattttttcaagaactcaaacatgttcttggtgttcttcatgtaattcatgacccaaagagctaagaaccataatgaaggatagatttagttcttttttcatctagaaatcacacattatgtatcataaggctatcaagcttggatactgagtttttttttttttttttgctctctcttattgctttcagattcatccttgtataaatacaactaaaccgggagtaggtcattacctgctatcataagggggtcaaacctgtataacaaatcttgttgtttactgcttttaatttttatttgtacaaacacgtggcaagcattagatctatacgaccccattttcggttgatcactttttgagatcaacaacaacattataacataatacaactaataatacattattatggccctttatcaaaatttatcattgttgagcaagctttgagttaaaatactcaaacttgctcaatacgtggcacaaccactaaacgaatctcaaaacaataacaaacatccgtaattaactctccaaagtagcccctaactctcccaaattcagacagaaaataagcaccaatttatcaaagagaaatagttcactaggattatcttgagtccttgctactaatttccttctaatccttgaagaattccagctaatgaatgaaggaatatgaattggtctagttttctttgagaaagagtgagatctggagagaggggtttcaaggagagagaaaagggtttatttaaagtgatgttaatctcttttaaatctttctaacacattatacactaacttagtaaatacttaggatttctaataattccactaaggaagataagacaaaaacataagggataattaccatttctttttccataagaaaccaagcacacctagaggtaaaatgatcaaaactattaccctgtaaaatcttgacactctaaaagtctaataatctcaccctgctaaatcacaaatgctatatcataattatgtcactttagtggccatctgtcgcatttccactgttaccgggcataaatcataaaaatattaaatatatataacatacatggcacacctagaacttaataaaaattttagaattgaggaataataactctaatgcctatttctaacaataggtataaatttctactaaagcacatattattatatataataaataaattactaataatctgttaatttttttactaatttttacatctaagtatgcagtcattaaatttaggttattaccacgctatctattgatagaaaaactttcagttttgagtttaagtcctagaattgattaatatgagttgtttactagtttactgcagttatgacatagggtctggatcttcaagcgatttctactcaagttgacaaagattcttgaattcggacttgatgtatggaaagtatacttgtaccacatatcatgtcaatatatgattcaataattaacatctataagaaagagttattactctattggctgtctcattagggtacagtataagaaagagttattactctaatttaaaattgttgttaggtttcttacttatcggttattttaataagcaatgatagtcacattggttgtttcattaaaaacggtgaataattgttactttattaagtaacatagtttgtcttattagacacacatttgttattaatgattgtttttattggatagtgtgatttcttacttatcgattaagtaatgtgattacttggttataattaaatgtatatatttgattaagtaatgtgtaatatttatgctttatttttcttattaagtcgttgtgacatacaagtactttgtggttcaaataattttatacttcaaataattagtttaattttaattaaatcacaagtttatttaaactgttagtttattattacaaactaatttattaaagctcacacatgttgtgtctctacgggttagggcattgcagtgttgttatgaaagttaaatttttaaaagtaaaataaaaaaaaaattgaacatgtatattagactatttatgtaaggataattatgtaattaaatattattcaaaaaagtaatattttatttggactccaaaaatttataaaagtactccccacttaataatatttattttctatatactaaatttttttaatttttttcctccctcttatattcttacaaaatatacacataaaataaaaataaatatattttaacatgtgataaagtgtggaataagttgtttggctagaaggctaaatctctctttgttggggtcatgaagatcttcttaggtctgttattctagccattccaacgtatgctatgaaccttttttgtcttctgatgaaaatggttgaggagtttcatagactttgtgctagatttttggtgggaatgagctgatgataataggaaaatacattggtgcacgtgggaaaacttatgttggcatacgagtgatggtggtattagttttcatgctcttttcatcttcaataaagctaagttagccaacaagcttaacgtacctactctgttctgggttcgttggtagtgcgtgtgacgaagggtctttacttttttagtggtaatttcttgttgtggaagaatcagctaaagagtcttatatttggaagagtattatatgaggaaaatagcttttattggagggggtgctagcttattaaagaaattactactgtgagtattaggactcaagcttggatactgagttttttttttttttttgctctctcttattgctttcacatccatccttcaattagtatggcaagtgatctcaaattggctaatgggggttggaataaaagtgtgatgtcctattcttggtggaagaagatgccaaaatccttgctatgacgcgatcacaagaggttcacgatcatttcatctggcattgtaactcgtcgggcaggtatacgatgaagagtgaatattggacactaagattaaggtttttatatagaaaacttgcttaaatgggttccctacaaatgttaatcttgctactcataaagtgcccactgttctctcttgtcttctttgtggtataaataatgagattttctttcatatacttagggattgtgatagtcttggtcctattatgaagttggtagcttttgctttatcatcttcttctttgtcacaggttaatatattttctatcgtcgtagttattaggtccataaccataagctccttgatattaaaggtgttcttggttggattttctctttctcctgcaacttccaagaggcgaattcgactgtctcaacagctattgctgctctaacctgacaacccttgtgctcgcctaagaacacatagtgggtcctgctggtgaatggttggttcaagccgaatacaaatgttggtctgtgctacttcgagtttcgaatgggctttggggcagtggtgcgtgatcatgttggtacatgcattgtttcgtcagctactccggtagtgggtttgctcccttctccagtggcagaggtaatgggacattctaatgaggattcagctctgtgttcgattctagtatctcaatgtcaaagtggaaacgaattgctaagttgttgcaaagttgttgagtgaaaaagatacttgtttggtagagtttggtacagttttacaagatatttttgtagtttgtgattgtcttagtgtttttaaattttcgtttgtaatcactctgtgaattttattgcttataactttgtcacattagctctttcttttaatgaagcggtgtggtggccgggattacacgtatttatataagtcttttgatttttggcagtatattaaagatttcattttcagtgaaaaagagagagagagagaga

SEQ ID NO: 110972 - DNA, 6939 bp, Cannabis sativa
  modified_base (55)..(70): a, c, t, g, unknown or other
  modified_base (6379)..(6390): a, c, t, g, unknown or other
aaaaaacaaggccaaacaagccaaattattttcaaaaaacaattttctgtttttnnnnnnnnnnnnnnnntttttagttatgatgccaaacatggactaagttttcttttattgtctctgcatttcttgttgagtccgttgcttgattgaaatgtttaagctcgctcttgttgctgaataacagaactgatgcttctcggcttcatttcgcttctcttaactgtctttcaaaatctaataagcaaaatatgcatcccatcccatgttgcgaacgacatgcttccttgcaagaggcctacatctgaagatagtcatcatggacgccggcttttgtctgaaggcggtttggggcattgtgagaaggtactgatattagatttcagtattcctatctttataattcacaatgcttgtaagttgtaagtgtctgaataaatatctctcttatcccaattgatccattcttttcctgtttcagggaaaggttcaaatgttgtcattggaagcattacatcacctacacatcttcatctttgtattagctgtagttcatgtggtgttttgtgttacaacaatgattttaggaggagcaaaggtaatgaaatgataacactttttgagagaaacttcatacttcatactctacataaaccttttctgttatgaattgtgaggattccattccatgcagataagtcattggaagcaatgggaggattccatcaggagagacattaaggcatctcaaaaccgtaattcatataaaccaaacctgaatctctctactaactacctatctgcatataaaagaataagctatataaaaactagtttttgacttgtgaattgcctaataaatatcattcatttcatctgcagttcgaacagatgttgacaaaacgcaagctaagcatcaccgcgagttcctagaaaatgcatctggatattggaatagagtagcaatagtgagctggattgtgagtaaattacttgtgttctttcttcccaattcaccattcttatatacaagctagcaatactccacttcctagtcacactttgttgagtatctatatgcttattttgacagaaagagaaataagctgattaggaaaatttagataacaaatgcttacaatttttaatttaatgttttatttgcagttatcatttttcaaacaattttatggttcagtcacaaaatctgactacattgcactacgccaaggattcatcaaggttaagaagcttcaatctataaattcctttgttatttaataatgatttttcaacaacttatctctaccttgtgtccactgcatgtatcttcacaattcttataaaaaaggagcactgtcctaacaatcctaccttcaatttccacaagtacatgttgagaacacttgaagttgatttcaggaaaattgttggcattaggtgataaaaaccaactattattttagtttatcattgttaaaataatttcaacatttattgattgtaattttttttttcatcatctgacaacagctggtacctatggcttttcgttgtgatctttcttctaatgaatatggatggtaacaagtcttttaacctctcaattacacacctcattcatgtattgaaaatctttcaaggtttcttttctcatgcttgaattgttaaatgcaggatggcactcatacttttggttatcatttttgccattgattgtaagtggtttagttttcttctagattacacatttttatgatagctctaccatccttaagggaaaatcaatttaacacaaaagttcttatgttaaatattttgttcaaaccacagcttttgcttcttgtcggcacgaagttagagcacataatcacccgcttagctcaggaagttgtggagaagaaggaagaggatcaggaatcccagcagaaaacaggaagaaagaaaacaaatgataatgaaactttaagagtcaggccttcagatgaacacttctggtttcacaaacccgcttttgtcctgatcttgatccacttcattctgtttcaaaactcatttgagattgctttcttcttctggatttgggtataacaatttctcaactagttaattaacacatacatgacaatatttacatagaatatatacatttaagagtaagatagttgacatccacattgactttcttgcagtgtacttatggttttgactcctgcgttatggagaaagtgggctttgtcatccctcgacttttcgtagggtaatgatattgacataagccaataacttttcatgagttgtgttctccttttgcttattgctcctgttttgtgcagtgttattgttcaagtgctctgcagttacagcacattacctttgtacacactcgttactcaggtttgataatctaaacatgctacttcagttcaaagttttaaaggctttctttttacatatcccttatcagtcatttcacacaaaactagcagaaatcacgaccaccttgcaaacagatagaactgttaacatcagtagtagcaaagagaatagaattgtttcttgcttccttggatgtataacagacttgtggcacggatgcagatgggtagcatgttcaaggaagggatgttgggcgagcacgagggcaccataaaaggatggatagaaggagttaaaagcggacgtgaaaacatgcagaataattctagacgaacagagatacaaaaaatggatacagaattatctgagattgttcaaattacagaacaggaatcagccgaaatagttcaaattgcagaacaatcaactgctgttgatgaagaaggaacctcaaaaacatatatgactgaactgagtcaaaaatccaagccgcctttttcatcatcctaatttttttcttacagattatgtgcataagtgaggaattggtggcaattaagtgattaaaaagagcagctgcttcaatctgtgtagttttcacaaattcttgagtttgtatatgaaaataaaatcacataatactattctagctttcaatcagcgtcaactttctcaaaacataaaaactaccaaaataataaagcaaacaaaatgataatcaagaattggtgccacctttttctgcataacaaacgttactagacaccgatgttcttataaatcttttccattttatacaaacagttaatttttttttctttccctatattttgttccccttctcttgtaattacaaagatcaaaactaccttcaaaactaaaaaagaaagaaagaaagattacaagttaaagaatctaatacctctaaaatttctgattcttttaggctatctaagttatttctcagcagatgacatatatgaaagtcccatatgcttaggtctttcaagtggaagcttctccatctcgaaattaccgtggttgcccacagatacttctccattagtatctgccatttcgagttcattgagagctctttttgcataaacggtgaaagcaactgttgtaataatggcaatgataaatgaaataatattgtatacaatctccactgtagtcatgtgatagtttccatactgaacatttgctaatgtccttattaaccgaccactgcacagtagtaaagaaaaagttaacaagatataggaagaagaattacatacaaacgcacatgttcaatggtgacagacgcaagctgatacagaaagtaaaatcctaattcaacaaggcaatcttaaaaataaactcttctttaattttttagtatattaaaacctgttagcattaaactagtatacaaactagtcattatctgagttgagcattacataagaaatggagcaaggataattctattaagtaaaaaccatttaaagacagttaatactaactgtatcaaattagtacagctcacctgtaaatgtaaatgaaagcctctggtaccattccagcgatggatccccataaataaggccaaaatcgcatacttgttacaacaattgcataattgaagattgtgtatggaaacggtgagaccctaaagatagctactactcggaattgatggaaccagctcccttctccagcaagtctaagcatttcagccttctgtggccatctattcaaccattgctacataatgaaacaacagatgaaaataggagatgaattaacaaattgcaactctgggacaactaaaacttcataaacagtcaaaagataaaaagtctcacatggattcgttcacgaaatagaagaccaattaaatatggcaggaccattccaatagttgttcctaccataattataacaaaccctagaccatatccaaaaatcattccagccaaccacatagatgggccagaaggtattaagaacacaggaaaaagagccagagaagcaacaagaactatggcaagaacagggcgtccaaaagcagtggcttcccattgcatgattgggatgagaacctacaatgaaataaaaagaaaaaagaaattaaatagtgccacatatcaaccaattctcaaggaagaaagtaaattaaatagtgccacatggctaataatgcaagctagcaatgaacaacttgacagaatcagccttaaagtgcagagcatagtttaacaaacagacagcttctgctttactattttcactcagatagatcatttttatgcatacattcttctcattctgtggacgcaaggggcctatcaactttttctctgcttatatgtaatcacaaagaaaaactgagattaaaaacagagagatacgagttggaagtaccttttcgaaaacaaatggaactccccatttcaacagaaggagaatagatatagtgacaacaacacaaaacaataaggctttgacccaccaaagcaaagacttccttgcttctgcctcaggttgcaacatttcagtttctgttcttctttcatttataacaagcctaacatattcactgtcttccctcacatgatgcacagagtctgcatgctttccaaactcctctgaagagtcggaagacttcatcatctttgtagggtctcagaaacctggaaacaaatatcagtacgtcaagaaaaatatataattggagcaaagcaatactaatttacctttaccaaagcatcatttatgcacatttgaatttttataaagaagttctatctcatatatctttaaaatcaattaggcaatgtcaagtacttgaacttcatggcattgcatgactgtatactcatcatctgaaacaagaataacagcaggacttaaaactatattacgtttccagtgactagatgagcaagtagaaccattctaatatgccacacaaaatcatagtagaaggaagttatcatacgctagagtaaactatttgcattctattgtatatgagaagaatacttttaggcattagcagaactcactggtataacgactgttttttgggtttgtcctattaacctattataatgaatagcatgaaacttgaaaagggtatcaaaaaccaaaatccagtaatcgtttgctcactttctcagtccaacaccacacacactgacccatcaactatgacgatccctggaattttatagacataaaacttaaaaaactgcagctaaacgatagagtttaacctaaaaataaagcaaaagaacaaaaataaaccaaaaataaaataaagttaaatatagccgaaccaggatatactacagaaaagaagtcaccaactaaaaaaaaacgaactgagctaaatcataaatcattgatggtctaatttaacacctacaatcattataatcgaatactatggtttatatcatgttatctgtaagttattctagcctaatccagtcaaaaaaagtacgagaatccaaacgaaaattcatgaagtaacgctgacccagaaaataaactgaatttcatatcatagccatgaaaagaaacagaaaaaaaaattacaaaaaaaaaaaaagaaaagaaagaaaaagaaaaagagaagaaagagaaagaaagaaaccgttaccgattaacaggggaggaacgcccaaaacttgtttgtgcagtgggaggaacgcttgcggttccaaaaacggcgcctccgcctgagactgtcgctttaaaaaaatatgaagcttcttggtttggatttgattgaagaagaagaagacgaaaacggaaaggaacaaaaaaatggttgctttaagtgattactcgggctgccattatttcttgggactttctttcaaaaaataaaaatttgaacttgcatattaaactctctcttctctccttaattttaaattatatttttaagataagcataatcaaaattcttcttctgcttctttcttttctattattattattattnnnnnnnnnnnnattattattattatttatttgtttaattattgttggttgttctattcttctagaaagtaatcagaaaatcaaaataaatgttcttttttcttttattttattttgaaggaaaaaaaatatattgttggttgtgtggtgttggaatagtcagacccaacaacaaggtctcgttttgactttactttttgttttccattttcattaaatgtattgttattgttaatttgttcaaaaagaaaaagaaatgtattttattgttataattataaatccatttgaggaatgtcgtattttcaacggggtcgacacattctaggaagatttattgagcttatcgtcattattttaagtagtgagagttaatttatatctctttctcttgttgataatatctctttcaccaaaaaggaaaatatgctaataatattttcaaaacaacatacgatatattattagcatatttattacgatatatttatttagggtaaataccattttggactgtgttttgcaaaaattacagattgaactctctgttttgttaaatga

SEQ ID NO: 110973 - DNA, 3406 bp, Cannabis sativa
aattaataaactcttatgctataattttagtataggtgaaattgtgttttgcatttatttttaatattctaaatgtgaaatttttgcttaacactttatatccggggttaagagtgttgacttggaaatattttgacataaattaaatgggttacccaaatttatttttacttcgtattgttttcaagttggagctgcagtgttgtgtcatgcctcaagtgaagaagctcaaatgtcaaagaagaaacattctattcaacatttgttctcaaatcacagttttttctaatactaaaaataacagtcatttttacttcttaaaaatttcaaatgaaaatattgggtttattgtcattaccttttattagacggtctcaggaaaacacattggaagtttgattagaaagtacaaacatttgcacattcgggtcacagccacagctagcattttcttcttgtaaactgcaaagacgtgtctgtatttcctgttgtgatgtaggctcgaatgagagtgagaacatcagcttcaaaaccctttagttgtagttcttctaacggcctgcaagtgcaatcccatcccaagacttgagaattagtgagtttggacaaattcctctgcattgcatttctgtgtagactgtagagtgataaagcttcttccaccctttgacattttccaagtgcattaatcaaaagtttataacaaaactatatcaagacaaaggccactctgctttagttgcaagtgcattaataatcaaatacaaaaattactactatcacacacagaggcagttgggaacaattgtagctttaataatactgcaactgccaaccctcacttatggtggaggaaccatcgttacaaacaccaacaaagtatacaaaattcaaacaaaacacagaaaaaaaaatgaatagtagaggaaacttcctcattctctttacagatgtaagaaagaaagtccctcaaagtcttctgttttataaattcaagtagtcagaaagaatttgatcctctcccataaagctttctgttgtagaccctttgtcttaagaaaattctgcagttcctttcaagccgaaccaccaaaaaagtggccaaagtggaagctatctacatctttgacaatcttctactccctattaatttaccctgaatcatttgccttacagcaccactgaatacataattccataaataaatgagtaatagtgtctaaccatccttgagataacacttggtaaggtcttctatgttcccatccaaaaacctataactttggaaggtacacaacttttccacaataacttggctcacttttcttcattttgcatctaatttgaaatcagtgtatgaaaaggctgacttgcaagagaatatcttacttggattcaccttccaaacccaaaaaataatgcacactgaatacagaattgagaaaattattaacacataaccgagtagaaagcacaaaattaaagtgaacatgcttattactcaagtaaaaagtctaaatcaatacctttaggaagtgagtgcagcctcttttttgttgggcaggaagtgtgtgcagcctcagcaacccaaacagattaccatcgacaggagcttcacccattattcgtctacttaagtgagctttaattctaagataagatgccaaatgagtacttcgcctactttctccttagacctcagattttctttattgaatccatgaatgctcctgaaataacatttcttagtttactgagaaataaattcttagtgtctgtggaagaagacataacaggtgacgttgtggcaataaggacaaagttttccccatttctgacatcaatttcatacaactcactgaaaacttgctgaaattcatgctttgttgtctcataaaaggcattactctgaggaatgacattcaaagccaagattccatttttggagagaatggatttagcagccataagcacatgcttctccccaaattccaagggtggagcatagacaccactcctggcgtcacttgaatctaaatcaaccatgataacatcaaactcagcatcaatagaactagcattacattctccggaagggtgagaaattttctcaaggaactccattgcatcaccaacaaatattttgaggagtggacaatattgcagtccaaaaaactttctagcaacacttagaacctgttcatcctcctccacgcccaacacctcaaaacccagttgggttttgagaaatgatagcaaagccccaccaccaactcctagacataaagcttttggcctaaacccactaaaaatccggtcttgaatatgtttaccaattagagaaaggcttgccaccatgggagataaatagggttgcagtaaaacattattatcaggagagaattcaacttcaccaatttctatagaattgaagtcaatgccttccttgggaaagatacgtacctcagattgaatcaaattgggcattctcttaaacctcaaccgcctccggaactccctatttcctgctccattttcaacctcaatttctacatcttcaactaacatctcaccaacaattgaccccacaaacctctccaataccatgccgcaaataacaccatcttcgtaactcaaaatgggtatatggggatttccatgtttgaagcaagacttaggcgataaagcaagtaaaagaggtttgaagctgacctccatcgacatgctcatgctgttgttgttgttgttgttatttttgctataaatggttgaggaaggatgatccttttcgggggagtttccgagtaggatgaggcgggagattccgggtgagctgtgaagaaggtggaggtgacccgattcggtgctgaaaatccaatcggattcgcggtgttggggaacaaacatagctgcaactagaggtgggtcgagtgtgagagtcggtgagtcgagaacagcaattcgaagaagtggggaggaatgatttgggtttgggttgggagtgggaaaggatagagagataaatcgagatggaactatggcttcgaatgtggttttgtcgaccgccattgttggtttggactatgactccaacaactcgatttgagctgatcaacacaaaataaaattaaggagtgagtaggtaaattgggttagaaaggcttaaatttaacatatacattatatttaatttatatataatgaggagtgaataggtgcattgagttggcaaagccttaaatttaacatatgttttttatgtatatataattgagaccccttaaattcaatatatgtattttatgggtatatacagtggcggctaaaccaactgaactttacggtttataacacttaaccacaaaaattgaatttttggcaactaaactacttaaaccctggttcc

SEQ ID NO: 110974 - DNA, 2355 bp, Cannabis sativa
ttaattaaaataatgtatacaaaattgtaaaatgccctttataataaccttgtctcaattaaattgtagatagccttcacatttcttgtttatccttctctgattcttgcatacatgggtgaggctgccttcctctctaaacaccatgatgatattcagagaagcttctataaagctataccaggtaagaacttcatagagttatcaaattgattacatacagtaatattattatcatttccatcttttgattgattctaatgcttccatttctgcagaagctgtgttttggccggtgttcattgtggcgacctttgcagctgttgtaggaagccaagcagcaatttctgctaccttttctataataaaccaatgttctgcactgaattgctttccccgtgtgaaagtaattcacacttcaagcaaaatatatgggcagatctacattcctgaggtcaattggatgttaatgtgcctatgtttagctgtgacaataggtctgagagacacaaatatgattggtcatgcatatggtacatttctaagctactagagtgtttttgaaaaatattgttgaataaaactttgaccatttttgcttggttttgtagggctggctgtgactactgtgatgtttgtaactacctgcttgatggctctaatcatgataatggtgtggaagaaaagcatgataaattccatagcatttctgttgttttttggatccattgaactgctatatgtttcagcttcctttcacaaagttccagaaggtgggtggatccctattgtgctgtctttcatttttatggctgtaatgtacatatggaactatggaacaatgaagaaacaccaatttgatgtggaaaacaaggtctccatgaatcgattagtgtccatggggcctggtcttggcatggttcgggtacctggaattggacttgtttacaccaatctcaccagtggggttccagctgtttttggacactttgtgactaatttgcctgcattccatcaggtgttagttttcatttgtgtgaaatgtgttcaagttccctatgtttgtgaagacgaacgccttctcatcagtagaatggggcctaaagagtatggcatgtttaggtgcattgtgaggtatggttacaaagatctacaacaggaaaactatgattttgagaataaactggtgtctggaattgtacaatttgtagaaatagaggaagagggtagcttcaacatgtcagattctgaagcattttatgccccagaacagactttcatgatctcaaatcaagaagagaacagagtgcagcctttgtgtgattcccaagagactaagcctgtggatggccgtttggaaaattctctttgtaaacatgagtctattcagattttaaaagccaaagaatctggtgtgacatacattctcggccattcctatgcgaaatcaaagaagtcatcatctattttcaagaaaattgccatagatttagtctatacctttctgagtaagaattccagagggcctgatgttgctctgaacgtgcctcccacctctttgctggaagttggtatggtttactacgtctaacgtctaactgcttcaaaatataacaattatgttcattagtgttcagcatactcacaaaagggtctactgtctaaaaaatattctcactgacacatagggttgcagcattatacttgtatatttttcttatgttaattcttgtagaaaattagaaattggaaaatgtagtactaccaagtttttggtccattcaggttgtgattatctatgtagtgttaaaaagtcagtcatagatgagtgtagagtttcaaaccttttgtagtttcttatctgatgtaatcaatgttaatatattatacgtataaaactttatttcttgaattattgcatgaactcatttcacatgaacaccatgattgaccagctatactcttttaaagccttacaacaactaatattggctgccctcctcaaaacggcacagcatattttcaagatttttattatcctcttcagactattattcatctctttcaaatagtcatgtggagttgcctattatcaaactataattacacaatgatgttttgtaatttctcagtgttccctgaattatttagcacaagtgaacattataattcattttaatacttcatttggtattctacctttggtgatttctaaacctttcatgtactaacaaaaaaaaaagattttccactaggtgagaattggaaactaagagcatgtttggtattgttttctttttttgttttcaaaaaattatttttagaaatgagaacaaaaaatagtttttaaagttt

SEQ ID NO: 110975 - DNA, 8544 bp, Cannabis sativa
tagctacttaattaaataaaatataaaaaaatacttctttttacactatatcaaaaatatgtttatataaaaaatatttaagtcaaactcaactttttgtatctttttttgccgaaaaaaatcttttttattattttttttttcagctgatggaacaatcccgacccatatgatgtaaaaatgaaaaaaaaaatctaattaaatagaaaaattaattataaaaactcaaaattttctaatagtacccattcatgggcaatatccattaaaagtgcatatatatatatatatatataaatttttcattaatttgcctaagtttgcttgacataaaatttctgttaattgtcaatgtcttacctagttaccttatttttctttattttcaggatttattcatagaaactgtgaagaaatatagtattgacaatgacaattgaggtaggatcaaacttacatatgcttatgttctttgggagacattgcggtaaaataaccacaaacccacaaaaaccagccatcaaatatcgagtgtaatgcagatctatccaaaacaacagctccacaaagaccaacccccaacacaactacttttagccaacaaccaaacacaatagaaccatttaaaatttatgtagtacactctaaaaagctgttcttacatactgtttcgtcatttttttttaaaaaaattagtctaattttcttaatgagcacgtgcattagaattatttaaaccatttgtaaatataaattttataaaaaattcttaataatttacagtagcaaaaattaaatttaaacaattactaccacatattaagaaaaaaatagtatatataaatcttatttttaaaattgtaaacacaaaatttttttaaaaaatttacacgatcataaaaaaaaaaaaataaaataactaaaaactcatccatataccgaaacagatagagggtactgaaacacccaaaagcatatatatatacaaaaaaatcaaattcaaaaaccaaccacaaaatatgaaaaatgatgagaacattataaaatgaaatcacaagaacatgaaacagaaaatcacacaatcaacactgccaaggagtataacccaagtagctataaaaccacccgtaatagagagcagctggacaaacctcatccctccccatgattatttgaactcagctattctgcacatcgttataagcaaataacatgttatatgttaaagcatccaaggccccaacatatcacaaacaagaaaaatagaagataagaagctattaaaaggtcattgattcattattattattattatactgataaacacacagtatatgaaagtttcaagtgtataaatatatatatagcacaatttaaactattatccatatggttctcccacattctaaatgacccaaatccgctctcgtttacttccattcttgtgcagttttcgaaactcaaaaactagagcaatggcctctcattcatcctcagatgcttggcctcacattgagccgagatgctagcttctgaccaagagacttgtccgcctacaaacaaattatgcaatatcagaaccttatcacccactacaacaccatgttctattcaaatcaacatatcttagataaacaaaagctgtagacatggactgacctgagaccagtatgagatccaaatgccgcggatctcatgggtgacacgtgggtcagataacgcatcaatccatcgtttgatgaatcgttcttgcctgaaaaaatcaaggtgtgaaagccaagtcaagattagtgcctgcaataagattgagaaattttgattttactttgcagaaaatagaggataagtacctgtctggtgtaaaggatcggtatctctctccaggttgcttgaagttgttctccttctcgataatgcactacactcaccaaataaatacacacattatggcaaaaggaaaggcaattaacatcccataaagtacatatgttaaaatttaagctgaaataactatactgtgaaatacaaggaggaaaaaaagcacaggtataatttattaagaaaataaaactgaccctttctcgctttccagtgcaaatggcaggaggggcggggtacctctctgcatgaccaacaggatcatatcttgaagggaagtaattgacctgaaagtatcacaccaaaggccattagatgtcagagaagtgtgtaaaaaaaattaaactagctattacaaatacatagcatagaggaagaaaatcagtacctcctcatctctgtgcataatattcatgaaaccctcgtgatgattgttgtgatgagcacacttgggggcattaacagggagctgaagatagtttggtccgagacggtgcctctgtgtgtcggagtaggaaaagacacgagtctggagtaacttatcatccgaatagtagacaccaggtacaacaatgcccgggcaaaatgcaagttgttcattctccgcaaagaaattatcgatgttcctattcagcaccatgcgcccaactggctgcaatggcacaatgtcctcaggccaggtctttgtaacatcaagtgggtcaaagtcatatctgtcttcatgatcaggatcaattgtttggatgaaaagtttccactcggggtagttaccagcagcaattgaatcatacagatcttgggtagcatgactgtggttagatcctccaaccttaacagcctcatcttccaacaaagacttgaccccacaggtgggtctccagtggaatttcacgtagtgagccttgccagccttgttgatcagagtataggtgttaacaccagagccatccatgtgcctgtaatcttgtggaatacctatatcatcaaatagaaaggtgaacatgtgcaagctttccggatgatgagagaagaagtcgaggaccctccaattctcctggatgtgagatttagggttgggtttcagagcatgaaccatgtctgggaatttcattccatctcggatgaaaaagacagggaaattgtttccaacgagatcaaaattaccctgtgtcaaataatagagtcataacatgaacaaagaaacataaaaccatagccaatacgtagggattatactatatcatgacagtacatgagagctacacaacattaagttcttcatatttaaagcacaagaaccacccttacacacattataacaagtttcgactttcaagacatattccattcaatatgagagaaaagaaagaagaaaaaaaagcagcagttaaatcctcacctccctagtgtaaaacttcactgcaaaacctcgaggatccctcaaggtttcagggctaccgcgctcatggataaccgtggagaaacggacaattacaggtgtctgcactccaggagctcgaaggaaatcagcacagctaaggtttgaaatatcatgggtggtctcaaagaaaccctttgcactggctcccctggcgtggaccacacgttctgggatacgctctctgtcaaagttcgctagtttctccaccagatggtagtcctcaaggagaattggacctgttgaaaaagatacaatattgaaaaacaaatacatgcaaaatactcaaagctaaagactttaacaaaatattgaactggccatgacctatgttaatagcccataaacaatttttcttattaaaaacaaaaataacacaaatttcatactttatcacatatgaaatacaagctagttttatcacatagtaggtgtaataacgttcattctaagcaccaaaacaatgaagatgatctttttataccattaattaacttcacaaatcccacaaaattattttctcttaaaaacaaaagtgtgtacctcttggtccgacagtcagagaagagttgttgttccaaactggagcaccagaattggtggtccaataaggagcgttgtaagcacttgaaggtcggtactgtaatcatttaaaaaaagaaacgattatgagtacaaataatcttcaaacaacactgtcaaaatgattgaaacataaaaataaaacagctgattagaaacacttaagccctcaataacatattccccttctgggttatgcttgatttacaaatctattcacctaacgatttaaaccaaccatatcatcatataatcaaaaaaacaaataggaatagatgatagaaaacaaaaatcaaatctttttaaaacaaatcaacatgaataacaaaacaaataaaaggggaatataaacgatgcaagtaccttgtagggatccattgaagagagagaagagagaagaccaaattgggaaattgatttttgggtgtggcaagcaaatttgggggaattgaaagaagggtgtgagggttttatactaattttaaattaatttctcaatttcaagagactcatcgttatcttattaataatatctatatatctctggacactgaaaaatgacgtaagctgttttgtaaatccaaattttgactccaatccattttagcgtgtttttctcgctcaacgatttttcacgtcattatctcggcccaactttctatacaaaaaataacttataaattgagtaattagcaccaaaatctcttatctttaatttatcccaatttgaaatcaaattaacgcaatagtaattcagttaatatataaccataacatttaattgaaatcataaatataaaaaaataaataaatataaaggattttaccattaaaaaaagaaaaatattaaaagataactatagtgtctactacttttataagatgtaatatcgttattgatataatatcagtccacttattttaatttaataaagattattaaagaaccactttctaattataaaatattatatcatttaaacatactgatttagcaatactaaaaaaataaaaaattaaatgtataaatcaaaacataaaaaaatttggccgctaataactattattcactcaaaaattattctcattatcattaaactcataatattaagaataaataaaaaggaaaataatatgaatgattgtgtttttgttctattggtttatacaaatgaagaaaaaagtttttttttttttaaaaaaaaaaaaatctttcttatttggttataatttaagatagtgaataaaaaaaaaattatatttttaaagtaatttacggcataaatacttaagtttaatttccagttacaaaaaaaatacctaaattataattttggaacttctatagggacctacttaagtaaattgccacgtggcaatttttgattggttcaagtcattaaatttttattattttaaaaaaattagttcaaatataccaataagaaaatgacatgtggatttaatggcttaatatttaacgtttaggtacctacagagttctataaatataacttagatattattaccactaaaaattaaatttaggtatttatttacaactggaagttaaacttaagtatttatgtcgcaaattactctatttttatagtcaaatatttgtttaatggaagaaaatattatattttcttgttttataaaactttgctgcatgttaaattttattgtattttctttatattttattcatttaattaagcacacatcatttatgaaattctatgaatatctaagttaatgatttccttctaatcttaattatgaatattttagactaagttaattattgacttatatatagactacagtgttgtgttaacagttatgagttagaataaatgaagtgatgtatcatagtctaaatacaaaaataaaatccatttaaaaaatgcaaaaaataaattaagtaatatatatcttttgtgttttagtaaggaattaaaatatatatatatatatatattttctattcattacaaaataaattaatattttgctataagcaaacttacaatataacaaagaaaacataatataagtaatacagtttttatatatatatatatatatatttatattggtaatgacaacttatattgtttactcatattgatatgagaaatttcttacatttattaaattgtcaagtttgaattgttgagtttttttctttttgctagtggataaacaactttcattttttgttatgttaataaataatagaacaaatgatttttcttataataatttatattcatatttatattttagttttttaattattaaaataaaaaatgataaaagatatttaatttgtatttatctatactatttacagcgttatttattttacgataaaattaaataaaatataaaaattatatttcaagagaaaataaacttaggaaatgtgttgtgggtattacattatgggttgtataaaactgatttttttttctagttcatatatatgcatgaatgtattcttcggtagtttaggccttgagttaaggtggatccggactagcccctctaccttataaaatacaatttatattaattattttaagaatttatatatacatatattaacttatctatatataaaataaacctatagcatgcattaaaatttaggatacatattattgtaaatttatatttttcatgatctaatctatattaaatagatgacaatttcacatgaatatatcgtgagaggatattcacaaggctaaaaatggtataatatttttatttatttatggtgtatattcttaaccaaaaaaacaaagaaagaggtggagaaaattgttaattgcttaattttatttttattattaaaataaatgagaacgtgatgagctcaagtttccttatccaatattttggttgtttgctaaaacctactcaccaccactagagaattagctgacgtggcccattaataatgtgccacgtatgcataaaagagccttgaatcgtgtgctcctcccaaaaactaatccttttggtgttttatgagaaatagagacgctgaatgataaggttcgtaatgggccgtaaggctgagattctgccacaaagccgaagcctgtttttctgggcccactattcactatttctcttttctttctaaaatgacatctttctatattatttgtatttgaactttgaagttattccattcacatttaacaagacaaatttgattttttatgcttcctagtaagactagtatattccctctgaattatggttttgactcagataattgaaattttggaaaattttgagcaaaaatggtggttaatgatcttaaccataccaatgtcgaaacgatattgttatggtcctataaaaacttaattttagaagtaaaaacaatgttaaaatgatagttgatgatggcactaagaaaatttgagttaagtggtcaaaatgatgataaaaaatgattaacaattacaatagtatgatctcaattctcaagcaaacttaattttaaaggcgaaaacgatagtagaatgatgtttaataatggtgatgcgatgctaaacctttacaatttgaggctaaaggatccttgacgatgtgttacgatgataaaaaacttgactttggaggccaaaataatactaaaaactatatttaacgatattgttatctttttataaaatcatcgtcaaccattatttttttatgagacaatcgtgaactatagtttttgcctttaaaattaaaattttatgaaaccatcgcaacaccattgtcagccatcacttttagtatcgtttcgccctaaaccaaattttaatagggctattgttaaccgccattaaccatcatttagcaacaaaaatcaagtctttatgagagtatcgttttgaatactgttttttggccttcaaaatagtttttataaccatcatttttttctcaaaaattatgcagatttcagaatttgctatctaggaagaaaataaactgtgatcaaatccaaaaatccatgcacaaatgtgtttgaaaatatataaattagtgttttatgtaaacacttgggcagatttaagttttagattgaaattttcatcatttaaaatagatttttttttaatgatatggtggtggattaaagagtcaaacaatgttggtgttggtgttggtgttggtgtgagatgagtattatagtatcaattgaatgaggatgcatatttcacataattattaaacttaccaaaaaaattcattacaggcaaacgtaataatcataccaaatcagaacttggcaatggcaagttggcaaccagtgttatcagtcctggtcttttggcattgctttaggggcattttaaataagttttggatttaacgcaaatttcttttatttaatgctaagatattttcttaatattaatatattttcaaaataaaaagaaaacaaattaaacacatttctctattataatttggttgatctaccttacattttattggagatcaatgataaatttaagtgcaacctaccaaattaagaaaaaataaaatttcaaccctcctaataaattagtcggtttggatgggttgtactaatatttttttttttatatttaattgttatattt

SEQ ID NO: 110976 - DNA, 7008 bp, Cannabis sativa
  modified_base (6666)..(6679): a, c, t, g, unknown or other
aaaaaaaaaaaaaaagttaaaacacaatatatggggtaattccccaactattttaggtgccaccttgtaaatgtgttaagcactgctaatacttaataacagtgctcaaactgatttgacacaacacattttcatataaacctaataatttacaatatgagcttacacgtgtcttgtttaagatattaacaaaatatataccgataaaaattgacaaaaattacaattttattacttacccaatcattaagtctacttcgtttacaacctcaaaattttaaataattagatattacaataatgaagtgatccagccccaatttgaatctacaataatattgtaatttgtaacaattaacaagagaccacccaaaggtaatttattattacaaatatgtacctctttccattttagtctttgaaattgcacagaaaaaagaatttttttttttctctactcttgcttaaacgacgacaaactttaaaataaaattggcaatgtcatgtcgtttcttgatcaaaagagtaatggactataatccgtttcgtttcatttattcgcttacaaacgaaacgtttctttttatcctttctcgcaccgtacttcttctctcttatccaaatgaacaaaacacataaatctcaaacgcatgctctctctttctatcatcaatggcggcttcgctctcctcaatcctgaaccagcctaattgcggtctcttgctaaagctccacggaagatgccgtttcggtctcaggcttcgtaatttcgcttcgcatccagagaggcctatttcgcagtgctacctccgccgccgcacgcggcaaggaagttcaggtcttaaactctcccgaagcttttcttcgtctcagtctcctcttctcagcaagcccgagactccaggtctccaccacttcattgcccaagcagctctcacatcttctgaagctcaagaagagtgagttttctacgatcctgttcgctgttgaattattcgaatttagatttaatttggacaattttggttcgttatagttataattagaattgggttgcaattattacactgagtaacttcaaagcgctgatctttatggcttttcattttgaatgtttgttgttagtaaaagcttaaagactcgaactttatatttggatagtaaaaaagatattgaactttattgggatttttcacttgcttttatcagatgatagtgtatgaatcttatgcccactttctgtttgattaaatgtctagccatgtagcagcttctgaaatttcttcaaagggtcgaatttatcatgagacttatgggtgtcagatgaatgtaaatgatatggagatcgttctctccataatgaaaaatgctgggtttagtgaaactgtggatgtcccagagaacgctgaagtgatatttattaacacttgtgctattagggacaatgctgaacagaaggtttggcagagacttaattacttttggtttcttaagaggcattggaagagcaatgttgctactggtaggtcacaatccgtacgtcccccaaaagttgttgttttgggatgcatggctgagaggctaaaggacaagatattagattcagataaaatggttgatgtagtttgtggtcctgatgcttacagagacttgccaaagttgcttgaagaggttgactatggtcagaaagggatcaataccttgctttctcttgaagagacttatgctgatattagtcctgttcgaatctcgaaaaactcggttactgcatttgtttcggtgatgaggggttgcaataatatgtgctcattttgcattgttccttttactagaggtagagagcggtcgcgccctgtggagtctgtagtgagagaggttggtgagctttggaaagagggtgtaaaagaagtaatgcttcttggccagaatgtaaacagttataatgacacatctggagatgaggaagaagttgaagcaggaactaattggaacctgagtgaaggattttccagcaggtgcaaggtaaagaaagttggtttacgtttttctgatctcttagatcgactttctactgaatttcctgagatgagattcagatatacatcccctcatcctaaagattttcccgatgagttgctatatttaatgcgagacagacataatatatgcaaatatatacatttacctgcacaaagtggcaacagcacagtgctggaaagaatgcgccggggatatacccgagaggtatacttggatctcgtgcaaaagataaggagaattgttccagatatggggataagcagtgatttcatatgtggtaaggggtttcccattttgacaaattactattcaatactttggtagctttgctaatttgaggaggaaatgtcattatcagctattttatttgtggttgcagtacataaatatgttgtattctactttctgtgacatcatgaacataggattaggaatataaacataaacaagtgttgggtagttgcaaaacttcttgtggggttaatatagctgtgatcaaaatatcttgaaaatgattctcccccattggttttatctctctttatttatccttttaatacaaaaaattctccagaaacgggactgaactttctaactagtattttgcttaagcttttgatgcatggtgcaactcaattccattccttgtgaatcgactgcctatctacagtcgttctttgttatgtgtcatcgacacttagtctccaaaacattcatgtgcctatcttcactcgtgaatctgtaatataaatttgatggtttcatacgttaaacttggtttcacaatcttagattctgttatatgtaaaatgtatcttgttttctcggagcattgacttcataatctgtaaatttctacaggattctgtggagaaacagaggaccaacatgaagacacagtaagtcttataaaggctgttggttacgatatggcatacatgttcgcgtatagcatgagggagaaaactcatgcaaatagaaactactctgatgatgttcccgaggaagttaagcagagaaggctgaccgaactcattgaagcatttcgttcaagtaccggtcagtgttatgactcacaagtaggaagtcttcaacttgtgttggtagagggacctaataagagagctccagatacagaacttattggcaagagtgacagaggccatagagttatctttgtcagtactccagtccctcaacgagattgtgattcaaatgggacaaggaagccaatggtgggtgattatgtcgaagttcgtatattgaaatcgacaagagcatctctatttggtgaagctcttgctattactaaattgacatcattttacaacatcgagtatgaagaagctattgcctgtggaagcagaagttgagaatcatttacttattgttacctctctttacttaaaaattttgcatattattctttttcttattttgacaatagctgagcagattttgctgggaattatgattacaagggcatttcatttgtataaagttgattaattatcatcatgacacaacttatggttagaaattggagaaatgttaaaggtagttatggtgcttaccactttcacaagatattatcactaatacaattcaatatcgggtctaatttattttactttaataataatttgaaaaaaccactgactatttacatgattttggtgttgggcatcatggtgcctaagaatagcaagcaatgctcttaattcaactgaatctttatcttttttccatgaatgtgaatatgctataaaaacctgtaaataggagaaattctctctaagactctaatttcatcggctacaaatttacaaaacaaatattggtagttattcaaaattgagaatccaaacgatttatgttgcttagaaagtatagtaaagtgtatggtaaaaaaataagagattaatcttaaaaactaattagtgaaattaatggctcataattttttttttaataaaaatggcttatagtattataaaaaagcattgactatcagtagtttctaacaccatcataaggtgacatcttgtgaataattaacagtttttcataattatttttaaattaatatacgagagtaggtgatacatttttaaaaaatcatgtaattttattaatagcaatctgcaacctaatcggaacatctttcctgttagaaacacaaccaggattagaatcagaaaaacaagtcaactaatcagctgcttgatttccgaatcgttttacaaaataaactaaaataaactcctataaaaaagattacagtatcacagttaacattaagaacatttatatttagtttactccattgctcaaaagacacaacagtaaatctgttgcaacaaattcattcaacctcttagcttgaacatttaactattgtgcaaggtaagtagttgcaccattaacaatcccttcaaccgcagagaacttgttactcctaaccactaacagtaatttgatggcgagacatcaaaaaacaaaaagacgaaccaacaacgaaataaaataaaacaaaatcacattatagagacaagactaatcacatcaacctaaacgaaaaacactcaaaacatgtcacatagacaagactaatcgcagtagcaaaatcacaaagtccgatcaaaccacacctaagcttaaggagtgctggcgggcctaatcagagaaaagaaaacctcaaatgtctaatttaggaaaagaaattctagccgacaatataaaatattttagaggcgatacttaattacaccaacaataatttactatttggttatcattaaaagaaaacatatggatctataaaagtataaaccgtattttaattaacaaataggttctcattattagattatcaacattagacccacaccacatttgtattagtagtgcgaagtatgaacttctcttacacctttgctttttaaaatataaaatataaaattccttttacactacccccaccatgtgtggatgataacatattagattttatatgtataatattgaagaaaagaaaaaagaaaaaaagaatgtatttgtgttttgtatatatttattttctttgctaattaaaaaaaaaagtgacatttgtttctttctcaatatggcttgacaagaatgtttgcttctctagtgaagtaagagacatgtatgtgtatatattcatataagttggattgaatgtaagaaaccaaaaccaccaaaaattatgttataagcttagaatagaagttaataatcatgttgttgaaacttgtataaaataactgaaaaaaatgagaatctttactatttatggattccttactatttcttggttgtagtaattcttataggtataatacaatctgtgaatctgatacaataataagctcaaatgagtctgacatttttatttttaatatttaaatctaaaatatgacatatgaatgattatagtgcattgacccaagcaaggaagcatgataactaggtatatttaaaatcaataaataaataaaaaggtgcaaccataacaaagtgtctctatgaaggagggataattttgttgtgaataaagtagtcattacatgatcatatattttttttaatatctatatatatatggaaaattttattgtacacactataaagtttcggaagattcttatttgtttatctattagagttttttaatttgatttttttcataatagtatacattgtagttatttaaaactacttataaattttaaaaaaaattctaattagttggatggtgctcaaatatagtttaacaattgtttaattaccactcatataaaataaaataattaagtgtgcgataaaatattaaaattttatttttaacactataaattatttgatttttttttttataaaaaattataagtaaccctaaatactataaaaattttaaaaataaaaagtttttttgaatgccaaacaaaataagaagtctatattgtaacaccctttaagatggtgtactatactagtctatattctctctatatatgtatttatataattgggtgagacctacctaacactaacaccaataccacatatgaaggctcaaaatcaaaactcttttagatggctttaaagtggtcaactaatgatatgaactaaaataagcttaacaactttcacatgcagccataaaagaaaattgaaaaagaaaaaagcagaggaagaacatgattgtgtaacttgtgttgtgtggtgtcaccttattacaagatttcgtcaaaaagaatgggctcacacttacaaatgatattaaaaagaaaatatataaagtaattaaaaacatgtgcatgcatgagagagatagtgtgtagcatgattgtattgagtaatcatatgtggatatatattatcatattacatgtgattgattacaaaaaaattgttaccttactaaataaagtattgttacactacaaaaatttttacttttagttataacaaaatttataattaaaagtaaaaaaattgtaactaatcataaattatcattcatacattgtaactaaaagttcgtggctaaaagtattagtcacaaaaattataatatattgtgactaaatgtatttttannnnnnnnnnnnnntgtgactaaaactaaattagcgacaacttatatctaaataatatgttttagtcacaagtaattttttatggtgactaattattcacaaaaaatttatgttgtgactaaaaagtgtcactaaaaatagtttttttttacagtgttatattttgtgtacacatattatatatgtcgaaggatcattgcttagagcatttgtaattgagtgtcaaaaagtgatgtattattatattttagtacatttaaaaaaaattactattctaatagtattttaaaaaatgtgttaaatttaacacaagatataacaatatgtcaaatttagctcacaa

SEQ ID NO: 110977 - DNA, 2094 bp, Cannabis sativa
  modified_base (36)..(51): a, c, t, g, unknown or other
aggcggtgtgggattgcacagcttacccggtatttnnnnnnnnnnnnnnnnggactactgactgtcacacttaactattccatggctagtctcaaggaggaagctaaaaaggagacggattgtggagatgattacaagaagaggttcaccacccctcagcctcgggttgctaatttggaagagcaagtgaaggatgccaatgacaaaatcaagactcttaaaaagcaagctaccaaagcttctcaagactatgaccttcaaaccaaactggttgacgagaagattatcaaaattttcactttggattggaagattcaacatcatcttgaaatcctaccaaaagttgaaaagtctgaggctaaagctttggagaaatacaaagccacatagactgaccttctgcgaagcttactagggaggaatttgctcttaatgagtctgaagaacaagctaaggaggatcttgagaaccttgagaaggaaaaggccctggtggaagaagagttatctaaaactaaggcagggagacaataggaactgaaacactcattgatagtcattcttcaccaaatttagaagttggatgccaaggttctagatattcttggagtggagagggacatgttattagagaaactcttggagaatgaagcatcataaaatcgttccaagaaataagcagaggagactgatcctgaaaccacccctctggtaacttcctttctggtagactcttctcttccagctccattggtgcatctaacttctgaagcttcagcgaatactcaaccagatcacctcaccaagccttaaactattctttatttatgttttttatttttaagttgcttttgaggaacaagtgcccctccttttacatttgcagagataatttaatatgccttttgtgcggggcttttagtatgtaaatatttgagattttgaaggtactaaactacttttttattcatcatactattgtttagattcattaagtatttgttacaactttaatgaatttgtatgtgctcagtaagtttacttttgggttccttgaggttctggttccaatggcttgaaccttaggattttaacttatatgtttagactttaatttttctaggacacgttgtttacttttggatttcttgagatcctggttccaatggcatggactttagaatttcaacaatttattttttgaaaaatttaataattattgcttactttcaaatccttgaggttccagttttatcctaaagcctttgcttttatcttgaagcttgaacttctaagattaactatttttgaagcatggacttctttataatttagccaacctgaattgacttggaaatttattaactttaaaatatggtaagatagctgcttacttctagtttcttgaagctccagtttcagacagtactttctactcccatacttaatgttaactcgcttttgtaattttgaagggatactacatatatgttatccccaggtgatttaagaatctagacctttagctacttgttacaatacaacttaaaattataaaagactgaaaaacttcctctgtttttatttaattaatttttttttgataaatctgcaatgtattaatccacaaatcatttacaaagtaagagcatctctacattaagagacctcaagaatatttctaaaatattacaaagtttggtaccattctctatctttctgattcactttttttggccaaaaggaatcaattctatgcttgacagtaaactgtattttctttacaattgtatctacattttcaatcttgttattccatgttttatcaattctagcaaaccatactgagtacattagtctagctacagccgcaataaaaactttcttcttaaaagtgttgatctttgctcgatttattcaccgcaggagcttgtcaagatcagtggaaagggcaccccaggacagccagttcttgacaatcttcaaccaatcctgggctagttagcagttaaagaaaaggtgcttagttgtttctgttggaaattattttaccaggatctagattttttaacaagtatgtttgattaacatccta

SEQ ID NO: 110978 - DNA, 4420 bp, Cannabis sativa
gtaaaactgctccaaaagacaccaatagacgagataatgctaactttaaagacccgaaacacaggctaattataacctaacaaccagcaactgccaaccttgtttccctaaaagagccatgttaaagtccatcaaacttgtgaaactcaagcctcaagcatgcttatgacgacacatacgatcccaactcatccaactaatactgattttttaagatgaacctgtgttccacaaaaattttgccataagtcacttcaattccttacaagtatcaataggtaactaaaaaacactcatagcgtagttgggaagcgcttgcacatttgacttcaacaacagttatttacctggatgagaaagcatgcgtccttcccaaccttggattctttttctcaatttgtctttaagaaacccaagaatagcatttttattcttgccaacctaataaggtaaacctaaataatagacattctcatctacctcatatatacctaacaagtcacaaacagagtctatcattacaatacttgtgtaagaactataaaaatggaggacttagaaaaattaatctttttccctaaagctaattcaaaagtattcaacaaatccttaacattgtgagcttcttcctttgcagccttacaataaatgtaactatcattcacaaataacatgtgggaaataactggcgctcctctagcaatcttgcagccagtaatataaccactttgttcataacctttcagcaggctagagaacccctcagcacaaagaataaaaagacactactataaatatcagaattcgtgacggtcctaaaaataatttttttcagcgatcgtcactaaaaaaattaagtaactatttaaaaacatcgggaaaaatgtagtattcccacggtttaagatcgtagtaaacaaaataggcgacatttatttaataaaatacgattttttaatagacccttatacccaacggtttaaaaccgtcgggtataagggtatattaaaaaatcgtcacctatttctcgccacatttcccacgtgcccacctgctatttttctatttcccacatgcccacctatttcttctctattttccacaccctaaaaccaaaatcttaactctccaaaaccccactcacgcctccgcaccatcgccctcctctctcactgtcttcctccctctctcgatctccctttcttctcgtctctctcttccatcgatctccacccacccctcctccagtcggtctccctctcctcttcgtcacatacgtcggaccaccaccacctcccgtcgatgtccctctcatctccgtatcatacatcggaccaccagcatctcccgttcgtctccctctctctctttctctctctttgagctcggtataaatacagttatttatttatatactttttcatttattgtatatatttattttattattgtataaatttaatgtgatttaaagttagttgttattgtaacaaaattaattagttattttattttaatttaggaaaaattataaaattaatgcagtgtaagaggtcttaaatcacccatgtcaatcagtttcttcttcttaggaattaaaagtagatttgtatagttcaaactagtagggaaatagcctgaatcaaataaggatcgaaccaaattaataacatcacgaccaactacttgcaaacacttctggtaaaaacaagaggtcatacagtctagccccggggacttatttgggtgcatttgaaatagcgctttatgaacttcatcatccaaaactggtcataatagctccacgttctgcttaacagagacacgggattgaacactgctagtaacttctctccatcagtacgggctgtaaaaaaaagacttgtgaaataatccaccatcaccttagaaagactagaattccagtccacccaccttccagcagagtctttaagcttcgagatcaagttattgcgtctttgagcatatgccaaagcatgaaaaaacttgctattattgtcaacatcttgcaaccataatttcttggatctttgtcgccaaaaaacttctcgctgagcatagacttcagacaagtttttcttagccagcttataattagcaactaaaatgtcatcatgccccaatttccatctacgtacctcctatttgcacttgctaattcgatttctaaaattactcgtatactctttgccccaaagttccaactggtgaccacagaaaaaaaagcttcatttgaacaccatcctcactacacacctcccatttatctttaacaacttggaggcacaaaggttcaataatctaagaatttttgaatgtcaacctttgcacactttgttagataactgtggaggtaagttccatcaatatcgggcaatgatccgaggtagaaaactctaagttgtaaagcttagcagaattaaaaagattcaaccaagattgattgactaaacccctatccaagcgcacctcaatccaattgggagttcctctacctttttcccaagtcaatggataaccacataaatccatatcttgtaacccactatcattaagggtttgttgaaatcctagaattaaaaactcaggatattgctttacagcttgtttgtcttcatgagataacacattgtttaaatctcccattacacaccaagataaattcgaatgattagccaaagtatgtagtaagttctaagtttccctcttatgacccctattaggttcctcatacaatcccgtgaatctccaatcgaccatgccctcaacagagaccttcacttcaatataagactcaaaaattccaagaagagaaccctcttcctcgaatcgctagagcaacgctaaaccaccacttctcccttgcacatcaaccactacctttccttcaaaatccaatgatgccatttccatttgatcacgtttacagagtgtctcacaaagaaagataaagttaggcttcttttggatcagaagatcctttaggaactgtaaatttgatggattccaagcccatggtaattccaagataaaagactcataatgattggtgggcctggaaaccaacacccaccatatctccattttttgatccacttctagttggatcgaaacaatctcctctacaccatcatttggcccatcaagaaggcctagttctgtccttcttcttttagaatcgaccaccagcaagaaaccctcatcagcaacattatcattattaacgcacatttttcttgggtcaacaaatcattctccacaattcctgtgattagcactaataaattctctttgtcccgagcactgacccacgatctcctcaactatcataggagcatgattcatgccaactagaaccgtaaccgactctaccagagctagtctctcaatatggctgggaattgattgagtctctctaccatgaccatcttcatttgccaccatgaattactttattcatttagagccaatggagtgatttttacattggggcctcactctcatccattccccatatgattttactattttaccatttaaaacattaaatctacgtggacaaaatctttttgaatgacccataacaccacagataaaacaaaatgtgagaaggtgttcatacctgaaattagtccagaactcaatcccttctttattgcaaagctttatacgtctctttagcggctttgttacattgatagtgactcttacacgaaggtagtcccaccacatccccatgaattttttcttgtccgattctacaaacttgtcaatataattggctacattcttagccaccgttgctgctttgaaacctgaatgtaggtcatgtaatttcacccacatatccacctcattcaactaaactaatttcagatctttcccattttgcattcatttaaacaccaaaagaaactcattaaagtccacagactacgttcaatcacactttgaatatctatttcatgataaagttgatcgattggtatccaactccttgacaaatatccccttttcaagttgccaaagtgaagtcatcaaatgttgcatagcgccaaaatcaataggcttttctgtcaaaaatcttcccacaagacaccatcgatcatcataatcactaccagtcataatactagcatcataaggcagaacaatatcaccttttaaacttcttcttatatatatataataaatatgtatctcttttcaaacaaaaaaaatatgtccagtagtagtatgtagcaggacacatatacatatatcaatctccataatataaatataatatattttaagtataataaatgctaatccaattattttttagggcattttacaattttatatacattattttaattaattacaaaatatgtgcaaaaaaacttattatcatttt

SEQ ID NO: 110979 - DNA, 2611 bp, Cannabis sativa
gggaataataactatattggtagcattaataaccttatatgcatagaaccagaagagaagaaattcgtgaatgaatcacataagttttgtcccactgtatcccatatgttaaagggtttgccttattgttcaattagttgcccattttatggcaacttagatatttgaatatatgtattaattatttacaattgtagcatgtaccaatttaaatatatttaaagtttaattgaatgcccttttagcagtttagcatatattagtgagtgagaatcacgtaaaatgattggtcaacttccaactcaattaacccatcaaattaaacctttcaaaatcatgcattgtttcacttttgtcgtttatttcagtctcttcacacacataatatatatacattacttccatgtattgcattttgcatcaaaaccaaaaccctttttctcatcataagaatccaaaaagtgccttcttcaactttgagccatcataaataaagaggtagcaaaagggtcccacacgtgccaaagcaaagcaaagcaattccaattacaactcgtctaaagaaaagacaaaattttcataataaatagattaaaagaaatccactatgagacaatcatttccagctgtttttctctattatcccatctctttcacctttgttattttctctcactacattcctaaacatttcccatatgcaccaagggccacaacaacaacaacaatcccttcatttagtttgacattttacaatcgtagaaatgtcaatcatatacatacatatacatatatatatatatagacattttatttagttcttatattcatttcaatgatgcccactttgtgtttttgttgatatataactcaaataaaccaaaagtagtaatcacttctacatgccattagtggtacatttattatgtctccttttgcttagtggtttggttacacaactaagttatttgaattttacacactacaaaaagaaaaacacacaacaaaataaatggaaaaaaagggtctaaattcacttcatcttcttaattaacaaataagaatattttaaagtcaatggatattggagaattaatataaggttagtatcaattttgttctacaatacaactaagttgggggtgtcttttatgccatatttatatccaatcaaatattacaatcatcacaaattgtaacacttatgtgttaattctcccatttctttagtgcactttagtgtgagtttcacatatatattccttccaaaatattcatttgttattttttttttctttctttcatggtcagctaaattccactactaaattttaatttcccaagtgttgaaatgccaatgtgacacgtggaaattgcatattgatcgaaaatagctatctcccatgataaagacaacatgaaacaaagaattttcactttgtgtaaactgaaagccttttgtgaaggttcttatagagcttcctctttacaattttcttgttttttcttatttttttctttcattttttcctaatgtgggagtttaaggtttttatgttttgtgattggccaatcccaaattgtacattcctcacttctcattctctttatattttttatataaatatataatgagaagaaagcacatacattctgtaacttttagattttgaagccttaattggttgaaattcttttgggtctcttttttttcttccaaaaacaaaattactttacagccaagcttaatattctttagtttcacatgaatttttcattcacacttgaaagctatttgacctaaataataattaaaatatactaatgaaaatgaagtctttgagtgggtatccctatttagttatcaggctttgcttttcacatgtacttgtcattatacactgtacactatttttgttcgacccatttttttcttttaatattatttattacaaaataacaaacaaaaataaaaaaatacaaagcataacaattttacttatgtatgtcaacatatatgtaagaaaattatttggtcggaatatatatgtcttttgattaattctcactaatagaagtttttcggtttttgagaaattacaatataaattattttatataagaatgcatatgtagttatttaaaatttcttacaaattttttgtaaagttttaaatattttacgatgcgagaaggatttcaactcaaaacaatctatttcacgtattaagcaagcttttatatttttcgtgtttttgacacaaataggttacaattcaattcaaaaaaaaaattattatacgacaagatgtacaatatagttatttgaaatttcttacaacaaaattttgaattattaaataatttaccatgtcgaaaacattgtgttgaagtttattacacaagtaaaatagtattttaattaaagctagtgtttaacattgatatgtatcaaaactctctaacaattaagaaaatgtttacttaattaatatatatatctattcaatggttacatttttattataaccatatggttatatttttctttgacctgtaatagcaggttactaataggtaaacatttctttttaagaattaattaatgata

SEQ ID NO: 110980 - DNA, 9241 bp, Cannabis sativa
ataacatatttcacatataattcaaataatacacctagagttcaataaaatctccagaattgagaaattataactctaatgcccatttctaataatggggatcacaattaattaaactcataaataattataacaatgtcattagtgctaattgccttttctaatccaaattactaaaatggtcattacaacttttgtttccatcgaacccctatcgagcatgtaatattgaaactacccaaatctttaagcttgggtggtcgtttcttttgcaagattgcactgcactcctcagtaagtgccaccatctcatattcttccaacttccttttcttggatagaatgtccttcatgaactttaggtaagttggcgtttgttccaaggcctccgcaaacagaatgttaatgtgtagcttcttaaatatttcaaaaaattttgaaaactacttgtccaacttattcttgcagagtctttgaggatagggaatttttatatgatgctcaatgctcataggcggtgtagcttcttttgcttgcagaccttcagtagtcttctttttttcttgtgctagtgttggtgcctattgatcctggtcttcatccacttgttgcttagcccttgtcccctcatattattttccacttctcaaggaaattgcttgacactgctcttttggattaatctctgtagtattggccaaattaccttgattttggttggtcatttgagcagttaactgtcccacttgattctctaaggttttaatggaagctctagtctctaagatgaattggagtaataaattagttgtaatattcacacctccagtaaaacttggttggtgaataggctgttgtggtggcctaattctctgttaaaagaatccttactgatgttgagactggccagatggttacacttgaatataccgaaggactccacaatagaaagatagtcaccaactcttggaaatctaatggcttaagcttgctccattggtagattatttacatctaccgggcaagtgtcatatgtgtgaggtcccccgcatagctcacaagtaacttgagtctgctttacctgagcagtcatcaacttagtcaaggcctccacttgggctgtcaactttgttatggcatcaatatgatgcatacatgcaactttcttcgattggctcctttatgttggccattgcaggttagtcatggccatctcttcaagcaagtcatatgcctcattcgcacttttctcataaaagccccaccagctgcgacatctatgattggatattgccaaccaacccattgtagaagttatgaacttgcatccacttctcaattccgtgattaagtcgttgaatctctcccacgcttcataaagagattcattgtcttgttggatgaagttgttgatttaagatctcagcttggctactttggcagaagagaagaacttggaaaggaatttcagggctaattcctcccaagtattgatagaattagatggcaaagataccaaccaactcttggctcgatcccttaatgagaatgggaacaacctcaatctgatggcaccatcacttactccatttatattaaatatctgacaaagctcttcaaagttagcaagatgcatgtttgggtcttctgttggcagtcccccaaactaaactgtggattgggccatctgcagtaggggtgtacgtcaatcggtttggtcaggttatagcatatttttactaaaccaatataaatattgggttgcaaatatttaattgtaactcgcccagttaaaaattagaaaaagttcaaattgtccaatgaatttgtcggtttggtcgggttaactcgtccaaaccgttcttcactttttttttttttttataattattattgttagtttctagtattcaaataattagatttaaaaaaaaattatttatatttcaagttaaaaaatactatagtttaaattaattttatgaactttaatataagataaacatataataataaaaaaagtaataatatggtatagattttaaacttcaacttcaatatccaaatacaataaaaagtattaactataaagtctaagttttaagttaaacactaaaatattaatgtctaaactttaaatacaaaatagtttaactaataaatataatttatgtaatatattatatacacttttattaaaaaatatatatcgatttaagtcggtttattcggattaagagcggtttagaataatttataaatcacccgatatattcattgggcagtttggatttttattgtattattttgggttgtattttttatcggtttattcggtttggtttgggtggttcattcgcgttgggcagtttgtaagttttgttgaacacccctaatctgcagtatggctggcttaatctcgaatttgttggcttcgatggtaggtggatgtatacaggatctggcccctgtcaggttgggtagaacataatttctcaagctacggtcaggtggataacgaccattagcttggtcttctacggcaactccattattgccattgttgttgtgtttgatgttattggcctagtcaaccataactacttcttgctcaacccctattacagctctttccaatctttctctctttctgttctgtctgcaagtcttctctatttcaggataataagcaatctggcagttgctcttggacgtcgcataaactagttgttcttgagaaaagaggaaaaaaaagcttgacacaaacaaaattagtacaaaaatcaaaaagaaaaatcaaattaaaacaaaatttaattttttataaatattaactaacaatccccatgaacgatgctaaaaacttgttgtggtatttttaactcgcaagtatgcgtatcgttaacaagttatagactcaaaaagagtgaggtcgatcatacaagggttgtagttaagtactttaaaattaaacttttacttctatttggctatatcgaatttaagagaaaatttaaactagaaaaacaataaaattaataaaaacataaagcaagtaaattaatatgtaaattgacgatgattgaaggttggggttattgattttaattatatctctctattatggtctaacatgattcagttccttttaccaaattctatacaatagcaagtttactcaattaatttatagttttctcagatatataaatctcaattacatgcaaatttttttactctcgtgataaattaaatatgtaaaaggcattaaacacaaaaactctataagctatccaaaccacataaatactctcgtcctatatcaaaatttgtttctattttactatagtataattgacactcacttctcagatttcacataaaaatcataaatatttaattggtgatcaagcaattaaaagtaattaagtacgaataaaatctaaattatttttgctctctaatttttgttccctctaattgcttgctaattaaaagttttcgagttttttgagctcgcaaaatgtactaaaaacattaataatagtgtgtttatataggctaaaatagttacctaaaagataataaaaaaatttaaaatttaaacttaaaaaagataaaagtcgttcttagccgcaactctatttgaaaaggctttctttgtttttgctctttttatccttttttttcagaaatttttctgttgcgacgactgatagtattttggtcataactctctcgatattgttcaaaattagaagactcaagatgttccgaaaagctgaaagagagatctagaacttttaagttttgaatttttctaaaatttgatcagaacatagtctaatttaggcttgaagtttcaactttattttcttacaaaatttcctctattttatagatcgcctttttttaaaatttgactaatttatatattccaagtgttgaaatctgaaattaaagaaaacaagtgtaattttattccaaaaggtgacaatgaagaagaaaagtaattctaaaaatgacacaaataataagctaaaaaatagcctaacaatgtcataattgggcttacaagtcgataaaggaggagattcatctgtgcttgtaataatcatttttgtttctttactgatccattaggtaaagcttctttttacatttcatattttaggccaagaaacaaaagaggagcaaattatacacaaaacagaggactttgcagccttagcatggcaagtttgattatcacaacacttaatagattattgcaaccccttcatcaatattttaatatgatagagatgcctatttctcttttgaagtctaaataaccaagtttttttttattacctaaataaccaagttagctgggaaaacttaaataaatttactaagactttaattacccaataatgttaaatttaattaaagggattattagattatagtattttctttgctacaaaaagtacagatgtgttaagtagtggaaggaagattaaaccgatggtatgcaccgtgcctggtaaaactgaaaaccaagtcatgaatgattctcatgaatacatattaaaattgtaggatgacataaaggaatttgtgttgctattgtttaaggttatatatgtattataacgtatcaataaagggcctagccaagcttttaaatacctattacatacatcatcgatcaccaatgtaatttgacccacccatcagttacatattcaaaacaccaactttcgatttttttttaaatgccaaaatacgatttcaaaatttacactgtgaagtgcccatgttgcatgttgccaacttcacaacacacgtgtttcaaaacttgctcaaaaaatagcaaaagatttggagtttaacttcagcagtcttctttctacatattactaggaaaagaagtatcaagtttccatgtactgaattgtctagctcagctttcatcatctgaatctggtataacaatagcgtccatagatgagttacgggtcggcctttgtcttaatatgttcttcattccaaagtttctgttttccattgagggatgggcagtgtctccagctattctagtactccgacgggaaccaaaattcttggcaggatggttctccttcgcgccttcttcagaagtggctgagtctctagagccactatcatcatcatcaacatcaacatcctctttgccactataattgtcatcactaccaccatcctcaagcataacaatatccacatcagaatcttgagcactatcatccttggagcagacccttttaggggaagggtcatttgggtttgtctcgctaccctctctttctttcctttgttctttgggacttgtcctctttctggaccacatgaatttaacaatagtaaaactttgttataccgaggaagtaaataagcagtaagcagattcatttaataacacaaagcagattcctttgaaatatatttctagagaaacatgctgaacttccaaaagcagcaaacagggaagaaaaatgccgtggcacaaactacagactgtacaaccaatatcatctagacatgatgtaaagtttagctctgaaataaaatactaatgaattgaatttcgtaacactggctatcatattttcccatttattatcgtggcacatttctcaacactatccatggtatctctatcatataatatgcccaatacaaaaaaaaaaaaaacaagagtgatcctatggatgattaatgagacggaaaaaattattgttaataacaaaagtcttacatcgtttgttgtatagcttccttcatcatttgatcatagtcatctgcacatttgagacaagggtatcatatataacactaagaaaactttcaaataaacaagaataaatagcactgaccaatcaatttatcatgtattgtatacattatatttatgcaaatgtcataagaaaggaagatgaaggaatgtcatccaaaggactaaacaattgggcaattaaattcttgtgcacgacaaatttctccatctggttaaagaaaggaattcaaggcacaatattctttctctctcgttctcccaagtaaatggattgcgacagtactggaaatggttattgagcttctattagttaagaacatgctaacagatcaattcactatagttggaatgtgaatttggattttgttttctagcttattcattcatgcgtagtgttaattccctaaatattgaaaatccgaatatgtagaaactacactagcaccaacaatggctacaaggccagaatctgcactgcaccctagccaaataaagagtacacaaggaaccttaatctatttgattccatcagaactccagaacaatatcaagtaaatacgaaggcctataaatagatccaccaacatttagcatatatcaggagctaaggaaaaatgggaatattatgcggctcaccaaatgtgtaattgacaggcctaagggtgcgacatgagcgagtaactctagcacgggcaccagtattagcatggaaacttctttgatcattcaaaagcatatttttcctttgtttccttcttatcgcctgttctttattctgtagagccaaaactaaattgtcagtgtacacattgataattaattaagaggaaggctgctctttccatatttatcttgtccaatttttgtatgttcacttatttgttgattcaatttactctttgatatgaactgaactgctaacattttcacagtaaagaatgaaagtagaaaactagtaagtttaccttctgaattttctcaagaacaggaatagcatcagtgttgagagtcctaccaacagaagccaatgctacaactttgctcgatgagaattcatcctgcaagttttccagcaaagaaaataaatggccaggttctagtctaacatttgaaagaaaatttggactcactgccactttgcgaaattcctctagattggttgccagcgtttcccactctttacaggttgggagcgaagactctcttccaatagattttttctttgtttcaaatgtagttacttctctgtataatctgtatccaacaattttattcccatcatacctatcatgacaagcacgaatcattagaatcggatcatgtgccaacaatataatacaaaggttaattaaccaacacaaataaaaattaccaaaaggaagtgctattcccatttactcctatcttatctttacggaaagaagaaatttgggtcccttgtttcagagcatcattaagataagccactgcatcatcttgctgcaaaccaaaccagccacttaatcaataaaacagaaaaacacagaataaaaaagaaaaagaaaggtggggaagtataatatgaaataatacatcagcccgtatttcacaaagcgctttcaacatcagtaaacgcttaacaggattgagttctttgtatctggggatctcctctctgcacaccacagacaacagtgttcacaagatggtaatcactatcactccacagataagaaattgcatatatacacacgtgaaaagaaagttcatgcataccctttagctaccacaattggcatatccccttcagcaacctaaaaagaaaatacagattgaaagttgttaaacattcacaccatgaaagtaaagttagtaactttatactgaacaataatgaaacatacccacggccaccacggagaaagcttcttacaaagcacagtcacccaagcatcagaaccatccaatgctttactcacaggcggtataccctgttaatgagaatccaagttatgtaacaaatacactaaacaatcaattacttttgaagttttaggcaagcaaagatggaaagaacatatgtacgagaacaaagcacatgtatattataagaaatatatttaaatgaagatctcaaaccttcaaaagtgtaatatggagcttaataagcgaactatcagggtttatcaaacccgcctcaatctcttccgccgatatctgcgattccttaccgattactggctcaaaaacctgaaaagtaaaatcgtaacaagctcacattcccgaagactgcctccaccgctgattcgatagcccatccatcaaaaaaaaaaaaagtagagtcgcaaatttaaggccttgaaggacaaacgaaggaaagaacaaaagaaactcgtacggttaagaagttgagaacggaagcaaactcccatcgtccacgcagctccgcaacctcaggtttgggaacacacttttcgcgtttttcttcgtcatcaaacacgaccgcgttctctttcttcaccggtcggtcgtctcctgctccagttggatcactggccagccgttcgtcgacccgtacctgaccacagatagccatggctcgctcgctctcgcgtgaactgttaagaagaaaaccgtaaaagtcgggtcggagaagttgggagtagaaagatgaagtttttagttttttggttttatttaggggttttcccgcctaaatgatttttacctgagacagtgaagagttttatgactatttggctagggttaactttgaggaccgcctcaaaaaatttgtcactcaattggtgtgatgtgattttatttttatatatataaaaaataaaataaataaaaaattgtgggtttttccttccacatcttttttctagataaaatgtttaatttgaaattttatgcgtaataatgaataaaattagtccactaatttaaaactttaataaatttataaaatgggttaatttttagtaaaacccaattttacctcccaattacatcacatcggcctgaccttcaggagcccagaaatgagctaaaatcgtgtaccatcgggcacacatcggactggcatcgaaccccatcgggcccgaccttcaaaagcccaaaaattgagctaaatgtgtgtaccatcagatacacatcggacgggcatcggcccccatcggaccgacttccaaaaaacccaaaatgaagtaattttgtgtaccattggacacacatcggacgggcatcgggccccatcgaacgggcatcgggccccatcagacccgacctaaaaaatctattttttgacagaaaactcataccaatttcaaccctattaactaacagatctcatcctaaatctaaccttaactaacagattttacaaaaaaatgcaacatattaatctatttcatcaatttaagcaccaaaaattga

SEQ ID NO: 110981 - DNA, 5904 bp, Cannabis sativa
  modified_base (2225)..(2234): a, c, t, g, unknown or other
  modified_base (2970)..(2970): a, c, t, g, unknown or other
gatttttttttttttttttggttagtattgttattgatgatgaagaatgaacatactgattttattggtagtgtgcgtttggctcttttgttattttatctgatttgtgttttatgtcagcagaatatcctaatcttaatctaataagctgtttaactaaaatagatgaaacagaattccaatcaaaaaaaaaaaatagatgaaacagagaggagcactctttatgaatatagattaataaagaagaaaaattattttaattttaagttaggaggaattttcatctaatgtattatgtcaaactggttaaaaataatcaaaattagattaattaaacaataaaattgaaaaagaaaatgatcggtatagttgcagtagtagcgtgctctaaattcaaatattattagatgttttttttaattatataattgaaatttaaaagttagtgatttgtaataaaagttgactatcccctaaggatgaataaataaaagaaagttatcaatggtatagaattctaaatttctagtataattaatgttgaatatttacagtaagcctaaatgagataatggtatgataaattttcataatctaagtaaacaatgtcgacaaagcgggcaagtgggatttttcttaagccaatttccaatgcagatggaatggaaaatgtggttgcaaactgggaaaacctgacaggaatcccctttttcaaaatcctctaagcaaattacacattcatcaataccattctcaccagaacaagagaaagatgatgaaggtgaagaacaagtaggttgtttcaattctgtactattattatggctcccgtaaatgacacacggcggcagtttctccaaggctcgccggtgccgcctcctcccttctcgcccttcccctaaatgtctaaggattctttctaacatttccaagacatgtacgttgttttccagatcatcatggtttccacgttcagcaccactcgttcgatgaaaatcctgagtggattcattggacgtattattattattattattattattattccctgcttcaaggtcgttctgacgtgactcgttgaaaaattcaaaacaactgtgcacaacggcgacgatgatcaaggaaatcatgatggcaaaagcaacaatgcaagcgaagaccacgagtagaatgagtaatcctgtgagaatatagaaaagggtagtggaaattgatggcgaaataaagattaaaggaggaggattttgtgtcgatggggaagacattataattgatgttcgaatgttttgattgagctttgcaaagctgctgaggtttgggtttggctactgccctttgcttggtatttgtccatgtaagttgttgccataagtagttatatccatctaagagttcttgcattattgttcgaattaaacaacctttattttatttttattgttttttaaacatgttatttgagataggaagcaaaactgttttttttttcacttgtgtgacagtaggcaataaaaaataaaaatcggttacatttgattcctcattatagaagtttaggtaaaacaccataacaaaattttaggtaagtagatattgggtatcgaatattaatccaaaaaaaactaatataaaaaagaaatgggataaaaagagttgggtttattgcatggtagtttgacacacgaagcaattattagttatgaccataacaaattactaatatttactatcatttgcctttctaattccttatagttttgataaggttctaattcctttagagttatatatcatatgtctttacaatgtataaaacgtgattaacttttttttttttttaaataattgaatttttttcaagtttatccatatttcctaaattgggaatttcacatcaagtcgtggactgcgttattgtatatcatatattaacattaaaaaaaaggctaattaaaatttttgttcctgaattttgacatgtaccaaatcatgcccctaaatttttaaggtcgttaaaaatgcccactgaactattgagattgtgtgatttaaggatttttgtctaatttcattcaattttactaccaaattatgtccctcgaactttgacatgtattaaattatgcatcctgaactttcatccatgacttttttattaaattagaaaaaagaccttaaatttaacaatctcaatagttcatgaggcatttttaacgaccttaaannnnnnnnnngcatgatttagtacatgtcaaagtgcaaggggcaaaaatcctaataagccttaaaaagatgtatttcgtgcctataatcagtggcggagtgagcgacactttttaataaggatatgtaatacattttgttacttttttttttcttcttcttttgcttttttaccaatttgtacaaaatatttgaatggtatgtactgataattattattttgtaagccattgagaatagctcaacggtaagaaaggggtgggaaattagagagggtatgagtttaaaactaaaacttttaagttaataatattatcattaggttacactaaaaaaattaattttaagaaaattttatatattttgacgcacaaaaagtcactccaaattacatgttttctgtttagcataaagtttagaaaggacatctctctaggagtgtttataaaatagtcgacccaattcaatctgcacgatccaatcaaatctaatctgtaaattgcggatatccgcacttatgcggattgaattagaaaatttaaaatccgtacttatgcagtttggatgttgattgacatataaaagtaaccgatccaatccaattcacacatatttataaaaaaaaaattaaaaattatatatacaaataacattttaatgtaaagagaataatcatttaaaattctaatacatataatacaattatattacaaaatttaatggatcaaatgtatattctattcttanatataattttttttctacatacaatttcaaataaaattaaatatttttttatacatacaattttttttcttcctttaaatttgttattttatttattaatgtgttattaaagatataaaataacaataatttattttattttgttgctgttatgtgaaaaaaaaaaatcataaatattaaataacttaatattaaaaagtaaccaatctaaaatagctgattcaatccctacttttgcaaattggattggattgaatttgaactattgtgcggattgaattggatccaaaaaatgaaatccacacttagtgcggatcggatgcactatgagtaaaatagtacggattggattggatgaacacccctacatccctctccctaaacatacaatcagcataacatcaagttcaagactgtctcgtaagaaaatatgcagctcaattaggagaccgttcaacaaaacataaagcaacattgcgtaaaaattacaatgaacttttacaatcttcaaccactagacaaaaaccagctgaaagtattctaaaagaactaccaatggcttgaatagtaacaatactatctgaatcaactttcactttagaataactttgagatttcaaccaaaaaaatttctttaattcccatcgtttctgccaaaggagacaccactccttgaaaacaagaagcaatagctgctaacaattcctccctcgaattccaaaccacaaaaacataatcaaaccgcttatcttactcaaaaataaatgtatctacattaggctcctttgatataaaaagagaattcactcaatacattgtatatcctctcactttttatacctatctatttataatgattgctcactcaaaattactctcgaacaaaaattcatttaccctttttatttacccttctcatgatgtctataattagtggcggagtgagcaactcatgaaaccacagttaaatcactctaagcccgtgagaattgagatagttttgttgaaattgctgtcaatattggcttgttgttaattaattatatggcaattcctaaaaaagaataatttccttaattaactacaggtgtatattatatacatacaaatatatggtacaaattagtcaaacatctaaaatacaatggcgacaaataggacaagttggcctgttcttcaaccaatgatcgatacaattggtatggaaaatatggttacaaaaaggaaatacttgacaagactcgccttcttcaaaatcttccaaacagatcacacactcatcatcgcctcctctagtactggagctactactactacacattctttcatggcattgcctgccataacttatcaatggaggcaacttattcaacgccctcaaccttggtcctcgtctttcatcaatgtctcgaacaaacctctccaacatgtcaactacctgtacgacattgtactggacaaaacctctgtaaaacgctgcctgatgatgttgatgatgatgaggcatgctattggtgtctgctggtgatgtgtacattatgtcttcttctgttgatcggtctggcctcatgtcgagaagccatgaaagaaagctgaagaggatttggtagagaagaacgatgcacaaagctattgtgaggcatagaattagagtagttagaagatctaaggttatggtgtattggattgaaaggccttgagaaaatattagcatatcgtttaattgagattttcttgaatttatgaacaaaatgttgcccattacttcttttttttttctttctttctttctttctaatactacttttgaatgtaatgtttgatcatgatgatgatgagaagatatcctatttggttttataacatttttgagttatgagaactaaaagtgatttggataatttcagaatctagattttgctatgtatagaaacttgggcttgaagatgacagctaacaatcttataatgactcgtcaaagatatcaaatctcttagctgttataataatgacaaaacaaacaaatatatggattgagcccacgtatgcatttagtgtcgttataatcttttctgggttttttaggaatgaaaaaaatgggggttgaatagataattaggaaattaattaaaaaaaacttccaactaagccgttaggagataaaccaacaataaatactgtggtagggtgataaagaagccaacgcttgcctgttttggcgtaataatttaacaatgatctctaaaacggcatcactcaaataggcagtttttgtttcgttgataataatagcttttaatcggataagattttggtgagataggtttcatatttaatatgtcgcatttattttttgggagaataaaagagatgacaaagaactagattggacttggtaccctccaagtccaaaccttctcataaaaccaaaatgaaggcggatgttattcgattcacaattcacacatttagaagcggcgactgtgtagctaagctaagtagaggtaaaccttagatcttcaatttttaaactaaattatcgaaaaacaaaagtgtatagtatatcacaatatttttattatatttgttaaaaaaatatatatatttttattgcatgttatgtcagaacccacactacaaaaaatcttactttagtcccaacaaaatttgtgattaaaagtgaaaaaaaatataactaattataaattaccattcctatgtagagtattgtatcaaatatcatataatttaagaacaaaacttttttagttaaataaaaaatttaaaataatttttttaaatttgctcaaattatttgtgctattaattggtaattatattaaaaactcgtattattttatgaatgtgtgtatataatacgtaaatacatcaaattataataaaataaaacaatgaataattgagatttcaaat

SEQ ID NO: 110982 - DNA, 924 bp, Cannabis sativa
aaactaaattagtgacaacgtatatctaaatactatgttttagtcacaaataaatttttattgtgattaaaagtcatatttaatcacaaaatatttatgttataactaaaaagttgtactatataactttttttgtaatatgtctattttgtttatacttgtgaaatatagattgttttggttacattgaatggcaaaattcgccacttgcatcaattgcaaagctttaatcgagttttcatgaataatggtacagtcacatatataaagtctagaaaaaagtaaacttaagttgtgtttaattatagaatcattagttgggtttggttggtaggaataaaatcatttttattctatttatttatttttgaaagataaataaaaatattcattaggtgaatcaaaaaaagtctattacatgataatattgtacttacaataataggttaactaaccatttataataataaagacagaaaccctaccaacatcttgaataaaaagacaactaaactaccagttatgaaacatcaaaaagtatgaagaaaaccaagctctcttttctaactttaataaaataagtaaataaatataagtgaaaaactacctcattatttaaagtaataataaagtttcttatttttcaaaaaaaataaaataaaaaagtactccttatttaatttttcttttttgttttattttatacacttttcataaattttgagttaaatttagccaaaaaaaaaaagttaatattatatttaatttaaattttacaattggactccaacatataatagggtaatttaactttatttttgattaaaaaaatataaaaaagttaataaccactcgcttggaacgtcgtattaggtcgtattgtattgtattgtttatattgaattggattatatatatatatat

SEQ ID NO: 110983 - DNA, 666 bp, Cannabis sativa
  modified_base (622)..(641): a, c, t, g, unknown or other
tattgtggcccatgtcatgtgtctttacaatgacctacattttgaggacacatgatcgtatatatactatatactattgttagattttaacttttggagaccaaaatgaaaaaataaaattatttaataagggctaaagtataaattttgaaaaaaaaggaaaaaaaaaaagtagtattttggttttttagaatttagggtaccatggccaccctatactcgtgtgatttttaatacactggtagagttttgataatttaaatgctataatacgtgtaatattataatgtatattgaaatctatcaaaaattattacattattatttatatctataatattgcaatttttatttgaagtatagtgaattgtatacatttgattattattattattattaatttaatgtgcttacacttaataatttaatatacttttatttaaaaaattataaattattcgagcaactcaaactattagatgggaacaaaatatataaattgtataaaattaaaaattgtgaatccttcattgaaaagaaccaatatatggcaaaataaaactattgttaaaaaaagatagtaataaaataacattgagcacactacaagaaatgtcacttnnnnnnnnnnnnnnnnnnnntgcgctggtaaaagtaacttttacc

SEQ ID NO: 110984 - DNA, 3585 bp, Cannabis sativa
aaaaacaaattctcacccaagtaggaagtgcttctatatgttactaatgcttgtagtgtcatctatgagcaggcacgtgaggctgaaattgctgtacagggaaaattggtagatccccagcgcagaaagagcaaaggttagtatttctttggagtttaaaaacttgaatgatggtgtgatcaaattggaatggcctataaaagttccattggcattcttttctaataaagatgtacaaaagtaggtaaaatacattcattttgatgctcgtacatcactttgtgatcatgccatttcttgtttaatgacaatacttatttatttttcaaatgaaccaaagttttattaatatagaaatatgaaatataaaggacatgttagtactgtacaaggaaagataggcaaattttttgggtaatgttaatactaactttatttaaatgtggtagtacatgctaagtgtgcacttattccatacgttggtttgctaactgtgcacttatttccatacattggtttgctaaactcagcttatttctactttaattatctttcaactatgcttttaagaattgtatatatgtccagaagttggtttgtcatttgcaagcaacaaacataatacttaacctgtgagcattttttatctttagcaagtttacggaagcttgatgaacagcctgaatggttgaggggaggaaagctacgtgattatcagcttgagggtttaaattttcttgtcaataggtatgcctttttactcagaactgtttttttgaagattaagtgttactgtaaaaggattatcgtttggcagttatctgtttaaaatctatttctttctgcagttggcgaaatgatacaaatgtaattttagctgatgagatgggtcttggtaaaactgttcagtcagtatccatgcttgggtttttacaggtgtaaatgtgtttattttaaatttgaaattggaggtcatgagttttttctttagagttggaactgaggtcaaggttttgcttgttctctttacagaatgctcaacaaatccatgggccatttcttgttgttgtaccattatccacattgtcaaactgggcaaaggaatttaggaagtggcttcctgagatgaatattattgtatatgttggtactcgtgcaagtcgagaggtgagtcatgcttttccattgcatgtatgtcacacagacatataatgtaaatattctaatatcgtccccattatgtttccgagaaaaaatatttctagtaaaattggcttaatagttttctgttggatgcaggtttgtcagcagtatgaattctacaacaacaaaaatgttgggaggccaataaagtttaatgcattattgactacatatgaagtagttctgaaagataaagcagtcctttcaaagatcaagtggtgctatctgatggttgatgaagcgcacaggttaaaaaatagtgaagcacagctgtatacaaccctttcggtaggctaatcttggcaatcgaatttacaactacccattttattttccttttcaaatttagtttgtttaacattatttagtgctgtaattgacaggaatttagcaccaagaacaaattgttgataactggtactccattacagaacagtgtggaagagttgtggtaaatagtttctcttttccactgacagaaatataagcttttgcgtgtgttcccaattgttgttaattttttgtacatgcatgtaatttactcatttagcaaaataatccagcttctttggtgttgtatgggaataatttcccggcactgattgtgattttgatgagcacatagaccaaatcaagctgtttgacgagtttaaactctctttgcttagtttatttatttaatttatacacagaattccttttatcttttaaatttgcagaacctttgaattattaaatttgaatttcttatctcactctgaaaatatttggcatctttctttatttggatagtatgaagcagctactacagtttctagatatgctaaaattttgatggttggcaactgtttttgttagctgacatagtggaaacgtcatctggtgtctgaatattgtattaaaaatatattttttttccctctttcttacaatatcgctaagtcttctattctcttgacctttattagatttttagttatcataatgtttgtgtttgaactagcttcaattcccagatgctgttcttctatgaattattcattatattttttttattatatattataatgggcataacataattgcagaattgcagcttatattgtaactgaaaataatatagaaaggagacgatggaaataaagaaaaagggagggggataaagtcccgaaagcccttactttattgattatttgatttccagaaataaaataaactgtgtgtgtgtttatatatagatatagatatattatatatatggaaaatgagatttttcttatgtattattatgtcaggtatttcacttgcctgttttatacttctgcaatttttagaccagcatttcattaaccttattcgggtttctttggttccaaagaaacagcttgagaagtagatcttgagactgaaaattatattggaaagccgaatttatttttatgtggatgagggaaactttgcttagtttgtcatatgatttgcctttgtacttttgcttattggttttttgtattcaccttttgttcttatagggccctgcttcatttccttgatccagataagttcacgagtaaggatgattttgttcagaattataagaatcttagctcttttaatgagaatgaggtatacaacttatcttgcctagtcatcatagaatcattttgcttaggtagttaatactgatttcttttagctaattgtctataccctgaaatcaatatttgcatttgaatatgtatagcttgctaatcttcacacggaattaagacctcatattctccgaagagttattaaggatgtagagaaatctttgcctccaaaaattgagcgaattcttagggttgagatgtcaccacttcagaaacagtaagtcataccgtcgctttttaatcaggagtctctttgattaataccagtcaatttactctctctgcatgtctaatgccaatctatttcatttaggtactataagtggatattggaacgcaacttccatgatttgaacaaaggagttcgtgggaatcaggtatgtgtgttacaaatattcttagaaaaatttagtggtattatatgtctactctttgggtatgtttggttgggaggaatgaaaactcagaaataagaaagagaataggaataggaatagaataaaatatattataaataataaagttataattttttttcatcttgcattagaatggtctttcctcatttttttttaatggaattagtcattccaccatggtggtaaagccattccattgaaatggatttcaataccttaaaatgcaaccaaactaaagaaagaaatgaaagtcggctcctttccattccatttcattactagggctgagcatgggttgggttggccgggtt

SEQ ID NO: 110985 - DNA, 5674 bp, Cannabis sativa
  modified_base (4423)..(4423): a, c, t, g, unknown or other
tttagccgccaatatctctttaaataattacttaatttttttagcgacggtcccaaaaaaaaaatcgtttttaggaccgtcgcgaattctgatatttgtagtagtgaaaataatttaaacatcactaaaataccctaatctaagttctgaaaaacactccgatcaaaatcaatttcaaagccaaaaactagggtttcccctgctagcaaaccggttgaccgattttacacctataaaactggttaatcggtttctctgctggcaaaacgagaaccctagtttgtcacaccaaaaactaatcaaatctcctctaaacctgctctaacttcccagaacagttcaataccataaaaataacatatctaaacattcaaaactcaaaaatatactaagattacaatttcaccattaaatagtgaaaattgagttcttaaactcaattctcccaaaacaattctgaacagccaagtaattcatctagaactctcttgaacaaccctaaattaaacttagaatcaaactatgaactccactaacaccacaaacccaaattcaaagaaaactcaataaaacctaagttaaaactcaagaaatcactaagaactcttgaagaaaacttacctcaactagaacattctctaaaccttagttgattctgctagaaaattgtagagttgctgaaggaattccccttggcttagctggcttcctagggcacgaaggagggagagggagaaaagcttggataaatcctttttcttagttttttttaggttttctacttaattgtttaattaacaaagtatgcatcaaatataaaccattcttttttagcctagatactcatataagacaaaataatatacaacctaaggaaaagactatcttacccctcttaaaacactatagcctaaaataaaacctaagggtaatttgatcacttttaactaatcatgccaaactaacttctcaacattttaacctaatctgatataacacaactccattgccataacatttctgaccattctgttgagtgtccaaggccatcgagtccataaatattttattttaaaaatggtatctactatacccacataattcgataaaatctccgtaattaataaattacgctttatttgttcatttactcgtattttactaattaactcgtaattagcttaagtaagattttaatcctactataatgcctacttaatcacatatttaataaaatatgtccaattgaatatcattatattttctgagatattataatagaactcaccatttttctttccctttgcctcttgtactatttcttcttgtgcatggtgcaattagcacccgatgattggcataggaaattttcaattttagcatctgaagggggcctcttctcaacagttaggggacccacattctcttcttgcttagggcttgatatgggagctaactgcagagtacattcttgtttttcagatgatcaaaatcttaagagacctacacgagcacgacttttacgcatttcactgagaaattttggaactccattctaagacaaagatgtcaaatcctgaagatccgtcaaactcttcatctcaagaggtggccccaagttatcccatagtgccctattagttgttatatagggctcggtccccggcctcaactatgttcatcgggccaccagttgggaggctgataacctgcactcatctctgggatgcacccattatctagaaaaaaattatcaaagagaatgggatcatgcctcgggaacccgaagtctttcattatctaactcaagactctgagaccccctaatcacaactacgagggatcaggggcatggagtcagacacatcttatgtctgatgtaagcctgctagtccaaaactattttatcaattttttagtctttgtaggactagctccctaccaacttgtccccaaaggttatagcctgttattaggccttttattttttatgcttttaagggttggcttgctcccaaccttactgaaattttgtacttttatgaactcatgtccattccaaagaagggggacaagcataaggatggcatttattccttatagcctcatccggccaacgagatcccaatcccattcaattaccaaaagaacgttaaggattgttgtcatccatttttcttctccactattttagagctttcctcggcctaataaacaaaagaaaattaaaaataaatgatagatgtcaaagatcaaacaaagagtatatcaaagtttgcattgccgagaagataaaatagtattaagttagaacaactcacaatccagactcataaaaaataaaactaattcaaataaaaaaaacttaaaaagagataatcacatttacaaaagctagtttttaaagaattaacaactcatcggttcacatgtcaatcttggcattaaagagtaacaacaaaaccatgcatgcaaagaacgtaaaatataaacaacgcaatggattcacatcaagggaataggagaaaaagaccataaaaatggagtattatgaacttgaagagaataattccaccaaataataattgactaaataatttgatcaaaaaggaaaaatcacaatttttggtcaaaacagtatggcgccgtctgtgggaaacactcttttttgctcttcttgaagatttctacatccataattctagtagtttttgacaatttctcatttttccatccaaaaaggggtctcaaatggcagacaaagaggaagatatcacaacacaacatgcaaataacactgaccaagaaagggaaaatgatacaaccacccaaaaagaacaatatgagacacttcccacaattccatcgtggctggagatcttagaaagattgaaatccgaggatgataaaatagcaacacaaggagtgagattggcccatcaaaaagaacatgttgagaaactcaaaaatgagaatagccagatgaaggtggtcttagaaggatactaacgccctctacatcttgaggaagcaaataatcaacaacacgtggagttggcggaaaaagttaaggatagaaatttgaatcataaaaattcagcacaagatgggttgtctgggcgtgaaaacaattcagacggagaaatccaatgccttcaagacaaactgagaaggaacaaagaagatgcagaagcaagcaaagaagtataagctatttgtgcaacattaaaaagacgcaccattgccctagtaatgcctgaaagttctccaacacaaaccagagaaacaaagaagcaaaagatgatttggaacaagcttttttggctgtagaggcaaaaaaattatatggaaataagcaatggatcaacaagaatagaaggatccactcaatctccttttgggaaccacatcttgtgggtggaagtgctgcaacggtacgttgcactaaaactttgagaatacaatggaacagacgacccttcagaatacgtttgccactttgaatagaacatgttaacaagttcagtcacaatcaaactcttaactttagctcaatccttggttcaccttggacaatcctgatatatatcatatctcaatctggattggtctaaagaagacgcttgttaaatctaaagttattgcacctcagtcaatacctagatagattttatcgcgacacaattattaatctatctcagattatcctgaatactacttctcttaacttcaagtaaatttgaggtaatcctatctcgattaatacttgattaaatctcatctcgacatggtttcaaatatgatctatcattgaacgacccaagttagaattcatctcagttttggtcaagctatagctttctctgatcttattcgagataagttctagtatattttgtctttaaggcccgttttcaataatcttttgggtagttcttcctaaattgacacatcacttactctttctgtttaatggaattgcgtcctattaatctgacgggctttcttttctattttattgggccttattatggttagtttcacttgtttcccccactccccccccggcgccaatactactgaactcatcctttacaatagaggtgacaatgaacaagagaagagagttaaaagtagggacaattacataagatactattttttgtaaaaaaaaattacagttttacgcttatagaatttttttttacatttttacggttttctatagaaataacaagaaaactacataaaagcaacatgaaaataacatctatataccatcaaaacaacaacaaaaaaataacatacaaataactaaaaattaacaacaaattaataagagtacaatataaaatgactgtaaataaaatcaaaaaactcgtaaaagtatttaaaattccgtgaaatcgtatttttgtaattnttttgttgtttttgtgtatttatgaaataatccctaaaaagtattaatttttttaatcaaaaatgtttttattaaaaattatttttaattaattattttattctagttgtatatgaaaagttttcgatttaaaaaattgattcatttctgttgaaatttaaccattgttaatgaactggatccaattattgctaccttttcataaactttaaggatctaattgcataaaaaaagtatcttagggactaaagtgataattaatacataacttaggtggcaatagtaataactataaattctcctacatagacaagaatgatttggagtgcaataaaacaaaacatggaaagatcgccaaaatccaaagaaaggcccaccataactcttttgtcttttactaattatcaaaagtggctagctacttatgcttttcaagtagacctaagctatgcaggaaaaataaaaataaaaaacaaataaatagaccaaagctggggctggacttccatggtagccaatcgatatatgtcccttcatgtattcctaataacaaaaacaataatagctatataaatagcttaaacactattacactattaatgatgtcttttccacatccaatgaattacaatacattccaccctaaaaaaattacaatataattaaggtattaaggtactccaattgttaaacttaaattttggagtttagagtatattttaacactaactcttttttcaattccccttataaattaaaaattacactaaaggttggtttggcacgtcgtattacaccgtattatattgtatagtattatattaaattctattccataatatttttatgtaaaattatatgtagtactgacttttattagcacttaaatatataatattttagtatatattaaaatatatataaaaaaaaatatatataattcaattcaatataatacaatacaatacaatacagtctaatacaacgtactaaacgaatagaaaatatatttttttttattatactatttattcgttatttcactatataatatatatatataaatataaaaaaatacaaatttaattatatataaacattatttatgttttaaaaacggaataatttttgttatcatagtctacaatcaggatcgggcctgagttgaaataggtcataggaaaaaaaattgagtccttactataatgataaatgatattttttaaaattattaaaaatatatgtatattt

SEQ ID NO: 110986 - DNA, 761 bp, Cannabis sativa
ccctaaaaatctcattgagatgattgcagagatcacctctatgcatgtggtatcttcccccacgtcaagtttccacggatcttaacctagtataaatactagtagaacgactatcaatagaatatgagtgacaatcaccttcatttacctatgttcgcgattgggcccgactccatgggtttcgccattcatgatcctcctcctgcggtctctcctctcttctcttagtttgacgactgacatcagcggcaacatgctccctgtttcgtgcagagtcgcgtgtaggttggttcaggttgaaacctccttgttcaatctctcgttccctatgagtacgattactgttaggacgatcagtacgacaactagctgtattattacttgagggttgcctaaacatgggtttgggacccaaggtggacgtcaggtcctgactcattctcttccatcgaatttagcctgtagagcatgcatctattcctacatggtcgtgtattgtgctgtcgtaagctcgataatgccttcggaggccactgttggcgtgatcgacaggaagtggtctgctgtagccgttgatgtggacgtctctcaagcatgtccaacattttttggggggtgatgttggtccgtcccacacgtccgatgattgtatcggttgggtttgttccatctccagggatggaacgtgcatggttccaacattaaaggatcttgtattgttatttccatttgtttggttggcagccatgatgattttcctc

SEQ ID NO: 110987 - DNA, 5946 bp, Cannabis sativa
aaaaaaaaaaaaaaacttgtattctttcaaaacttacctactctggaacactctaaaagagaatgagaattggagttcactttgttagaacagagtgtacagtagggactatcgaggactcttctagagaaaatattaagattggagggaagtaggtgattgaaagctttccaaatgaaatgttttattttgggtgggatgttggaagaccatacagatttccaccagcttttgagactgctgcgattggaggaagaaggagaggaatgatgagaattagctaagtgatatgctgatttaatggtaagtataccagaaggatcatgtccccaaatgagacagtccttggaagatgggttagttggggtagatagaatggactgaaccaaatccttatcaaaaaaagagttgagtttgtgaagatcccaattgccattatcattgatgaaataagaaatagtgttctcaggaggcagggaatcatctttgtagcaaggatgaccataatcaggcagccaatttgggctaagggaaggaatggatttaccatccccaatcttccagtcaaggcattttgagaggagatttcttccccaaagaagacttctccaagaaaggaaggagaatgtcccaaggaggcttggaggatgaaatcattatgcttaaagtatttagcctttaagatagtggcaagaagggaagtaggattctggaaaatcctccaagcttgttaggccaacatagcttgattatgatgaatcatagacctgaaaccaagatccccaaagaatttggatttgcaaaggttgtgccaagatttccagtgtatcttagatttattttggccttttgaaccccaccagaaatttgccatgagcttttctagctgcttacaaatggactgaggaattctgtaacaagacatcacatatgaaggaattacttggattacagcttttaacagaatttctttgctagctttagaaaagagcttagagttccagctgctaagtttattgctgactctttggaggatgaagtgaaaagaggatttcttagatcaagtaaagcattgtgggacgcctaaataagtgtcaataaaaggtttgtcatccaaaccaagagaagagaagaaagagtttttgtcgtgggtggtggtgttgggggagaaaagaacagacgacttagcaaaattgatagattgaccagtggccttattgtaggtagtaagaatatcattgatagaatgactagtccaatgactgacctgagtgaaaagaagattgtcattagcaaagaggaggtgagaaatggagggagcagaacgacagatagagacacctttgaacaagttagcatgctctttggaacgaacgatatctgacaagccttcagcaaccagaagaaaaagataaggggacagggggtctccttgtctaattcctctcgaaggagtgataggggaagagattccattgttgatgcagagcttgaaggaaacagtgggatatacctaaagatgagagacacaaaactttgtgggaaactgaagtgaagaagaatttgttgaacaaatccccactcaactttgtcaaacgctttctccatattaagcttaagagcggcccaacctactttgccattctttcgaccattaatggcattgatgacttcattagcaatgagaatgttgtcaaaaataatacgattgttcaggaaggcaccttggttataagagatgagagtggtaagaacagttttgagcctgttagcaatagttttggctacaaccttgtaaatcgtcgagcataggctaatgggccagaaatcacgaactttggtggcattactttttcagggataagaacgagataagtctcattgatggaagtaatgctagcacccttatttaaaacatcaaaaacagcatggccaaaagtagaacccaagatgtgccagttcttctggtaaaaaagggggttgaggccatcgggatcgggggctttgtccccaaaaagttggaaaagagccaacttgacttcagagaagtcaaaattcttgttcagaaaagagaattggtcaggggtgatacgatgagtgatcccatgcagaacggtattgatggattccatatcaatctcagtagtggtaaagagatttttgtagaagtcaacaaaagtggcacaaatatcagggaaagaagtaacaatcatgctgtcatccagtgtcagagatttatggtgttattttatttcctagagttggctcgattataaaagtatttggtgttcttgtccccagcattaagtcaattaactctagctctttgcttccaaaaagcctcttcttttaataaaagagaatccaaggaggattggaggcgattggcattggtaatgtcatcaggggacaaggaaggcttgctgtgaataaacttgatttgggcttgaaaattcttaatactgtggcgaagattgtttttagattggctccagagtttaagatttttaatacaattattttgaaggccgagaaaaaagtgctaggtgagatcacaataggaattattcggattgttagaccaactcttcctcataagaggaaaaaaatctgggtccatcagccaatggttctcaaaaaataaatggttagcacgtttacagagataaggggtagggttgcactccactttaatggctctatggtcagagccataaaagggaagatgcgcaatgttagccattgggaaaaggttatcccaggccttattgacaattccccaatggagtctttcacgagtttggtcatgcttccacgtgaaccgattgcccacaaagggaagaggatgcaagtcgaacttagtgataggattttggaaattgatcatagcatgggaaggaggaggattggtgctactcttatcattaaaacctaagtagtcattgaaatcaccaatgatgatccaggggaaaagggagcaacatcaaataaacgattgagaagggtccaagagtcctctttattatgagcataaggcgaaccatagtaacaagataagtggtactttttattattatcattaattatattacagtcaatgtggtaaagagagtgagataaaacatgaacattgacaacatcattccaaaaaagaaataagccccctcctaaaccttgcctaggcacctcaaaaatattatcaaaagacaacctagccttaaacaaaacactactattagcaggctatttatctccatcacaaaaagaatttcaggacgatgttgttgcaccagaagggagagatcctggaatgctcgggaacttcccaatcagcgagcattccaacttaagagactcatttttctgggcggggttgctgagcaacacctgcttgttcatcagtgtcaaagatagatggaacaacatcaaaatcagagtttgtggatcgggctctcttcaaaatactcctcactgaagagccaacttgactactttgtctagtgtaagaccgtttggaaccacaaatgttaatagaaacagcacgggtcctggggcgaatgggttcaggaggagtttcagaggaaaccctagtgcattcaggatacatggggtctttacctttggagatagaggtgaggacagtgggagtcatgatagggctggagttaataggacaaatgattgagctgaaaatcgaggctataggatgtggagagatgttgttaggttggtcagaggtattggaaggatacgcagatgaggggttcatggtagccgtgtattaaccagagtagtgttggcaatacttgggaccaagaattgatcaacagcatcttgaagactttgacttgagacattgttgatggaggggatttcttcgaaaggggtagagttggatagtttaaagatactcttttgtagaaggttttggcaggggctctagaacatctttataattgagagatgggggatgggcatgggtatcacactagtgaagaaaattttcacacttattgaaagtgtggtcaagctttcgacaatggtaacagtacttctgtataccttcgtattgatatttcatccatttagtgatggacagtttcctaaaatggatattcataccacgaaacaaaggtttagtggtatcgagaaggacttgaattctcatgaaaggagtaatggggtgacaaagtgaagcaaggtgcacttcaatgagatccccaatggtgtcagcaatgaagtgagccaagccatgtgatgacctattgccaaaaggaataaaatggacctacagccagagagggatgtatcgaagttggttagggaggatggtgtcaaaaccatcaggaatggcgaaaagcataaggaaactgtcaaagtgccaaggttggccttccacgacacgccttttatccccttcacagccaaatttaaccaaaaactgaccagagtgataatccgtgaaggtaaaaggaaaacaggcaatccaagcatctttcataacgttgccaatcaattcaggtttgggagttttagaggtgaaaattttgacaacaaggcaatacgaatcaggttggatttcaggatggatagaaacatgatcgaaatgatgaattagagcttcttcaacagtgagttgaagagagtggttgttggtttctggattggtattcatggtgggctgcatggaagaagaagatgataggagaaatcgtaaatatgtagaaaaaagtgtggtgcacacaaaccttaataataatctttaaatagaaagaggagaagagaaagtacctagagagattgacctctggaagattgggagatgctaaatcagccctagtatcgcctagcccaaatccatagcatcctaaaaccatgattattcctgatctcctgagaaaatacttgaagaaagtaacagttattaaatatgagatttgaggccatggtagaggagaaccaagagttctctgatacaccattaaatgcaacagtcgacttggggtgagagcatgaggtaataaatgaatcgtaatgatgaaacaagggtaatggagggaaagaaggaaagagagggatggacaacatcacgcggatgagcaaaagggaactggaaggaccataaagaaatctagagggttccagagcagtggttgtccaatctcttgaatatataaaatattagaatgagattattaatatataatgttacttctacgtgttcttaattagctgaaaagaaagtacaagctaacaagtttgattcaaaattcaaatggctttcttctttatagcaacttgtacaagaccgtgcaacttttcttttccgtctttcttttaagatcgcaaagccgtgcacttggttatcagtaatataaatatatgtttgtatattatctaattattttatattaggacaggagtagtatagagattaattaattaattacttggaatatgggctaatactcatggcatccaccggcatttttgcctttgccactttgacgtacggctcaaaatccaaagaggaaaaagaaaagctcctctctcgaagaaaagagttttgggtattatatgccatgttttctgcaacgagaagattacaaaaattaaataatattaaaaatgctataattatatattaagaaaccaatacaaatgtgagaccgggaaactcccccataaccatcactcatgagcttcattaattaacagcacttttttaacaccaaattaattaagacacttctcttatcatcaatatatatcatataatattatgatataataaattaatttgttatttcattttcctttttttccttcgggcacttctttaaaataatttttttttataaatgtaaaacaaaaatagtataattacaaaaaatgtgtaaaaaaaaaattattccaaaaatttatacattttaaaaatttattaca

SEQ ID NO: 110988 - DNA, 1340 bp, Cannabis sativa
tggtattcagttcaattccctgtgcttcgacctcacctgcgtgagtttactacttgattacgtgcacttgcgtattgttttataattttcgtaacaccaagcccttgaccatgtctaatatttgatccaaatatgcttgcataaagggatcagttacggtaggagcctggttgattggcccttcttaattgggttatagcccaatttttcagagctttgctagccataccattgaaaagggtatgttcaaggtcagctagccctaagcttggcatatggctttggccagccaaccctgggtaaggaaactgaccatggcttgccagccccactctaggcatgcattcacggctggccagccctatgctaggtagggcctggccacctgttcttctctgattggctggtacaacttgtgttttgatagagggtagatcacaccaatttctagagttaggtggatctaattatctgaagtgattttactcacttctcaagttgttgttgtcttgggtgtattcatctgttcctagacctagtttgttaaatattgatctttgggtgactcactcccgaatattatgggacgcgagttcaccgtgtttgctggccagaggttaacatctaagggactggctggccaaaggttggcaaagtggggtgtggttgtgctagagatccttggccgaccccccaggatgctggttgctagagtctagctgttctcaactagatcatcgtgggaagacttgtcctcctttgggtaggggaacgtctatcgagatcctgacctctcttgatagttttttcatttaattgccttatcaggtcactagcttctctattaccgtggtctagttctgcctgatgagattggaggatgtactcttagtcatccatccatctcaaaaattcatgtctttattgtgaaaatgcattacaaccaacaatgtgtggttttctagtttggctgacttggcagacaacctctctaagtttggccagctaaagatcttctccaaagtctacgtgaggcttacaatggctggctttctaattattggccccatctctccagcataataccatggaccagatttagtcgtggtgtctggggttgctccatgttggacattcctttagtacaaggcaccagtggagggtcctcccctggcagcaaaggttttccattgagaccaactagattggtagtgtcaacctgaccagttgtggtggccaagttttttgtgtttttcaggttggcaaggttgggcacatccatctgattcatggggattctagttgtggctggaacacgaacatcaggatcagcagtcata

SEQ ID NO: 110989 - DNA, 4766 bp, Cannabis sativa
  modified_base (2196)..(2206): a, c, t, g, unknown or other
  modified_base (3461)..(3463): a, c, t, g, unknown or other
  modified_base (4721)..(4739): a, c, t, g, unknown or other
ccattggtagatcttaacattttcacgtgtcaaaaatttattagttcacaacataaaaattatttgaataataaaaaaatattaaaaacatttccttttattaaagattaaaaaatattatatatatatatataaaaacttctactattcgccacccaccccttctcggtggtggagacttgctcccgacaagtgtaattcctttatctccactttctttctcgtcccatccgacgattccatgtagagaattcacaaaagcaattaagtaaccaaaaaaaaaaaaacaacaaaaaaacaaaccctaaaaaccttaaatagctgcaccttatttggatcatctccctgaatctattctgcaaatccccatctttggtaggatggtgggttttggtggctacttttcttatcgtagcttctttggttcaaattttacttagattttctttttagagtgacccctcttgctaatctaaattggagagttttagtagaatagatgggaatgttggactaggagtgaactagaagaagaagaaagataaaaaagcagaaaagataaaaaaaaatgttaattaattagtttttaaaataatttatttatttatttgtttattttaaattaatttcaattaaattataatttaaaccaataaaaaatcaacacgctgtattttttagaataacaaatggaacagttaaattaggtacctacagactaacgagaattttgagtttggaggtgttgtcacaattttttgagattaaggacttatttgcatcaaaatgaattttttaaggacttatgccgcgatttaatatcaacacgtgatattttaaggaggaattaacgaatctcttaaaaagatgaccaacagacttataagaatctcgagcttggggactattaccattatttttcgtgattgagaacttatctgcatcaaaataaactttttaaaacttttccacattattattattattattaaatccaatatttgtccaattaccaaaacactgggttaatttaaattttaggggtgcaacaaaaggtcataaattttagtactattctcgtctaacatgcttaattgtactggagttgtgatggaattagtgcattaatgctagtatggctacaccttatttgaattatattactatttactactacttgatcatgtctacttacccaaattttttgcgttgttttaaattctcattcaattattaccactgttaaattgtatcagtttgtctgaaaaagttaacgtagcatgatgaaaattaactttcattattatagaattgtgctacttgaattattatttaattgcgaagttgtggttggttccaatatttttgacaaaatgatacattttgatagttttaataccttggcaaaatttaaaataacctaaaaagattagagatacaatcaagtagtgattatagttcagtgataaaatttttgtttattctactattttatttaaaataattttttatattaataaataaaaaataaactaattttttttattaattattgataagaaaaaaaaataaaagaaaagaaaaagaaaagaaaatggatcttttaaatttaaactaaataataaagtaaaataataatttacccaaaacattatttttgccaaaattttaatatttatatggtcaattttttttaattacaattttacaatattctataaaaacaacatcaaatcaacataaaaaaatataaataataagaaataataagaaaacaaagaaaacaaaaaaaaaaaaaacaacaataaaataaatagaaaaaaatataaaaatatgaacattccgtgtagggattctaacttgaattcctcacacaactcacgatacaaatcaaatagatgcaaaattaaaataaaaaattaaaatgacaaaaaaataggatagaacatagtatagagatcaaacacataaatttttgacaaggttcaccccaatctttaggctacatccttgtgagctattctcagaaagtttagctcatttcactatatccaagcttgaacaattacagaggtgttggagatttcatgtcacatttgttgacaaataatctctataaactctctctttacaaattatttctccccattctcttgtagagaacacacaaagaataactctctctctctctctctnnnnnnnnnnntctctctctctctctctaactcttaagcttctctccttcgccttgtgtgttgttcttcgtgtttatgagggtatttatagacgttgaagatgagatccttaagttggtcgtttgttactgatttcagttaaatttgttacaccttaacaaactccgataattgagatatccatgtcaacacttacaaagttactctgaatgtgagaacacacttcctgaactaagcgagacgtgttcttggaaggatgagaaaaggcttccctgaggcttagatttgggatcaaatagccttccacgattctttttcctagaggacgactagcttctctaaagcctctatttgggaaacaactagccttttaagactccctttcttggaggatgactagcttccttgaagcttttatccggggaacagctacccttccaagactcctttcgtgaaggaagactagctttcctgaaacctctatccggggaacaaactgaacttcatggaactctcttctagacaatatctagcttccgtgaagtagcttctggaaaccttaagttagacagattctaagtataatgactttgcttatggtagagttcatactaactgttcgtatttttgtataaaaataataataaaaaattaaaaattataaaaaaattttataatttgtatatcttgattttttttttaatttttttagttaaatatgaaataataaaacataattataccatgggatctaattatttttatctatgaagaaacttatttaaaaacaacaaataatcccaacaaatttaaatagttcttcaaaaattatagattatagaacgtatatttttttttcataaatagaagtagagactaaaaaaaaagccggtggaaataaaataaagagtaatttgtggcaaaacctccttatatgttttaatttttatacacttaactcttttatttttttttttttgtggcaaaacttccttatgttttaattttaatacacttaaccgccttatcttttttttgtgtgtggcaaaacccccttatgttttagttttaatacacttaacccccttatattttattttggtggcaaaaccctcttaagtttacttttctttgcaaatttaaagttttagttagatactatcgttaaatattactactatatcaactttgaggttttactgttacatatatacacaggtgtatatagtgatcatccagttgatatttaacggtaatatttaactnnngtgtaaaatttgcaaagaaaaataaacataagggagttttaccacaaaaaaaaataaggaggttaagtgtataaacattaaaacataagggggtttcgccacaaaaaaaaagataaggatgttgagtgtataaaagttaaaacataagggggttttgccaccaaaaaaaaaaaagataagggggttaagtgtttaaaaattaaaacataagggagttttgccacaaattgctctaaaataaattattatttctgagatcaagaaaactaggttcttattaagttgttgacatgtgtaattatgaatccaatgagtacaatttcaacgaatgtgaagctttattataatttagtgtgcatttttttgaataaataattttcttaatatgtgatataagatatcttcacattacttctatattttgaagtgacactatgatagcacatttttttttttgataaactcaaaagtttattgaaagagaaatagtgcattaaaactcaaagtttgtagtggcaacaaggggtgccacttttctaccagagaacaacttaaaacactcattggaggcagcccaagatgcaaggcgatgagcagcacatagattatgggggatccaacacagcttagcattgacgatacgagataagctatttagggtagggtcaaatgtcctacaagccttccacactgaacatttcccagccagcaaaccgtgcaccgccacttgacagtctgagaaaatggacacaatcgactagccacagtgtagggcccgaagacatgcatgttgaattgcaatcagctccgcttcgagagaggaacccaccatactcttcactgtgagcgcctcgaccactgcacctgtaatatcccatatcatcacgacaacaatcccttaatcatctcgcactgtagcatccacgaaaatattatgctcggaccaatggaagtttcagacatgaagtgattcactgtactcggttctcttcccaaccgagttcacaggagagcaactctccaccgaagcaagaatttcacgctggatcattaggacagaaggggaaaaatcgtcatggaaggagtggtttctcgtcccccacaacttataacagagatgtatagcatgtagggagaaggcatatttgtcaccagtattctcaagtgggatattcaggggagacatcagccatctcaccaaagtcttaaggtcatcaaactggagctgatcatagtataatctgttggaaattatttnnnnnnnnnnnnnnnnnnntaacaagtatgtttgattaacatccta

SEQ ID NO: 110990 - DNA, 3612 bp, Cannabis sativa
tagaaaagaaattatgaaaggagatgcagattaaatcatgtcagtttacacccaataaacaataaaactaacagaggaaagaaataaacctgatgcagaccttgcaaatgtggtaaaggaactttcttcaaaaggaagaaacaccatccttaccactaggctccctgaaatttgataaaattataaggtccaaacgaaagacaataaaaatcaatccaaacaatgatacaatggcaccagatgaaaatgactacaataaacatgacatgagccttgtaaaccacagcggcagatgtgtggttaaaagacttacctaatttgtccactagtccatatacagcttggttgtaaggtgtatccaaccagacaaggaccatcttttctccttcttgaagaatcaatttccgaaaggattggaaagtaaataacacacacatgtttgacagctgctggtcaaaattgttcttacttcctaatctgtaagagtttcatgtcatttacttcagaacttttataaaagaaaaaagtgcagcaaccctcatgaataattctaaatatgaaaggaattttaaactattggaaaattagcttttgccttgtaaaacatttgtccttccaccaacaacccctatcctagcagaacagaacaactgtatcagactgtcactgcatgctacaatataattttgccatttatcctcatgctcaatatttccatactcaagcaatattaatcatatttaccctaccacactggtccctatggatagaaaatgatgcatattaatcattttataatggagcccaaatttataccttagaggaaacaaggtagaacaactaaatggacggaaatgaagaaagtagccccagtagcctaggaacaagcacgccccatatgcagtttgtgacagtgaaaatataatcactttgtcctgcaatcaattaactgatataaaaattgcattgacttctaacacatttcaggccaagaagataaattaatcagtaacaaatgcaacaaagagctctaaaacaaattaagacactccaagtaacctagcatatacagcaaagtttgtaaaaataaaataagaatggtcttgaggaggaaacaataagataattatgatacttggaaaaacagttcatttgggaatatggaaaaacagttcatcaacaagattgacagtagaatctaatataaactcaccatattggcttgtttgacaatgaaaacatacatagttatgcaacgcagtagtgtagctactgtttcaactattagtcgtaatttcagaagaagcaaattctgggaaaggatatacaaaggttctgccaatagctccaaaatacatgcaaatcctgccaatagattccttgaataagttatcaacacatttttaacatgtataaataaataaatagcaaatacttcatcaactacatcattttacatgtacctatttattgtttttatatgatatataatggggatttgaatccctccccctccgcatctcccactcacccaaccacttgagctagccccaagtgactacatacctatttattgtattcaacaaagtcaggtaatcataggcgctgggtagtttaattagaagagagaacacaaaggggggaaataccagatacaacgagatatagcaaattaccgttaatcaagatagcttgcccatatgaatcagaataagataaatcttgccaccaaaagacaaaaaagcatcctgcaattgtaacaagtactcctattggtaatgtcaaccatgctactttcattagctttgccacattttcttccattaaagtaccatcactgcagcatgatatttaagaatacaagggtcatatccatgaatacatagtaattacagaatttctcagaaaaaaaaacaacaacaacaaagaaacatttatgaacagataaaatatggagatttcccacctaatcaacatacccacatgactaattcaatgatcatcatcttaagacaatttcagaaaatgcaattctaaacaaagccccaatctttccactaaactaatccatattttccacataaatattgtcaacaaacacagtaatacagcgaagcaagtaaatgcgaatcaaaatcaccattttatgtccgcacgcatgcaagctcgccggaatccctcccggctgagaaacaacacacaggtcacaaaaagatgaaactgcacagcataaagctgcagcaccaagcataagacacaatgtcagtttatatcaaaaagacccaatgaagagagaaatagataaaaagaatgaaaatttatattgcttacggcatagtcctcttgcgtaaggtgcctcacgatccatgaattgaatacaaatggtattccccttgacaaaaactgtgtagctgatacaaaatcagatttagagtaaccccattttgaataaccagaaatagagaaagaaaagataatcaaattagaaagtgagagaaactgacccaataaatacttgaaagtgtgagaaaaactagtgcggtgttctttgctgacagagaacgaagacgaagcctttgacatagcgaactggtcttaaattttatcactttagatttgctagcaaattctaggaagatttggcgccatgaaaattgaggaagccaaccttgtttcgaaatctcagtttcggtacaattttaggtgagaaagagaaagtaaactgaggaaggaaaaaaaaatgattttaagagagaaaaaaaaaaattcgaaagtgctgagaaaattaaaattagaaaattaattaaatattctctttttcaacaatgaaaaatgatttaaataatgatttcacatctgctattgtgcattcggagatgttgcccgtggaaatttaattgaggcaatttaatttgttcatggatgttggtgttcaaacaaaagcgggaacggtgggacttggggctgtgctatctgatgctatcggatccgttttgttctcggcagctactcttttggtttgccattttgaattccttgttgctcaagcgactactttactcgatggtctccgactttgtcttcaaataagttacaatcgtgtgaagatattcccggattatcttcgtcttgtgcaaagtgtgggttgtaaagaattaactcttttttttgagtttggtattgtgctttatgatatttttcgcatgtgggattctttttcttctataatactatcttattgtaagcgaactaacaatgttaatgctcattcacttgcacaactagctatttctcttgagtcattacgtgtttggtggccgaatttgtctaattgtttagcgtgatgtgcgttttttgtttgagtgatttttttagcgatgtgatttataatattgatgatttttttaaaaaaaaaaatatttaaatattgataggggataattcataattaaataaattttttacaagtaatttatttttgttttaaaatttttcattcttattttttcaaattcgaaaaataaaaatagttttaggaaagatgttttttgaaaatatttttatttaaaaaggctaattaggatttttaccctgaattttgacatgtactaa

SEQ ID NO: 110991 - DNA, 3075 bp, Cannabis sativa
ggctcctagctaaattaattaatcttttacaattctttttattataatgtgtatcattttttataagtttaagaatggctttttgattttttcttagcctgttaatctattaattttcagtcatttaatcattaaagtttatatttttgtcgtagcaaagatatgacatagtagaagaagatgcttacagaagagatctaaccatcaataggttctttggtctgagtaaaatgataacctgtttgtgcttacaatgtattttccattgaaaattattgattccattcaggcatcgaggatttgaaatgtggaagaattgtgactcctttgccaacaaagctacttatatggataatcctttacatgttcttgaagctatccgatttggtataatcattttttcaatatccactctcttttattttgtattggtatgtttaattgttcactttttcataccaattcgtgttgtttcttgttatttaggtgcaaggtttgactttgtatcaaatgaaaaattaaaggaagttgcattttgtgatgatgtgaaagatcctctagctactaaaattagcaagagagcacaattttaccgaagtatttttttatcctatcagcatgtctcaatgaagtagtagttgcttaaattttctcttattgaataaacaatagaaagcaagtctttttatttcaagcatctttgaatttctgctatttgtgcactctgagttcaaacttatattctacaaatttttttaattcactaatgcagaaatggttagtttccctttcttatattggactcttaaattgtcaattatttaaactcggtcatttatatgtatatatatattgtttttacagagagtataccgcacattgatgaaattcttgtctttgcttccttctctagcattaaacaaagacatccaacaaaaatataactaagtatacgtacattgcacgtaactatgtatatatatatagataaatcattaaaacataattgtaaaatatcttcagaagtattatatctttattaaacaaaagcatatataacatatgttggataactatatgaaaccatcctttggttaaatttatttactttgattaagattattttttacttttggatcaataactttcccataaatatatatatataaatatttatattatccaaatactataaatggtcttcaagtaaaagaaatattactcacacgtgataatagttttgagcaatcacatttatttaaacatgatatatattttattttagataatatagtatttaattaagtatgcatatcattattcttacatatttggtgtacatattattattgttacatatgtttgggtgttacatatcattattcttacatattttgggtggtgcacatatcactacacttacatttttgaccttgtgtcacgtacgcgtgaatataggtaatcaaaagttaagggcttcaaaatatgagaaacttgtgtctctaataactccaactgcggctcatttagttgcatgtacaacaaccaatccccattcccaactggactcaacatcggcaacacatacccacattttgttaatttcctcattcccattggaaagtgaaatgatcctaaaatgggtttaccccacccaaaatccacctctccaattggaaactttgtcccagatgaaactacaatacccggtgcatcgttcttatgagtgaaatttgatattctagacaatcttgactttgtacggactttctcaacccaatctagaatccccaagaaatgttccattcttaaaaccttttccatgcatttatgcacttctctagccacttcatttagtggcttcactttaagatcacttgctttcttctccagaatgggaatggacaacacatttccaaagtagagcctcatcatcttatcccgatcatctccgccgtccatcagttctcttcgaccgtcgacaaggattcccaatctacacaactcttctccttcaaaagtagtgaacaatgttgttgaaatcatcttccataaaaatgcactaaaagcctccaccttggttgccttgtagtcacttgaggtagctagggtttggaggttgttaatatgctcacctttaatatagtacatgcgactacttattatgatagggtcatcatcatcatcatcaccattttcgagtagattgacataagatgtctcactgatgaaagtagtgtcaatgcatccaaggttgcggggttttaccaaagatcgttggaataatggggaactataggtaagaggtttcgagagagtgaattcagcccatgagactatgaacatgtttgctgagtatccatcaatgaatcgatgatcaaataggcacaccaccacaacactcccacaactcagcactgttaactgtaattaaggccaggtaattagatgtcacttatatgtatatatattttcccagttattttaccatttaagaatatagggctcgtttagaacatcgtattatgtcgtattgtattgtattatattgaattagattatatatcatatttttatataatactatattaaactttaatttatattaaaatattatatatttaggtatacataaaagttaatataccacatatattttacataaaaataaagcataaaatacaatttaaaataatactatacaatacaatacagtgtaatacggcgtaccaaacgaactctatgtttatattaaacaacaaatatcgaaactttttgtgcttgtatatttattaatttttttttatttgtaaccctattttttctatgggaaatatatatgctaattttatgtacttttgatgggtattatatatactcatgaatggttaggaaattttaagtttttatgcttaatttttctatctaattaaagaagaacctttttttttttttatattatatggattggggttgttcaatcgactgaaaaaaaaagtttttttcggcaaaaaaaagattaaaaatattgaatttgacttaagtattttgtatataaacatatttttgatatag

SEQ ID NO: 110992 - DNA, 4545 bp, Cannabis sativa
  modified_base (33)..(33): a, c, t, g, unknown or other
atcaggtacgcatacctaattattatatattantattgtgttctatgttatatacaagttgatatataacacttttctctcacacaaatcaatactagactaaagcaaattcattgaaaacttgtatatataaatataacagagaacatttgtttacaacttctcgaaagaaattaatacaattacaattgcatgaaaatattaacaaagtaaaatacataaaaagaataacaattttttttgtttaattacaattaacataaatagaataaaagtaggcatgtaatttagttgagaatagtactgctacaaattttcctaatgaccccagcagaaccggtaagaggtttaatgtctcccattttaatcatggcagaagcgaaatcagagctgaatttggaaggactcttgctgtattccgtgacaatggcgtcggttgagtctccactgaataaaatttggtcagattcaagaagacccttcttctgaatcaaattcttaaagtaattgttatcaaaggaattaggagtcaccaaatcaagtggggcaagagtagaatcatcttgagacgagctagaagaaggacaccgacgttggcgagttctagcaaaattagcatcaatattagtcatgttgtaaattcttgaacgaaataggccacactgggcttgtccaattgtatgggagcctgatagggcaaccatgtctctggcattaagacctttgcggccaaacaaatcaatcaattccttgagtgtagctgtgaaaagaggaagatcgctctcagcttcggatttgcttgctgtggtagaatctcttctaccaagcatgacggtccaagatggcccacccacagcagccgacgcatctcgcgctgcaacggctagaatatcggcacaagaaacaactccgggacaaatgctttccactttggattttgcattttctatcacattttcacctctaatcgacccaaagttttggagagcactcttttcactcactattgagtctgaatcttctagtaaaagtgatgcatcgcatccctatatagtacaaccagataattataattagtttataagaaaaatatgtaacatacattacaaataaattttacttttagtgacaataacatttgtgattaaaaataaaaaaaaaaattgtaactaattaaaaattatatttttatgttgtcattccacttatataaattaaatatttttcaagaaaatatatatataaaaaaaaaaacttaggatttgaacataggccctgtttgcctcaccctttaggcgcatatagaaaatacctgaacaaagcaatcatgaaaatgaaggcggatgagagaagctgccatgcggcgctctttagaaatggctgttcggatggaagttcgaatggtggagagagcatttgggcaagtagcgtcgtaaaatgtggaagagagttgagctgtgcatgatgagctactcatgatcatgatcaacagcaaagcaatagctgagtatgtaaaagaccccataattctaagaagtaacacagtagtactatagctaatatggttttcagaatatgtatatatatgtttatattttatagagtgatattgatgtatgagaatgagatgagaagatatgatgatgattaatgattgttttggtgaagaaataagattgtagcaattggtatttatagtagtagtatagatcacttatgttaattgattaatgaatatttctttgtttgtttgggtcacagtcatcacgctcacgcgttctacttggtctgttttggttggcttttatatatatagaaaaatatataagttgtggcatgcatcaaaaagtcagcgagaataatccatatgcatgcatgcactaagcttttgtacgtactttgaccatgctctaataacctttaattacgagaaattttactttttatatgtaaaaagaatattgcacgttgacctttaatgaaactctaaaatatatacaaagggtataaatatatagcattgttatgacccagaatttttgatctgtgggggcttaattgttataaaaatatttattatttatattacattaaaattataactattttgtggggactttttactattttgttgtataattatttaactaaataaaagatatttaatttttttttcacactaactttatttttagtggggactatagcccccacactcttattagtgtgtcagtcattggttattaggtacttattatttttataagagaccttctacaattagttagagatattttttaaaagttatttttttaagttataagaaatttaatatttaattgcaccaattatgaggaattacattgttattttgacgccatattatattgtgtctcttaattagtgatttatcttattttttaaattaaaataaacaaaattcaatatagtagtacatcaataaattaataaataaatagggcatagcacacttttgaccactacaaaaaatttatttttattgacaacaaaatttatgactaaaagttaaaaagttgtgattaattataaaatataattcttatgttgtaactaaaaagttcgtgactaaatgtattagtgacaaaaattacattttgttgtgactaaatgtgtttttagtaaatacttgctttagtcacaagaaattttttgttgcgactaaaagtcacatttaatttagtcacaaaaaatttatattgtgactaaaaggttgtcactaaagataattttttttttttttggtagtggaccaagttaagagtccatttatgctgagaatcatggagttccatctcaaaaattaattggtgatgtgtggagtatcacatgttcttttatatgactcaatacttttacattcaatccatgtggaataatattcttcaatatctctcctcaagatggtggctatttttgctcaccaatcttgaatcactttattacaggtcgtgccattttgttcgctttatttttttttttagatctcaagcatctttgcactaattgcatctcctgcggttggctaaccatctggataggtgtggatcgaaagcccgctaggaatatgggtatgataccatgtttagaatcatggggttctatctcaaaatcaattggtaatgagcggagtagctcatgttcttatgtatagctcaatatttttacatttaattcatctgggataatattcggagccaaatgacctgtcccagttcttgtcccactccttgtcaaccaatgaaattttgccatctcaactaaaattccacctatacatttaacatatctctctaaaaactaactctgtttccttgttttaaatttaataatattttttaactaaaaaatatcatgacttttttttataagtaaaaaatatatatcatgactatctatctttttcttctatcaaatacatttcagtcttttttttttccaacaattggaacaaaatataagaagatgaaaaacaaagaacattcaaaaattatttgcaaaaggcttgaaaatctctctgtgttcctctgtattttctttgaggatgtaccgaacagagaaatggagcaaaagttctgatgtggctgtcttggaaagcttctacgacggtggcagtcttacaatgatttgaggaccgactttgaccgagttgaacatggttttttttcagttcagaaaatctaccttctctatgaccagttctttggaaaggcagccccatggaatgttatattatatataccctttagttataagaaattatgtcttttgtgggtttagtttgtgttcaatttttttagaaaaatttagattttcccctaatttgtagggtattcttccaattgaatttttctggtttattagactttgagtacgtagtagataaattattttaaacctcacttcatagttctagtcgtattaattaatcgtgtgagaaaatattttccgtttatcaatatattccttcttttacaaaatgctagaagaaatgacaatggcagttagatactcaataatttattataaaagagttaagagttcatgagagagtgagggagtagtgatgatattattttactttaaaataatattaaataaaaaccagactaacagagttaagtttttagaggggatcgttaaatgtataggtggaattttaattgaggtggcaaaatattattggctgggacagggagtgggacaggaactgggacaggtaatttggctccataattaagggactacaatcaatgtataccacatgcaatttttatgtagtgcatgttttaggttattctttcgtacacgactttctacttgtgtttctttcagtttgacagtaattttattttgagaaaacaatagactacatcttcataaaaaaaaatactatacgatttaaagtgaggggaatatatatatatatatatttatatatactagacaaatgttacgtgcaagtgcaaggcacgtatacttagttatatatttagattttttttt

SEQ ID NO: 110993 - DNA, 5068 bp, Cannabis sativa
cagccacacccgatgttggcaatggctgcagctcaaaatttggcaatgttcggtcacaatcccggcttcaatccaatttatggtagggggtattttgtgaatcccgcagctggaatgattcccgggactgttaatccggcaatgatggccgggacattgactcagggtttagttccgacgagtcaagtgggtcagggtcaggccggttctggtgtggttgggtacagtggagtgtctaatgggtttggtagtataggtggaggaagctccgctcttggttcgttcggttctaatcctacgcctcagatattgcaggccttgcagcaagtttatccacattcacagtttgggcagctggctcccggtagggttcagggaaccggtggccctatcaccggctatccatcttatacttggtatgacatatttcagctggcttgcttatttttgtctctgtttgtgtttcgaattgttaattgtttcttgtgcttattatcattttggttgtttttagtattttcttgtgagaagtttgagaaagtaacttttactatcctatcatttttaactttatttcgctttcattttctcctttttttcttatttgtctttggttcgaaagttttggttttgctattgatgaagtgatttggttttaacactatctttgttgatttataaacataatgcataagtttttattgacttttcatatcagtctatatatatatatatatattaaatcttccttgtattttgtttgattaataatacatgggctgctaaagaaatgtaatttttctaaacccaaaaggttcaggggttttttattttgaattggttcggttttccttagcagtttttcttagtgaaaactgatgtatggattttgatgctttggactcttttactatcagaaattcatcaatgtgttttaagttatgaaacactatttcttttgttgtttcaaaggaactgtttctgagcttcatgattcatgatcattctttatgtttaatcccaggcagtccataatggcttgcttgttcttctatgtaagcatttgcctgctgcattctcagttgctgctccctttctgtttttacttgtttcatgtcttcatacttcacagttcactgcttctcaagtgtttttttttttcaaaagaaattataattatactttatttggcttgaatggttcttgcttagccattggggaatgtatttgtatttagttttgatgtgcttacattctcaagcttaatatttgcagattaagtgctgctgaacttaaagatcgatgaccatattatctttgggggagaaatgtttatccatagcctatatacaggccaatcaatttgtggaaaagtactaaagattttcaagtttacattctgattttatactttcacaatttgacgactgttttagctttgcaccaatctcaaaaagatttcaggtccggtcttctactacttttgtttttattctctgatctctttacttgtaagcttttaaattctcttctactacttttgttttcattctctgatctcttgccttttctttttcttaccttttttttttaaatattttgtttagtgttcacttattgttttcgctttcccttttagttttgattagtgatcacaatgatttgtaatttgtgttcagaagatctgatttacagtacaatattagtcagctattttcttcttcatcttctttctttctttcttttttcttgttcagttggattaaaattttattactataataattttaaagggtcttgttttcttaacaagtattatgctcttaactctaatgtataattctcaaacgcttttatgttcttacccaattatataattttaaaattgtgcaactctttattaccatgcttttttgatcctggtttatgtcgtattttttcgctggtctgatggtataaaaacgttgaaagagatgtataaatgattaggtcggccgatcttttttgtcggccgatctttttttttttttattattattattactattattttcacattttccttttatttttgtgaaaaattcatcgtttttgttttgcacggtcttgcttttctgctgtgtttttttttttttggggtggaattcgtattctgcagtttgtttttccctgggttttttctccttctctttcaaattcattctagttttattagagttcttactttaaaatcaggctttaacaattggctttttttgtttttgtttttttttcccttctcaaaataggatgtaattatttatttttttatgtttggccaatttttcattactccagaatgatgtttgcttaattatttctttgtacagttagatactttgttatgtcatgaccaataatcagtactgaaatttatattcttttgtggtgtattgaatattttatgcaattacaataggggtaatgaaatatggcttttatacttgtatgtttaactttttctttaaaagtggatttttttatgacatttttattttttagacgcgattgtttttttttcttttcaaaaaaaaaacacgattgttttttaattattatttctttccaatttttattttttaattttattcttacttaattttttatcttttttttttttttctttcctaccttctctttcttttttcttatttttcttccattttttctttattctttattgtctcctttattctttttcttaatatttttttctacttattatttatctttctattttttttttatatatttctttatgtaattttttttttctatttttctcccattgtctttttctactttttctttccgtttttcattttatttttcaaaattttctacttttttttttttattatatatttcttttctttatattttctgttagcatcctttcacctttttttttttttttttcacttatcctattcatcttctacatttgttagtctttttttttcatcctaatttttgttattttatgttatttgtattatgtatatatgtttgcgttatttcaatgctaagagcatttttttttacaatgaactttcatatgctaagagcacttctaataactatttttctctatcttttaaatattgtaaaaattctattttctctattttatattagattttactttgcactatacattagtattttttttttttttatctttttctgcaccatcaaataatattaataatattttctatattattaaaataataatttttaacatatgtataatatataaataaaatattatgtatatactattaaaataaatttatgccctattcattctctactacatgtttacattagttacatattacattagtttgggtgtttctatattatacacgattctttattatacaatatattatttataggagctaatggaagttcatttgatcacatttggctaaaaacagtgatcacatttggctaaaaacagtgaatatgctattgtgagtgctctaataagcaattactctttaatgtttctttcactttgtatttagggttggtttattgatgtacaaaaagaattgcttgccttgcttgtgttagttactatataaaatgtgtttaaaggagatagatacttttgaatttttacaaaaattagagaagtgaagtgtgtgatatagtaaaagagttgtacatgaaataaaaatactttttatgagatttgggattgagccctgagggtcactcagttttatgtgtatggatgaggattcacacatcaaaccaatatatatgcgtcgtcatttaatcgattgtggcgtgctgagcttgtgggcagttggtgtggtcacttaattttttattacgaaatcaatcaatatataaaggaaactttttaagaggtaaagtgccttcttctctttctattcttctactttatttaatttgttgttttatctcttttttaatttttttttatttaaggacacatatgtaccgtatataataattgtaaaacatataattaacatttatataatatatataattattaatatttaaagttaatactattatctaaaaacctatcatcttctctataatttattaattaataacatattatattaattaaaatcacaaattaattactcaaatatcattttctcttgcctttacccattatgtctacctaattaagatatcaatatataaaggagaggtagcattttacaatctattaactctagctattctttttttgttaaaaatttatatttttatctattttatatttatttgttaaaaagtacttaataataacaacaataataatttaattgtaccttttcacttattcataacttttttattattattgcatatttatcactaacataaataagtaaaattaaaaaaatctgttgcaacttttttacttatagatttgaagatgtataatagtaagtggtaacaataaccacaacaaaaattgaaatacaaaaatacatatctctatcatttttttaataaattattatacataattcatatatataatcatatcataatttaaatacaaagataacatatatgattaggtataatattattttttttttctttgtaatgtctttctgtgaattatataaaaatattagattttaaattttatttaagtagtgatttataagttaaattatcaattctttcttatttttctttatcactattcttctcttttacaaacatgatatattatgcatgtcatactaattttaatatgtatactcttatttttccttttattgtctatgcactttattattatattttattctttttataatttaattttgttgtgtagacaaatttttttattttttaataaaatataataaatatattaataataaaattacatatataattatttttgaatttatatttcaaaactatctctataatttttttattcttatacaatcataattttaaattatttactttttaatttctatttttgtttgattattctctattt

SEQ ID NO: 110994 - DNA, 1173 bp, Cannabis sativa
aactacatgttaacataaatcacttctaattctcttattgataacaaatcagattagactgtaatgggttttatttagggcataaattcccaacacaatgtcattagcaatactattataaaccataaacttaaacatggtagaaacattgcaaagcttaagaatatcatgcaaaaccataccgaattccactaaacaactctcttttttagcaagaagtaaaaccaccagcgctgacaatccttttcaacattcacctcgacataccccaaccgaagacacaactaaatatcgtgaaatacaacaagagcttcaacaacaggcagggacaaagaaccactcgctggtgtcgaagcagacgccaaaacatggttgtcatggtctcggatcactgctcagaaccccatacgcctctccaccaacctaaaacatgcatctgtattcaatttaacatgtcctttagttggagaaagccacaaagggacaccaatagcagcaggggacggacgagcagacttaaaaagtgacatcgttttcttgtttgcatcatgaacactacttgtaaaagtcgaggcccatccaacaacttcctcaatattacataagttctttcgataccaaatacgtcccaaaagcaccaaattttatttcatttttttttttgagagaacaacctcatgttccctaagtaaagcatagatgttagttctaagtaaagaagtcaaaataagaacaaactcaattaactccacaatatgcatgagatttgagcatccccaaagaacatggaatgaagttttaaaatttttaccacaaatggggcacactatattagtgggaaccttgtgagtagtcaatttgaatgaagtgggaaaccaattaaagcaagttctccaaataaaaatcttaacttttggaggaatacagagactacaaaggtacttccaccaagatgaaggataggaagaaatcacattgctctcaactaggggtattcgcggtgcgggtggtgcggtttttgaccattttttcaaaccaacctgcacatgcagtttttttaatttcctaaattgcaccctcagcgtgaaactaaaaaattgcagaaaccgcactgcaaaaaatagtacggtgcggtttttacagtttctgtagtttggactatcaccaataatt

SEQ ID NO: 110995 - DNA, 1408 bp, Cannabis sativa
  modified_base (1356)..(1381): a, c, t, g, unknown or other
ctcatttctaaaaataattttttaaaacaaaaaacagaaaacaataccaaacatgctcttaatattccacctataaacttcagtcaaaccaagcatgcaatactcaataacagacttaatttaagaattaaaaaaataaaagattagaggaaaaactacaagtatttccttagcttgatttcacaattcttctcaagcacatacaaattttttttcaaaaatgaaatagagagagaggggtaagtttgggtggataaagaccagaatgttttttttggttccatcaacatttagccaaaaagaaagatttaattcaatttctttgtaaaataggtcaattgaccattttgccctcaaagcatcaaattcacacaaatgacaactaagggcaattctgtccttccaagttatcacatataaattcagatattctcaaataaatcatgttataacacaatcacacaattcactaattttagactccgaacccgattcgagtcaaaatacccaattgtgattaaaccgtgccaacttgtcaaaaattatatgcagtttgacaatataaacatactatataataatatagtctattagcataataaatattaaaattatgattttatccttctcgagtcaaaattacgaaaatgcccctaactcataaacggggtcttaaatgcaataattctcaaataatttcttataattaattatataataatataattactcatttatagttaattccttttgactagggttgctaatatattttactaatcctgaaatattacatagagtctcaacttaatcttcttaaggatgattctgcagtttttagcttttcataaaagggatgtggaattttttcactttacattttatggtattttttcttaatagaatttcaattaaaatttttactctttgaactttaacatataacaaattgtgctctctaagtcatcataatttctttacaaactacagaatgttgggtctccaattttgtttattttctatcacagaataatctatgagttggcataacacattgacactataagcatgaggtgtcattgccacttgtatcattaaaattaaaaaaatataaattaatttttgataaattaataataattataaaatttaaatcaatagaatttaaaatcataactttaaattttactaaacttaaatcttttattttgtggcaaaactaaatttaaatcttttattttgtggcaaaactaaacttaaatctttattttccccttgaactttgacatgtaccaaatcgtgccccctgaacttttttggcctataaaaagtccccccgaactattgagattgttnnnnnnnnnnnnnnnnnnnnnnnnnnattcaattttactgtttcagtgattgt

SEQ ID NO: 110996 - DNA, 5606 bp, Cannabis sativa
  modified_base (26)..(30): a, c, t, g, unknown or other
accattgatattgacttagaaagatnnnnnggtaagtttataatatcttatcgaagatccatatcggttccttctaatgcatactccatacatctgatactagtgaactttgccagtaccctagaaatgacatagcacttatccaaggtctaagtataccttatcgccaattatcatgtcagtctaaatccaatgaactgacaaatcattggaattaaacttttgaacaaataatcatgattatattctattgtgctgacaacactatgatgaataaatatatatagttacatatgttctggacttaatagaatttatacattaattataatcatgaaataaattatgtgaactatgcaaaataaaagtaatttatgatcttatattaattagtaaatctgattatattaaaatatgttttatttagggcacaaaatccaacataatcttctaactcttatcattaattgttgaataattgaataaacatagtcctcgtgggttcgacccgtacttacttttatactgaaaaattgaaagtattggaaaaaaaaaatagtaaatttgatgcggcatacaacacgcatcacatccttgttaatttttgaaaaattcctaataatttacaatgctgaaaatagaatttattatattccaatttactacgcgcgcttaaaaaaattcaaacgtcttctcggcattgtaaactatttaaaatttacaaggatgatattgtaagcataacacacatcaccataaaaaaatattccgtatatgttttcgggcacggaagttacttaagaggttgactgtaacactcctctaaatttaaaagagaattactaaaagataccactagtgactagcaccattcttagtgtcatatagttattatgtagttaaataggggatttcatacttataaaataaattttaagaactatcactaattaatcgtaggtgccaccaatgtaaaattatgaatatagcaatgctcaatttaaaaccatgttattggcaaatgaaaatggcagaataatttcttttcttccttttccccatggctaggagggggctcgagccaacgtacttttcacatcccaataacccagctccagtaaaatggatacctcaagtggcactttcatacaatatgtcattgaaagtctttaaattaaatagcacatttaacattaggctaaataaaacacaagtgtttaaacaacataaaagtgactacaaaagttacatccaacatttctgagaatcacacaagtctcgcctcagcctacgattttgactctgtatgcggaaggtgcaaggctaaagtagccggggggtgacaacaaaattttccacaaaacattgtctgtctcatgcaaaagctatctatatacttaaattaaggtccaagttggatgtaaactatcccaggacagttttgagtttatgcatgcggaccactgctatttaatttgtgcgattttgtaatcgacctcagcttttcgtagctatcaacgcaagcatgagagtagtccgacatggcacggaaaaactcaggcaatcgagttttcaggccctgaagtgacttctctctcacctggagacaatgtctctggtgagcttcaacttcctcatctaatctcttcttcaagctctcaactgcaaactgtctttcccatatgggatcctttgcatttgcatcgtcacctctttcggtatctgtttcttcagggcccctccgctgtgtgtacttctgatgccattcctcaaatgcctgacgtttgcgaatatactccttccgagtctcctcgcatttctcctttagcttcatttcttcatcctgatgttgtattattgtctttataacggcagcgaaggatgaaatggcagatttggcaagttcatctggaagcttttcgatcaagtcatgccattgatggagaagcgcttgaatcgggggactttggactcttggcggagatgagattttctcttttaagctgctttcaataggaatgagattcaactttaaccaactgttaagagcttgaatgtattgtttttgatgagtcacaagcttttcgaattgcaagttccagtcttggacaacattaaaaagttggatggtacgttcatggtggtgcttggttgtttcttttggagcattagcaaggtcaagagccttcaaatctaaaacaatcttcagctgaccatcgtggtgagtgcacatagtatcccacattttcgccatcctgtacagcagacatcggacacatttatggacatgatcgaaatcaaaaactataatttggttttgctaaggtttcagtcttcacaactcacccattagcgagaccaacaagcttggggtataactgctcatcccgtaaccgattaacttctgaaactgtggaatccatggactgcatgtcaacaatatatctggtgtgcaaatgactaacagccgctttagttttctccaaagattcagcactggcaccacgtttcttctgcttgttgagaatagcaacctttctttgatattctagcttcattaactcgccttgctatcaatcgaaataagattcatagatacaaaatctcagccagcattcagataatagttatatgaggttgaagcaaagtccaaataatagacaataaaaagagtaacaacggataaggagaagagaagcataagcattattaccttaacttcatcatagagtttcttttcccaagccaacaacttatccaaaactgtggcatgactttcatactcttctgaatcaaaatcatctttcccaccatctccatggggtataccacctttgaatgacctattccatgtaatcactcgcataaccctcgcagaatgatctatatgtcctgaaaaacacaaaacataatctcatctaacgctctcgttatttctcatatataatatatatatatatatacatattgtctaattagatttttttcaaacttgtcaagttattataaattttggtacatgttaatgtttcggagcacgatggcatatgtcaacgttcggaggcacgttttagtatatggacaatcaccatgttagacatcgattagtaaatggacttggacataagtaatttaatccaacaatcttaatagtttggtagaaaattttaatggagagaaaacttccggggaaagaatcctaattatatatataggtgtgtgtgtgtttcttcaacctcattacattgcaaaatcttgtgatcatatacaaatacagtgattgttgtaagagaaacttgaggtaagattcaccaaaagttcccatgacaaaccaaaagctataaatgaagaaaaaagaagaagcataaactacctcgattgtctgcgaaattggagtgatagtgtaatcgagtggcttcgagcattttggagacctcctgagcaccctcagaggcctttaagaaatgatcatcaatcttgcctaatacctctagcaagctcacactcgaagccgaagccgaagccgcttttacagctctcctaaaatccgccggagccgtatgagaatgctcaatctgattaggcgaaaccaactccactgtcccatgtggcttatcctcctccaccttcttctccggcgtcttcggttcaacctcattctcatcaatcctaactcccccatcgttcagattctcatcagcttcgtcaaaatccatagtcacatcatgctcctcattctcaaccccattttcattctctgcacccaatgagccaggcatattctctacattgaaaaagtaatcccaggccatacctttagactccggcatgggcggaaccgatttcatcaactccggtgtacgtggcggcgaagaagacgaagacggctgcgccgccactttctggccaacatttctcggaccccgcgctctgtgtataacttggttccgctcttcatcctcctcttcttcttcttcttcctcatcctcatcttcttcagcaatggcgatggagtgatttttgcgtcctggtttccgatgcatagttgggatctcgggcaagctcgtagctcgcttaagttgtgggcttggagagaaattgggaagaggaggcggcggagggggaaggttgtcgagcggaggaggaggaggcggcggtggttccgaagtattttccatatcctgttgatggtgactggggtgaagctgtggcggcggctcttcagtttcaccgtgtgcataatcgcttaaagcggcaccggtgttcttcaaagctacggcgtacccagaatggccggcggcaaaagcgtttctagcaacaacggcatctttcatcaagattttccgctccttacatctcgaaacagattcctcattctctatcctagactgcgcacaacccattttcaactataaaaaaaaaaaaaaaaaagcagtagttttcactaaactaaacaaaacaaaaataatacccttttcgacatcaatcaaaacaaaacaaacccaagaaaaagaaaaagcttaaagctttgagaagtggggtttggtagtgattggtgtacaacaaaaaatagacaagttgaaacctagagactggttttctattttttgggggtaggtgggtatgcctaaaaggtggtggcgtgactttctttcactgaagaagaagacatgggtgttttgagttgagttgggttggtgcttgtttgtttgagctcagattagtaaaagtataatgcattgcatttacagaagagagagaaagagagcagagaacagagatagtgccaaagctcgtactcagagatgatgagagtgagtgagtggagtttgtgtgactcgctgagtatagaaatgtaaaggtactcgcttgcttttgttacgaggtgtcttaatcaatattttaaaataacggtcacattttttgaggctctctctatacggtatgttttggtattggaccgttctcttctctaattcattttattctgattttttacattattatttttgcttttcttttttgaaacaaattattatttttgtttaaacattagtaattattaggtatttatttcataaatatacaaaaataataaattttttacatttttatgaatttgctctatttttttacagttttacagatttttatttaccaaaatacattatttttttgttgtttttgaaaaaaaaatattattttgatgttattgatacgagaaagtaatgtgatttatttttataattataaaaaatgttatttttaagttgtttgaataatattattttaacgttattattacgggatagcaacgagagcacatttttttgttgaaaaaaaagtaaaaacttataaaaaaataaggaatttttacactaaatacctaaattgatacttttttttacatttatacggatgtttgatgattttaatatttatacaaacttccatttacttttttacatattttgtttatttttatcttctaatttacgaagttccacgtacactacaatttttactaatagttatacgcattttatggttttaaatattctctctatttcaatatcctcacataataaagtgaatattactcattt

SEQ ID NO: 110997 - DNA, 5611 bp, Cannabis sativa
caagacaagaccaggatggtcgccagagctgaggaagtaggggcttgaaacatcgttgacagtgccacgatcttgagtggatctggaagaaggatatggtgcaacaggggaaggaatagagaactctggaccaagttgcgatcgaggcctggttgatcgacgaggggcagcggaaggaggaggaatcaaagtggagatgtcttcaggcaaagtctctgacttgtgatgctcagaatttgatggaaggatgccatcttgcgatctggtagatggtctagccatggatgaagtttgagatgtgtcttttgataccatgagagaaaccgagagagaaagatagattgcatttctcagattaattgattaatgattaaagagtaaagtgcttttatagcactggtttacaagagtcaagttggtcaagactaactaaccaattagttagctaataacatattaccaacttgtattaacagaattgtcagactaaatacaaagcatataactaatcctaactaattacagtttaatactataagacatgctttattgtgtttattttaaatattgtcccaagataaattttagagaatttttgttaccttaaaattttcttgtctttcccacatgaatgataagatcttgttgggagtgacttctctcttccattgtagtttgttttagttggtttgatggaattccctatattaaaagaaaacattaattttcataaattactctctttcaatgaattgatcatacatttttcgaaaaaaaaaataaaaataaagtggtcatttggtcaaaaataataataacaaaaaaatcttaaaataacaagattaataattgatccaccgataagtaaccaaaaatggtagtgttataattttgcataatcaagttattgaattaattcaattttatttagtattagttggaatctagttttctgtacaaattagcataagcaaagtaggcatagttagaattttgatgatcgattggaacccaccgccttctccatccattttcgttcctaatagtgggcatggtttccaaacccaacttctggtttataaagtcagtatcttaattttcttatgcttaatttgtagagaaaactagaattattactttgattttcttgttgttttgaggtatatatgttatgcataatatatctcactcatcacttcactctcttaaacttaattctcttttactaatatttatagatgaagataccgtgaatgaattatgaattaaagaagaaaagaaaaaagaaaatgaagaagaagaatagaaataaaaataaaaataatcaagctttccatgaacgatgacttttttgtttccatatttaacgaatctacttcaatacgtacactcaaataaaaataatcaagtttattttttttgttttctctaattaacacgattataattaaacttaggtatatataggggattattagttctagtcaaattaggtttttactaattcctaatcaaaataggattatatctgttttattttattttattttgtttttttaaaaaataatatttgatcagtttttctcctcaccgcctatcgacatcattttcaaaatttcttttctatttttttttttttttgggaaaagaataatttcaaaatatcataaattttactaaagaaattattcgtataaattattcatatttttaaagccaactttagtatcattaattgacaactccttaataaaacattccagcttagtccatgaatgttcaagtttattatttgtgaagcttaatattttgaatctaatttccagggtctaagccccaaataagattcaacatctaatgttatttagacaaaaacaataatgatataaagatcaaaccgctaaaacctaatagttgaaagatgaatattattgagctcactgagtcaagcaatgtctattaggtgaaggcttcagataatcacttagactactattagacttagatttattagtttagtatttatgttattctgttagttacaatacagttagaggttagttaagttggttgatattgtgagctgggtcctatctcactgcctatataaggcttctcttgtatcaaatcttcaattcaatcaataaaattttctttttacagagtttttgctgtgctattttctcctttgttttcttcttttctcatatggtattagacgtgactctgccattctccatggctagaccgtcaataagatctcaaaatggtattccaccacctacaaccgatcatccttcatcggaaaatccagatgtcactttcgctcctgcaactgttcctgttgttgcttctcgtcggaccaattccaggcccagatctcagaacaacaccgataacaacattgatgatcttgatgatcaatctctaagaactgaagaggtaccagtacccactcgtagatctcatgatcgcaacaccaacaacgacgtttccagccctttcttcctcagctccggtgatcaccccggtcaggttctcgtatccatcgttctaactggcatcaattatcaatcttggaagcgtggtatcacaatggaacttgctacaaagaacaaaattgctttcgtcgatggttcaattccacggcctaaaactggtaactctcttctcccatcttggttgcgttgtaataatatggtgatgtccttgttggtcaatttggtttcctctgaaatcgctcagagcattctgtattttgaccatgccaccgatatgtgtcaagacttagcaaaaaggtttaatgagggcaatggaccccgtattttccagctccaaacccagcttactcgtctccagcaaggtgatcattctgtcacctcttacttcacaaaactcaaatccctatgagatgagctgaaagaatttcagccaaacactacatattcttgtggtgcaatgaagcaatttcttgattactataatcaaaaccaagtcatgcaatttctcactagtttaaacgaatcgtatgcttcggtttgcacccagatcttgttaaatgaacctataccgaatctatctcaaatctttgctatgatcgttcaagaagaacgtcaacgcaccctcggatcttcgaacaacccacctcttgcctcttcggttcgtccccttcctactaatcctccaagaaccaaaaaaccccgtccttcttgttctcattgcggcaagccaggccatctagtggataagtgtttcttcatccatggtttcccacctagttatggagacaaaaagaaggctgataagggcaaggctcaagccaatcaaacctcctccaatacctctacagatcacaccacaggcccctctatactagctgatctttcatcacagtgtcaacaactaatctcactcctcagtcaatagctaagtcagaccaatcctcatgttgaacctgcccctgctgcttcgaatatggctggtaacatcttatcacaactttcttttgattagattcttgatagtggtgctactcaccatatgtgttcaaatatctcttgctttacatcttttactaacacattctttcccaagcatgttatattacctactggtgggatggtaaatgtttccaaaattggtacagtttgcatcaacaattctctatatctgcataatgtgctatatgtccctaacttcaaaataaatcttctatttatcaatgacttagtttccaatacaccctacactgttatttttaaagctaattcatgtattatacaggatccttcttggaatgtggtgattaggatagctaagagatatgacaaattgtacctcatatctcaagataattcgcttgctgcaacttctagtcaatcttgtttcgatttatatacatcaaatgtaaatcaatggcacaatcgccttggtcatccctcattgtatatttcgaattttttcaataaaaagattgaccattcttttactcccaattctaataatcattgtcatgtatgtcatttagcaaaacaaaagagactcccttttgtttctaacaacaactttgcaatggctacttttgatttaatccacatggatatatggggaccatttcaaatcataagcatagaaggttataggtattttttgaccattctcgatttacatggacttacatgttaaaagcaaaatcagatgttcaaaatatcataccagatttttttaatatggtatgcactcaattttcaaaatccataaaggctgtcagatccgacaatgacaaggaattaaatcttacttctttttatgcctcaaaaggcatagttcattatcactcttgtgttgaaaaaccacaacgaaattctgtggttgaaagaaaacatcaacacatattaaacatagctcgtgctttgagttttcaatcccatttaccattggtctattggtcttatctagtttccactgctacttatcttctcaattgcactccctctaaacttctcaaaggcaatacatcctttgaaatacttcacaattaacccccccaatatgatcaccttagatcatttggttgcttggcatatggttccaccttagattccaaacgccataaattttctccaaggagtcgggcatccatctttattggctaccctatgggaatgagagcttacactctcttagacattgaatccaagcaaatttattcctcccgtgatgttgtattccatgaacgaatcttcccattcactaacaccacatcatctcaggagatacataattttttttctcaatctgtgttaccaaaccagaaacaaataactcaaacacagcccactgctgtgatcaccaacaaggctcattctcctaatgtcaccacagtacaggatcaacatcttgtcctggtgactacaaaagtcactaatgtgatcaaccccataactccatccattaatgtacccacaaaccaggatctatatcctattgtgatcatcaacaacaaacttgatgacactaatgagatcccaagtaccaaaacaacaaaaaaaggacaaatactcactcaaccctcccatttaaaggactatgtgtgtcatgtgtcttccacgacacatccaattaaacctttttttatcatatataaaattggatcctcagtttcttgctgctgtcttagccgcatacacacatagtgaaccaaaaaaatatgaagaggcatcctagttcaaacattggctccaagccatggactgtgagacataagctcttgaagaaaaataaaacttggatcatcaccaagttaccccctggccacaaagccatcagatgcaagtgggtgtataaagttaaatacaatgaagctagtgaagttgttaggtttaaagcccgattagtcgccaagggctttaatcaaagagaaggaattgatttttcccaaacatatgcaccagttgctaagtttaacactttaaaaattttccttgcctcggctgctatcaacaattggaccattaaccaattagacatcaacaatgcctttctctatggagatcttcatgaagaagtgtacatgaagttacctctgttgaaaaatattttaccaggatct

SEQ ID NO: 110998 - DNA, 2505 bp, Cannabis sativa
agaagaacaaacagagatgcgactgatactataatagcaacattatagtttttatgcttctcttgtttatagcatgaaactatggaacagagatgtgggtttccagtaacacttgaataaaacacagttcaccacaaatccatatcaaaattgagttgggatgaaaaataataataatttataacataattgtataatgtattcgtgtcatttttttaccttagtaatagtgaaccattattggatctttcaatgaggttgactggaactgaacctgtcagattgtttcctctcaagtctctgaatcatataagaaactataagttaaaataaatagtactagcaaggagagtggtcactgtaaaggtcattatgtgataatgtaaagctagaaaagcttacaaaaagcttaaggattgtagtttggaaagaaaatcaggtacggttccagttaaactattgtttgataaatccctgaaatgatgtacatttttagtaataaggagtcttaaattgaaaccaatattaacattataatgattaaagacatagcagagttagacatggacttacaggaactgtatcatagtaagatctgttatataagaaggtatcttcccagtcaatccacttgaagataagttcctattaagtaattaatgtgaatgatcaattgaaaagctttaaaatttatgtctgttttaaaataattatactagctaattcattaggtgaagaaatttaacttacaaggatatgattctaacaggatctttgccattatagctgcaattaagaccatcccatgtgtaagtttttggagcacatgggtccccttgccagtttttactcactccatactttgacttgatattcatcatagcaccaactattattttgtacataaaacataataataaaaatgaaagtgagaaagaatgaaaagtataactagcattgcacaacccatatatattcatttatatacataccatcttggtcatgtgtttgtgactctgaaaaattctgaacaatataaacctctaaggcattgaggataggctggtgagtggatgtcttggtttgttcgagatcgtactcgattttgtctccactgataggagactgactatatacagtagtagtatacaagtagttaagagacgtaggcataacatcaccattaaaatactccccattttgataaatgtagaattctctggactcatttggttgcagcttttgcagctcagcaaagtacatgtacacatagtattgtgcggtgggattctcaggcttcaagtagaatgaaaaataaggacttgtcacattttcaggagacatggcggttgccatgacacttgatggtgggttgaaagactgttgggtatacttagagtctattgccaacgatgtgcttaaaacttttcgatctgggaaattaaagggctgccatattcgatcatatacatcttctttgtatcttgaaaaatgaaaatcagatagtgattagagactagaggtcaccatattactacaaaacatatattatcatcatacctacctctccaaatggtttctaagttcaattaacaaattttattaataaaaaatttgaaccaaaatgttgtttccgatttcaaattggagtatcatatcatatgagtattattttattttatttttatattggggattggagattcaaaattaggattgttctttataaagataggtacgaaactactaactacgtgttggaattctaccaactctaatctcaaacgccctgcacacttaaacatcgtttgggcccactttatgtcttttggccccactttatgtatattttttcttcaaatcagaaagaaacaaaaaataattaaaaaaaaagatagtagcgtggcttagcaaaagctacattagttatgtttgactttgaaaattattgctctgataaatcagaaatagtgcagcaaaaaaacaagaacaaatagcataaaagtgttcaaacagtaagtaaagaaaaacaccaaagattatagaggctcaactccctattgtagtgagtctaattctctagcctgaactccatatctttgactcagattcttgcactaaaacgaatgaaagtttgaactttacaactctaaggctacttgaaacaactccctcaaacacctctgcacaaacagagtaaaacagctctctaaggcattctctctcacaataattcagctctttcagttctctctctaaacttacaaaattatgtcacaaaaaaatccctcagcaaaagaactagaagtctttaaatagacttactagcaatacaaactcaaacaacataaaagaataagaaacaagaatgctaataaccaacttaacagacttccatttatgataccacaaacaaaattcaaaatagttaattgcatgcatataaaatgtttactataactacaatatcatgtatgacatgcttaacgatatggacaaaatcag

SEQ ID NO: 110999 - DNA, 4015 bp, Cannabis sativa
tcattttgattcattttagtatactattgaggagaaagttattgagagggcttacaagaagcttgcactggatgctttggttatccaacaggggcggctagcagagcaaaaaagttagtattctgatttcttctggtgagctgtccaataatattttttaaagcttaagattaataacaagatttctccatgaatgatgcagctgtgaacaaggatgagctgcttcaaatggtgaggttcggtgctgaaatggttttcagttccaaggatagcacaattacagatgaagacatagacaggattattgcaaaaggagaagaggcaacagctgagcttgatgcaaagatgaagaaatttactgaggatgcaatcaagtttaaaatggacgatagtatgttaattcgtgactcactggtcttactaattttatcatttataattgtatttctttacagctttatctttaacaattaatgttaaatataattcaaaatttatgataagttattatttgcagctgctgaattgtacgattttgatgatgagaaggtaggatcttgctcttatgtatacatagcttgatgaatctctttgtgtctaggttttgtatagctctgtttagaattttcatttcttactaatgtgttttttttccctttctattttatctaggatgagaacaagttagacttcaaaaaaattgttagtgacaattggattgagccaccaaaaagagagcggaagcgcaagtaactatctttcttttttttttttttgcaattttgattgttttatctttcattatcatactattagttagtttgattttgagattttgattttttgtgccttttgctagctactcggagtctgagtatttcaagcaaacaatgcgtcaaggtggtcctaccaaaccaaaagagcctaggattccccgaatgcctcaattgtaagcacctttcaaattaatctgtttttatatttgtgtttttttcctgttccttttaattgatgtttttaattgaaagattgggtgcacaaatcgagaaatggtccaaaatttttaaaattgaaagattgggtatacatccaaattatacgctttttattcacaatgatgtgtaattaatctcaactatccaattaaaagggatatggtctctacttaaaaatataaatttatatttaatacacatcattgtgtgcaatttgagtgtgtatttagcattactcttattaattttctttccctttatctaggcatgattttcagttttttaacactcaaagattgagcgagctatatgaaaaagaagtacgattccttatggtgagttttaatgtgacaatgcctcttatttgctttattcctcttggtgtagtgaggatttggggatagtgataacttttgtaattactttttttttaccactttcagcaaacacatcaaaagaatcagataaaagatacaatcgatgttgaagaacccgaaggtaatttgctatttttgtttaaatgtgctgttctttctaacttatttgttgtccccaattactgactggacattgaatttcagaggtgggagatccattgactgctgaagagcttgaggaaaaggaaagacttctagaagatgtaagtggattatgtaactctgatgaggtttccatgtagccttttgcattaaaactttttttttttttttgctgaaattgcatttaaacttaatttgtgtgtatagggcttttcttcttggagtaggagagatttcaatactttcattagggcttgtgagaagtatggtcgaaatgacataaaaagtattgctttggaaatggagggaaaaacagaagtagaggttgaacgatatgcaaaagttttcaaggacagatacaaggagttgaatggtaagtgatttgacagtttattgttggttttgattatatcagagcttagcattatccctgtagtagactatcatctagccattcctttttatgggggtttgaaattagaattaatgtctgtataatgacttgtagattatgatcgtatcataaagaatattgaaagaggtgaagctaggatatctcgtaaagacgagattatgaaagctattgggaagaagctggatcgctacaaaaatccatggttggaactgaaaatacagtatggtcagaacaaggggaagttgtacaatgaagaatgtgaccgattcatggtatgaactgaaaatgcattttgtttgtgtatcatatttttataattttcctctttcaaagaaatgcttaattgagtttatacttgaattcagatctgtatgattcacaaacttgggtatgggaactgggatgagttgaaggcagcgtttcgcacttcacccttgtttcgttttgattggtttgtcaagtctcgcacaacacaggagcttgcaaggaggtgtgatacattgattcgattagttgagaaagaaaaccaagaatatgatgagagggagcggcaagcacgcaaagagaagaagcatgctaaggttcactctacccaacttgtgcatggattctatactcatgatttttgttggttttctgtattttggggatgctaattgtgctattgtattccaattttcagaacttgaccccatctaagcgaggcctgtctaggcaggccactgagagcagccctagctcattgaagaagaggaagcagttatccatggatgattatgttagctcggtacgtatttcttaattcaacagaagtggaggattttcaatgttgataacagcaatgtgtttatttatttatttctactttgcagggaaagagaaggaaatgatataacagtaaaagtaaaagttaggattattttaggggttttgaagcctcgaatatatttaagttatcagtagacatgacatgcctgtggtaaggagatcctgagtttgcattgcaggatagtaaatgtcagctggtattcgaatcatcgacttaattaggaattcacaatttggtattataatctcattcatggagaatatcgtacaatgtatgttttggaaagctgtataaatgaatcttctactatctagatacttatgaactacgccattttgttcttttagatcgataacaatatattagtgaaattaactacttgagtcttgtgagacaagtcctagttcgttgccagagctccaagaagtttttatttgatcaaatgcctccacacatatttattaatgtcatgagaagtttctaatatatacacacgtccgtggctttatatttaatcatttttttaataaattatgtttaatcgttgctaatcaattaaattgcatgcaagaatttttttttgggtttgttgggtatattatgacactgtaatgtatggtattatatataatgtagttatatattggagattagattttgtaatttgattttacgtgtattggatatgtattggatgttggattggttcaattttattttatttatatgtatttttatatttattagtttagatttatttaatattttaaatctagtattttttggattgaattggattagatctatctaatttaaaaaatgaaaaattttaatgtataattaaatatattatgtataataatataaaatttaattataaatttaaaataaatgaaaataataattagatcgatatgttgaatgtattaaatttgtagatattatctaatatttaattcgatttaattgaatatttaaaaataatatcaaatttgatctaattataattagatatttaatgttaacggtagttattattagattagatacatttttgaaactaaacgaagttccatacaatgcgatttaatatggtgaaagcaaattttattccaatgcatcttgtgaagtgacaaagactaactgccagtagggatggcacttatacccgcgggtacccgtcccatacgggggtagactttcgggggcgggagcgggggcgggtatgggtttaaag

SEQ ID NO: 111000 - DNA, 1793 bp, Cannabis sativa
  modified_base (1732)..(1736): a, c, t, g, unknown or other
ttaaataatcaaactgggaatattaaaatacggaatttcacaatataaccactcaacatatatatgtgtcatgagttgcaaatatttaataaaactaagcaaaaaggctttatcataagcgtctcatgttaattaagttagctaatgagatatttgacaaatataataatttatacagtaacaaattacaaatacttatggaatataatggtaatttgatcgagtatctttactactttatcgcctattcttctacagtagtattcaaagaaatagaaatgtttatattactcactattttgctcgaatggtcttggtcaatatcagggttgttctccatcatattatccgattcaattccaacacactttgtggtgtttagattgtcatttgcaacatcagctgactcaatggacaagtcctgcttcgatccatctctactttcttcaacaaacttcattttctcattctctaaatcattttcacgcgcaggtggatcatcttctggtgttatgcaatgagtattttgtccctgtttggtcattttagccaaatgtgtacgtttatgaaaacaatcaaaatattatataatcatcatgttatattagcaaatgaaattagtttcatgtaaaagccatatatatttatatagttggatttcatgaaattattgtttacctcagctagttttccagttccatttttgcaaccttcattcgattccaagccagttacttcaggtgttccgaaaaatgctgtaacaacatcagtactaagaagtgtgtctggttcttctttagctgccttttcattgactagagctggttcatgagtattggatatgatgttgccattactttcatctgtgaacttttctgaggaagatggttcctattcaaatttaaatgcaaacacaagtgcagtaattataaataaaacttttatttaaatttattagaaatatacataaacaaaacttattcatttccctaattccatgatcattgtctgtatactaacctctaacgtttcaacatcactagtatttgaaatgtgagttgttgatgaaatccctatgtagtttccattttgagtcataatcagatttgtatcatcagttgtatgttcatctagtgagctagttttggccaattcttccagatcagatcttgggacatccatgtctatctcctcattaagatctgatgaggaaactccatcctttctattcaagtttttgtcttcagtctctattgactttgacatgtcactaatgccctcttgttcaatttgtgccccactatcttcgataagtttcaaattcatattttcctctagtgctagctgtgaagagtccttagcttgatgtccattaaggttttcagaatttccgtcattatgcaaggcagagtccaaatctctcatttcagctggtttttgttgagcttcttctattgtcagtctagttactattagtgatccatcctcatcttcatcttcatctttttcatggtcttccatgtgatcaataatctcagttactgaatctccttcatcatagataacactcccctctttcacagactcatctggaagactccatgatttctgtttatgataaaaaaaaaataagaaagaatcagctaaaggaatccaatatactgttttttttcctgtcactaaagacaaattaatttggctaattagtatttttttcccgaactttgacatnnnnnaaatcatgcccctgaacttttatggccgttaaaaattccttctgaactattgagatt

SEQ ID NO: 111001 - DNA, 5415 bp, Cannabis sativa
aaaacaattttatataacataattttgaaaaatatttttacttttctaattagaaaacaaaaaaataattaaaaaagtattaccaaacgcactcttaatgtctcaaagtgtgtctaacttaaatctatgtttataataatatgtaagaaaaaaaattttaatcactacttataggtaaaagtatattttaggaaagtatatatacccatatattattttattttaaaaaaaaataaaagtaagaattaagattgacgtactattgttggtaattttttttttaaagaataaagaatgtgaatcaaaactactttattacaataattgcttaatttttttttttaaaaaaaattcataataacctaaattttttaaagtattactaatagacaatataatattatatgatgtgttattctacatgtcaaaaaaatttaatccatatattcacataaatttatccataatctctctattatccatattgactactaaaaaaattataattttttttggggcaaaccccattgaaatattactatggtggacacctttaatttatataatctttgttttgtattcattctcttaaaatattttaaactaccagttgatctacatactggaaacagtttctaaaattttagtttcaagcttccttcctggagctaaaaaccacatatccaaacgctttaaaaaaatatatgatgattaataaatattttctctctataaaatatatgtaaacacatatctaagagtaggattgatatcaattaaattagattatttgtgatctttattcttttgaatataaattattttttggatttttatattatttgtggatttgatatcacattgatattttttttttttgataggatgtgattcatgatgaagattaatatttttatcatgcatgcttatttatatgcacacaataggatgtgatgatcaatttgtgtggaataaatatatagtaattttctaaaaattataagaaagacactataacatttaataattaattttaaaatcattaatggattagaaaaaaagcaagaatcattattggaatcaaatatataattcaataaaaattactatccatacaacaagtcactaacaagttacctatttatttatattttttaaaaaaataaataatttattgtacttaatatttaatatttaatatttacatctgttgtgttgaacttgtctattaagagttaagacttatgcttattaggttttgattgtgttgtaatattttagttatggcatcataagaattaagttgtacttaattaactaatgattattatgtatgttgaatttgtattttattactatgagtataagaattaggttttaaattatgatttttatatatattttttttaatgaaatttaacttaatgatgactaaaaaagattgaatggatctaatccaatagaaaaccatgcatccagtggttagagccgatctaatttaattcatctattgaattaaaatagtggactgaattcaattgaatttgatcgaatgcaaaatccaacttccaataaataatagattggattagttcaaatacattaatccaataaacaacactaattattggtgcttaatatcaatgttgtatacttttatatttattttcaattgtttcaagttgaagattgcatttttcagtgtcatttaagggatgattttgatttgttaaggttgaaacaagagatcaatggtgtaatagttaatattgtccattcaatgtatttttttaatatatataaagaactaataaaagaaaggttagtatccaatcacatatataaattaatgtaatataaatattgggtgttattatagtattttttttagcttatatagtatagaataagtctatagtacactttttaagaagatattttggtagatcccctatttattttagcatacataaaaaaaatttgattaaattatttcatgatcgtatattttatagttatttaggactacttgtaaattttcaaaattttttgaatagtttacagtgccaaaaataagattcacatattttgctgcacaaacgactattttttcttatcatgtggtaactacgtaaatctatttaaacaatttcagaattttatgaaaatttacaaatagcctaaatagttacaacgtaagcaatcatgaaaaaaaacaaatagactaatttttttttttttttctaaatatcaaaacagataaaaagtcttaaaaaaactattcacagaatctattatggaaattttttcctataatatatactaataaacaaagcccaaaaaaaaaacatacaaacaataaatctgtagaaaggaggcaaaggaacacataaatgaagaaagcaactcatatagaatctaccactaaaaaatgaaaaaacaacttgggtttcactcaatcatccaaaccacaacttttagaatacactagaaaaatctgtcatgggaaaatcatcgtcgtctttggcgggaaaagcttggggatccagttgcaggtattcctctgaagtttctgctgggtgagtccattggacccctgaaggaagcataagcagatttaacagattccggaaacaactccatcggaattgaatcggcaaagcatgctgtgttgatgcgggtcctttcaagttctaactgaagcaactcggaactatactgctgagcaagaacctaagaaaacataacaaataaataaacactgttataaaggcaaagacaatttagaagtcgccaataagacccaatatcaataataattaactacactaagaaatcagagagagttattacaattagatcatctggtgaaacactcattccttgctgtctatcatcggcaagtgcatcttcacttccacgggtaggtcgtcggtgatgcactggattatccacagcttcagttgcactctcagtggctttctccaaaatcacaccttgtagagacttcaaagactctctcgcatcaggggtaaaataagggttcaatatattctcgaaatattcaagctgcaaggtgagggaattaacctttgaggcatctcaatgctattatatttagacataaacaaacttctagatgacaactttacctcaagcatgagctggcaaaatccgttcatgtcaagcaacctaagatgtttgtccttgttttcatgaaaaagactgagaaagatatcaatcagaccttccaaaagaatgccgagtgtcttatccagaaggggcttggcaccagaaaaaacctaaaagaaagaaataggtttctcatataagttggctatgtagagtagatgtcttttttttctgaaataaacattcattactaaaataaaagttaaacctcatggtcattacaaataacatcagctgaaataaatggcacggctaccattccagttaagttttgagaaaaaactcacctagcaacattatgagccgcaaaattgccaagtttaaggataaaggcaaaattacaactcaaaacctgtttagagagtctaatacaattcaaaacataattatcaatgctccaaacagaaactttcttttgcaaagccttgataattgtctcggagtcgctctctatgtaaagtagatgtcattccttagagaatctaaactcaactaaacatagtataacctcaatctaaaagtccgctagagattaataatcttatggcataaaaaataactggagcatgaaagacagcttaaattcttatttgtaagaacagatgttggcaaatcaaatacttttatcattctaccaaacaagcctaactagagaaaattagttcttaggattaagataattataaactaaactaaacaagtatcatagagaaggaatgcattaagtacctctgcatgaacagctactaaattgtgcagtaactccacagctgcatctcggacaccctgcacaaaaccaattcttctaacaacttctaagggaaagaggtaaaggaaaaagaaaaagaaaatgtaatagtaaagtgacaggggacgtaagaaaaaagcactaatatgacatgaaaatcactacatcttactttgactgcaggtgcaccaccccactgaaccccagaatccaacaaatagtttgccgcggcagttctgatcaagttcgcctgataagaagagacatctttcttagttaagaattgttttaaatggtggatcaaaaatgtattttatttaatagatagcaagtatttatatacaaaactaagaagactaaaatagaaagctaggaagaaattggaaacctaattataaatctacaactaatatacagctaatatatattctaacactcctcctcaagttgaagcataaatattaatcatgtccagcttgttacaaagataatcaacccgcactctatttacagtcttcgtgaaaatatccccaaattgttcttcagtattcacatatcatgtggagattaagtcttgttgaattttctcacgaacaaaatgacaatcaatctcaatgtccttaattcgctcatagaatacgagatttgaggcaatatgaagggcaacttgattatcacactacaattttgctagagttgaagtcttaaacccgacttcagtcaaaagttaataaatccacactatctcatagctttatattctgattcagcactggatctagatacaatattttgtttcttactcttccaagagatcaaactgccccccaaaaaaacacaataatctaaagtggatcttctatccaccttggaacttgcccatcctgcatccaagaaacacttaatctgggtgtgtccatgatccttgtaaacaataccttatcctgaagctcctttcaagtaacacaaaatttgctctagtgttgttcaatgataaattattggagacgacataaactgactaacactaactgagaatgcaatgtctggaggagtcacaattagataattcaactttccaaccaatctgcaatatttctccagatcttcaaaaggcaccccatcacttgtaagatgcacaactagattcattggagtacagcaaggttcggctctcaatttttctatctcacttaacaaatcaagtacatacttcctttgagatagaaaaataccttgtttactccaagtgatttcgactccaaggcaatacttagcacccgaaaatcattcgtatgaaactaagtatgaatgaaagatttaaaggttgagatgcttctagtgttatgtctagtaataacgatatcatccacatacacatctaacaaaattataccagcacttgatcttttataaaataccatatgatctaacttacttttcaacaaaccaaatttctcaacaacctgactaaa

SEQ ID NO: 111002 - DNA, 1814 bp, Cannabis sativa
  modified_base (1787)..(1789): a, c, t, g, unknown or other
tcaacaataacagtataaataattatttaaatatctataaataatttgataattaaacatgattaactgctaatttccgaattaaactaagcggtctttacataaagagactatccttgacttctttgtatctttgaactgaaacaccatcccttttattattcagcttcttcaactcagtttctaaattttttattcggtgatttagagttcctgtaatctctgtaccccgtcaactcaacttctcagcacacagctgcatcttgtctctgaaactatgatcatggccctcgtcccaacaatccctcacaatctcaacacaaagtggttctttcaaccaagaattctcaaaacgaaaacgtcgaataggcatgaaattattcagagtcttgggttcaagaaatataggtgtatgatcagatgttgaataatccaaattagtgagagaagcagatggaaaaatctgatgccaagtcgaggatgcaagggctctatgcaaacgtacttcaacccaattattcgagcctctccgtttctcccatgtgtacgggtgcccctgaattttagtatccgtcaaatcgcattgttgcaaaacactattgaatcccgtaatgagccattaggggtacggtcggcctccccttttatcctcttgtcttaccacattgttaatgtctccaataacacaccatggtaatttcgattctcctgctaaagtaagtaacagggtccatgtttcatgccttctacttctatttggttctccataaacccttgtaagcctccaattaccaaagtgtactgaattaacaaccatatcgatatggtttgtagtatagcctaacacaacaccatcatttactcttccacaaaagagcaattccacccgctaaaccaactaagtcaacagtgaagactccctcaaaacctaaaagattagccaagctatccaccttagacttttgacattttgtttcacataggaaaataaaattgggtctcttttgagaaataatttctcataggaattgaacactctgttggttcccaagcccctgacaattccaacttaagacattcatgatgcttggcgggcttggaaaccaagacccaccccactgaagttttttggactgtctgaaaggcccaacagaacttttccaccatcattcactatatccatgtgagcataaataatgttttcatggattctatatgcctcctcctctgcttcctcattcgttggcccattatcatcaactaagcccattcttctccttttattatcaataaaagtcagcccgttatttaaattattctcagctggctccttcacaacctctcccccatttaactcccttgaatcaagggatttttcttcccctattttacgtgcctcatttaaatgcctattcaaataaacattagtacgtgcttgatttttggataatgaatgagcaccttgatttgtagcaatcatactaagttgacgatcttctcagactatcaccagtgccaaactactgccgcaattgttactggacgaagccctaaacatcgaagaatcatttttcgtagccaaccctaacttcagccaccttgaaccgtctgcataacgtcgtcgccttggaaccgcacgtaggtccgaatcaaaactttttactattttctcttttggagtatcaaacaatctttcgcaaaatctctccgtgtggccaagaataccacagatgaaacaaaaggttggcaggtcctatttggaaatattttaccaagacctagatttnnnaccaagtatgttttattaacatcct

SEQ ID NO: 111003 - DNA, 4028 bp, Cannabis sativa
atcccttaaaatgagggagatatcaactattaaaataataagtaaataacatgttaattaatccccaagaataggtaaatagctgaagtttatctcttatttttgtgggttgtttcatcccaattcgtaacttgaagtgttgttcgggctgaaagttgcagaggcacaaaaagtgcctattagaagagagactgaccaacatatgctggcaatagggctggccaggggtggtcctgccagatctccttagttggccagttcaatgtctctttattccgatttagtatttggactcctcgtcaactggtatgtgttgtacatggtaatttggccttcttgttgatatggtgtactccacatggcatgtggataaaaattagaataatagggacattatttatcgtttttaaaattggcgcccttaattttcttttttcttgcagtgtagatagtttaataattagattaattattgaaatacatcaacatttggcttatacagcggtctccatttggtcgtccatgttatttcctcctgtcatactaatttaagtattaattaaactttgctaggaggtgtaaaggttaaaacatttactatggtcatcaaaaattaatgaacatgaacaaggcaaccaaacttttgtatgtatttgtctttttacgtggagagaaataagagaatgatatgatgagacatccaaatttatttacttatttattttgctagctagtagtgtcctttccttaaacgtcaatattagccccaaatcaggcacacaaatactaaaggatttaaggccacaagccgcaagaacaacagcgaaagaacatgccataaatgttgtttattttcataatacaaaagtgaaaagcaaagctgtctaacaaatttatttattttatatggatatagtaaattttatgtgtaggtttaccttatttattatggtgtatagagttttttttagacagctaattatgagacaatagttttttgggtacgaactgctagttgaaaacgatattacgtaataaacaagtgaatagagccaaaaatttagttgcttatttctttttaagaaataaaagtactgtatatataattaattaaagctccttttataagtaaaatggacaacatatatataggttggtccacaaaggtgccatatgtaaagaattgggatatagtacctaacaaactaatagcttagttcatcgagaaaaagaaaaaggaaaagctatataataacttataggtgtcgtgtttactcagcaacctcctccaacagtccaagtccaactaaagaaattctaagacttaaaaaacagagaagagtacgttgtcttaatcactttggtttcatattttagagttaattttgttttcttctcataaaagtgacttttcgaacgctggctactactattattacttttagacttctgcggttttaacgataatgatataaagttgatctatttattaggaaggaaatttttcaatgtgtatccttgaacgcttcttattttttttttctctttgattaaaatgaatgcatactttgattaactaacttatatatatatatcaaaccaaaaaagattaggtgcttttgtaataattattttgtgttaaaatttaaaataagatgaatgagtgactatctcaaaattaattggcaatagcacattcatcttatatatgacaatttattttcacacataagcaatgtgagactaactttaatatactcaccacgcgtttatggccgaacgtgacatttgaaagaatcccacaagatctaatattgagaaatttgtaggtgtacacgtcaggaaatttgtggattttgaaacaagtcaaagaccccaacactgaaactgcccagtcgatatgcctttgagagaccagtgagcacatcggttgcccttcaactagatggcctagtcaatgcgccatatagagcagggagcggtgttgtccatgcatccttattttagtgatatatccatatacttcagggtatttctgactcaaatcaccctgaaaggtataaagtaccttacaacaaggttcattcttaagtcagagttaggctagcctcagtcctcccactacaagataacacacttttttgagctgaaatttgttctgaagcagaactagatcgaatactcttacttcagacagataggctatcagtggttaggcgacaccaatagcttgactttatcaatactgggaggataccccaggacttatttcattggctgggatatcccgaaggtacaccacctcttccagaggatgccgacctacacatgcgccatacccactctctagatgagggatatagttaattatagtatgtccctccccatcgagaggaagaatatattaaggttggcttgcaagggcaacttttggaggtatggtgtgtaccctactgagtctagcgttgagggcgctaagggcccgtttggatgcccagatggtgctctagtagtagaggagacttgccaaggaggtaggcgttgtaataccctaataattaataatcggattagcaaccctaactaagttacttaagtgttaatgaggaattatattattatataatttaatatgtggaactaatatgatttattgcattttaagaccccgttattgtgttaggagcattttcgtaattttgacctgagaagggtaaaatcattattttataatatattgttcttatggactatattattatatagtatgtttattctgtctttctgcatgtattttctgacaagtcgggcggtatagtcaaaactgggtactttgggctgaaccgggtttggggcccaaaatatattttcgagatttaattatggcttttatgtgattaatgagaaaatatgatatatgtgatatatgtgtgtcagtggtttgacaaaattgtcctttttatgtgtatatggttatatgtgtgtcttaggggcatttttggtcttttggccaaataaggttatattcagcaaaatcatagttttattaatttgaaaaccaatttctgagttttaccaaacccaaaactgactctctctctcttcccattttgtgattgtgagttgaatttagaggaaaagcttggatttggagtaattatgcatgctcatgcttgggaaaaacttgaggtagttgtttttaatctcttttctatgtttacgattctaattttaagaggtcatcatgagcggtcatggtgttcttgatgatttttgattatggtgatgcatgtggttgatattaagggaagttatgatgttttatgtgtgattgtgttattaagattgtgtattatgcatctagattgaattgggagaattttgagttgaattttggtgtttaatttttgggtaatcacttgaattttttagattttactttgaatgtttgaatgcttgagtttcaagcttgtgtaatattatgtaagtgtgttctttgtgtgtagcatgcttaatttatgattttggtgttgatattgagttttgcgtggtgctcaaatatgtaccaatgtttgattggtttggttttggttgaaagattgatttgtgtatggttttgaatgtgttttggtatgaaattaggttaaaattgagtgtgttaaattggaaaaattagggttttgtgtagaagcaggggttgttgcggtgccaaggtttggctaaccgcggcgagctccaccaggttgtggccaccgcggcgagggtcctattaccccagtttttattttctcgtttttgctataacttttgaattagaactccgttttggaagttctttacatcattggaaagctcgttttgggctctatatgttgatctataaatggaattcaaattatttatatgtgtgaaaatgaatttgggattaacaatatttgtgaaatcttgggattgtaagactaggattaccagcgcttgctcaggatcactcagggatttggaatctccacatacttggattaccaggt

SEQ ID NO: 111004 - DNA, 3482 bp, Cannabis sativa
gtcgcttttagagccaccgctgccgttgaactggataacggcgagagaataaagtgctggcgcgtgagaactaatcgccgccttggccatgagcgaggctccgcttcctcggttttgcaaacagtagaaacgaatctgagagagaaagaagaataagaagtggttgagttaatgccattaattctcttgaatgtttcatgctgcattcaatacaagactaattatgcatacatatatacatacatatatacatatatataattactcaccatgcccagagtgtaacaggcctcaacattcccagcttccgcacactgtttcaagaatcgatgagacgattcggaccagtttttggcattaactgagaaagtttttggtgaagctttagataacaccattgaatgaagccccaaaccgttaaatctcttgcatctgttccatgcaatcaaaccatttataaacgttaaaattaaaacaaaattcaaaaccaatcaaaagtcttaaaaaaaaaagggaaattaagaatgatggcaaaagactaattatacatacgttatcaatacgttggtaaaatcggaagggcaacgagcggtgttgctaagttttgcgagaatagatataacaaggtcatcaggtaatgagtcgaataaatcaagaccggtgccggaagaagaaatcttcggcgaaaattttgttcttttccgacaatcaataagattcccttcttctccgacgaaatcttttctcttgctaattactttaaccttctccaaaaaacattcctccaccaccaccaccacaaccaccaactcttgggtaacaaaggcctctccttgttctcatactggtggcttgttctttctctcttaatactctttacacacagagataaagagaggccgaaaaagagacccgaatccttatatatatataatagaagagaagagaagaaaagaaaacgaagctaggccgaaataattaaaaaattaaaatatataaataaaaaaaagaaaaggaaactaatcttcgttatttacaaatttacccctccacttatagtattgacggtcaaatggggttgaccagatctgttggttcgtgacggtttctatttggattttttttttttttaataaaaaaaatatatatgtgaaatttaatttatattattgtaagagtaaataaaaaaaatccttttgaacacaatgcactaaaagagggtacgttctcttgctttaaatttatgtttgttggtaacaggtggggtagcttcactctctctcatggggtttgtttcaaaagcggttaattttgttacaagtaaaacaaccaacttccgttattttccttcacttttactggaatttaccgtacctgatgaccaggttaaaattaatttagaaaatagtaaaaaaaagacaaaatatttaaataaggtatttgaatttttcacctaaaaatataattagaaataaattcttatttagggaacgtgtttgaaaatttttgagtggcaaaatagtaatttggttaattctctttcttctaacaaaccttctcaggtagcggattttgagctctctagacatgaccaacccatacttgggtcaaacatatgaatcagcacttgtttcagttatcttttgtttgttttacttgcctatgatacggtttttttttcttgtgtttattaagaaatatttcttttttgcgtaattaatatttaattattgaatttgtaaaaatagttctttgagctaagttagtgttaacatgcttttagtatgtatgactatatcaaaaagaaataaaatgtcttgcataaatgtatggagaatatttatatcaaaaagagaaaaagaaaagtttgtaaaatatattatatacaaatagataaaataaattaagaagttattactttgttaggtttgaaatcctgaccttagtaatggcattctataattatattatgtaatttctaaattaaagttgagttctcatttcacttactaccattaagtattaggcggggtttgcttaaaaaaaatgaaaatgtcgaaatagagataaaagtgagaatgaaattaaattaaatttaaattatgaaaaaaaaaagttattaaattttttctgatccttatatttgaatgattttttattttattttaaaatataatagtcattttattaaaatgatagaaaaattattctattagaatgatttcaatactttaaaatacaattaaacaaactaatagaataaaattacttcatttttattttattacttctaaccaaataccacttaatttaaagacattttcattgctcaataccttttataattaataagttgttattgatttaagaagagttttatttgtacattataaagttataagttcaccttaatttaaaaaaaataacttaaaataatttttaaagaatactctgaatatatttttaattttttttcacattatttcgtgttaactttattacctattttaattatgttttcataattattttctaaatgatgtgtaatatttttcttttataaattttatatcatttttttgtcataataatttttaatttgataagtatattttttaaaaatatgaaaagaaaaaaaaaacaaaataataatataaactaaaaatatatgtttatatcaaataaaaattattaaaaattaggtgcctttataaattttgaaagggaataaaactcgatcccttgctgtaattaatttttgggtccatatatgttatatttaataattattataaaaaatttctagttatttgcaaagcattatctcatgatagctaccactagcatcatttcataataggcactactatgcgtaataacaatgcataattcattattaattaatcaagtgactattatgcttctcttatatcctcctgagaattagggttattcatacagtttgccatatgtgattttaaattttaaccaattttgatcaaattatttgagacgagaactagtgaataatggtgtcaatagtttggtgaattcaaactgtttatgattctctagttcaatcatagttttaaaattatcattagtgattcaaaccaaacaaaattgtctaattcttttatatataattaatatgttgttttggatgtaatattgatatttggtgataatttttatgcattctagcactggaagaaactagattcttattttctaagtaatttgctaatacgccgatataagtaccttttattggcgtttcactagtgcatttcacgaactgtactagctaaaaatgtcatagtttttccagcacaaaattataccgacaaaaatagtttttccaagtgcaactagtttgcgtcagcattttgttcagtgtaaacacatttttcttggtactttttaccggtgcaaaaatgccctagtaaagtttttttgttagggcaataatataatgcgct

SEQ ID NO: 111005 - DNA, 3867 bp, Cannabis sativa
gaaatgagtcataggcaagaaaaagatttcgggcccttactataaaaataaattgtatttttaaaaattattaaaaaaatatgtatattatttaaaatatattttttttatttgggcccctaaaatgagtagaccctaggcgcaagcttagcccgccttagcctagggccgaccctacctatacactcaacacactccaacactccaagcatcttttaacttcagggattccaaataaagcttctctaacttcttcctttgtaatatccctaagcagcagtacaacttgttcatttgtaaccagtggcccctgagccatgacacttctcttcacatgtcttctattgctcattttccctcctagcaaacttttatagtaagcaagaaaggcttcagtcacttgttctggatcttcacatctggttccttctttagattcaatggataagatccggttttgtcttctcctatctttgatactagtgtagaatagagtagtgttgtcatcaccccctctaacccaactgagtttaactttttgctgcaaaaataaatacatttccttctgtgttttaatgtaagtttccttcgcttccttctctttaagctgcaaatcattattaaaaggatccttttgcaatttttcttgatagacaataagtagcattttcatgtctacttcttttgccacaatgtccgagaaggactctttattcaacttcttcaattcccctttaagcttttttagtcgagtaaccagttgaaacatctgagtacctttaataggcttctgccagaccttggaaacaatccctgaaaactgaggatgtgttgaccacattctaaaatacttaaattgttttttaccactaagaatttcagggtatatggttagcacaactggggtatgatcaaagattccctcggtcaagaaaacagcttttgaattaggcaacttatctagccaagcttcattaacaagtgcactgtcaatcttagaataaattctctcattgcattatcttttattacaccatgtgaaaaaatttccacttgctttaagatcttccagttggcagacctcaatgcacttgacaaactcatttgcttcattgtattttaatctgttaccaattctttcatcttcgtgcaatatttcattaaaaatcccctaggaccacccattcctcctttataaccatctgttgtaagtcattccataacttagttctcccctcagcctcattgtatgcatacacaaatgtagtataaaacttgtacttaccatctactgtagaaacaagtaaatgaataagttgactagtacatttaagaatacttacattgaaactgggtggattccaagccacaataattctccctcttttgtgccatgcaatattggatgtagagcaccacccttaaacatacttagatataaagcccctaacttctgggctttaacccttgtcttgagcaaaccaaccaaaccaattttatggctaagaatcaaattcttcactgctttttgtttctgttggtcattgattcctcggacattccaacttaggattctattcattttgaagaggaggatctccctctcctctagtatgatcatttgtaagtatttcatggcctccaattgtgattacttgaacttgtgtctttgtcttctcctcaacatagaaagaaggtcctgcttacatcgaaagagtttggaaggagttactggtgtgaacctcagtagctacttcttttcctctttctttcttaccattagtaacttgttgaaagccatcaacacaattggagctacggtccttttgttcctggctttctttgtttttttcctttcactatccattgctagttttttccttcttttttttttttttgcattcttcagtcgcatatgtcccaaccccttgcagtgtgtacatggccaatgatttccattcataagtaattgacaggttgacattcacaccatattcattcttaaaggaaatgttggctgggaagtgttgatgaatagagacctcaataagaactctagaaaaagtaagcttattcctctcctttgttgcagcatccacttggagaggattccccatttggccaacaattttgaatagtgattttttaccgcagtattttagctccaaatatttaacctgaatccaaataggactgaagtaatgtcctcttttttgaagttggtatcaggattccaagctttcattatcacaggccttttgttaaagaatacatagccaccattaagtattctatcccttgtttggattgagtcaaatctaactagaaacactccataagtgagcattccaaccctgtctacctctcctttctagactcttctaacaaatccatccaaaacaaatagaggtggattagcacctaatacatagcaaacaacttaggatctccaaaattcaatttcatcctcatatcctccaatgtaatcttaacttctggccgagtttcatgctttgaattcttaaaagagtttttcaaattcctcacaatactactagatctccatataagaggagttattatattaccttgagcaatggaggcagagcacatgcgatttgctgtaaggaaatattcaaaatctgcctgtatttcatcctacatcttaatttgcttcaaagatgacttgggagttaatggaggctgaaataaatcctcctactccggttccgcagatcttggagctagaatttcatcatcttcctccgaaaactccaaaggttcaatttcgagaacttcttccatcgtttttgttttccacacgtcacatcagcagtggatgtaggacccttcttctgttttcctaggttttttttgcatttaaatgcagcttcccctgcacttttgccattgtcttagccatggccccaactcgagttcaggtcgcaagaagagagagaaaagagaaagcctatctattttgtcatttaacaaaacataggatccaatcaacaactttcataaaacacaaggtcaaaaataatatttactctatatattatagtattggttgtcaaaattttaaaatttaaattaaatattattaaagatatttattaaattatataatatagtaaattgcatatatgctattatcatgtacactaactattatcaaccattacatactatattaataacttaagtattattaccgctaaaaattaaatttaaatatttatttactattaaaattaaacttattaataccacaaattacttttaaaacaatagtgacatgacaagtaatatatagaatgttatatgaccccttttgactaaatccaaatccaataatttaaggtaacgtagacaagagagggaacacagccaagtaaaacatggaagttagctataattaacacgtgaatatgtgcccactccccgaagtacttacaaaacactacatatatacataacaaaataatatatagttaaaagtcacgtacatatatagttcacatattcagtacggaactttattattatttttttcaaaaaagaaaaatccaataaactaaataacccctcaaaacatacatgtacgtgaactatatatgttcctacatgtacatgtgaactatatagttcacacatgtatgtttatgactaatatctttaattttgtaccaacctttttatcacaatatataagaatgatcaatgatttataattaattataaatctttcacatttagttacacgttttattgtgactaaaaataatatcttttgtagtgtcaaacaaatatggtcttggattattttacaaatacacaaaaatgacaaaaaaattacaaatgtgc

SEQ ID NO: 111006 - DNA, 6669 bp, Cannabis sativa
  modified_base (34)..(61): a, c, t, g, unknown or other
ttttagaaagtttatatttagggtgttaatcaannnnnnnnnnnnnnnnnnnnnnnnnnnngtaaaataaattccaacacacattgaattgaatgaatatgccaacttcacacagcacagcatgagcattgtggactttcaatgtcttcgcagcttatagcaccaaaatgcaaactacagcctattagcctaatggagactgaaaccattggccagcttttctcagccgagttccaacgttttgttatggaaacaaataacaaatttaactatcttctttcagaaataacatgattttgaatagagcaccctcctatgtcaatatcctatgtcaatatcctcttatatcaatatcgctattagtctaactaaatattaaatctcatataatttattataataacttctaagaaatatcactaactgatcgtaacgtgacataatgttagacaccattagtgcctaatagcaatgctcttttaaatattacttaaaaaaaaaacgaattaaataacttggttaaaaaatataaataaataacataaactaataatattttcttagaaaaataaaaacataaactagtaataataatatagcagcagttggtttaggttcaaaagcgataacaggttgatgaaaaatcacttaaaattttgactacgtttcctttcctttcattgccgctcgttgtagttttcttataacaaaaacagagcatatcttcttctttggcacttgaaccagatattgcgccatttcaaaccagaagacaaacaaaacccattcatggcacctataatattccagctgaggaattccagcccaattctggtcaaaatttgaagtatcaaaagttatatataatatttgaacattcactaatggtgacctataaaagcataatggggtttccatttgtaatgaaatcattaaaacattaagcactcaacaagtcatacatggaaaaggcgattggaacgggactttgcgttcagaagtcatggaaaagcatgagagcatcgtcaagttttataagtgatgactgcagatatatctttgcatttctcagccggtctttttcggtcgaccctgtacgtgtagctgactggagagaaaataactgaaaagagtgcagtgtaatagtattagaaaaatgaccacttcaaggtctgaactccatactcatcaacgaaacagagttaatgcaaggagaaatggtaaagagaaagaaacatatgtatgcaagtaacctaaaaaattaaaaaaagcttagcctttttctttaggacctctttctgttcttgctcataaatcaatctttggttcaaattcaaggctgcatgatacatctcgtctaggacatgatcccagagaataggcttattcactttccataacaagaatgatacttgtctggtagctgttacaactaatttctgcaaatccaataaattgtagttattaagaatcaagtaaattttataatcaacaaatctttgttccttgaaatataataaggcaacgaatatgactagctggaaacttgaaagagaaaccgaagcagatgaaaaagggtgaccaacttaaaaatagcctagagcgaatttacattttcatttgtttaaaatataaaataaaaaggaagtcatctacctccatatgcaagtactcatcctgccaaagcttattaagaatcttgggtgtctccttcttttcgacaaaagtcatatctgcaatctagaatgagaaacaaatataagtgtactatcattttctataaatgataaacatgtgaggatgcagaaatagttattaacactcgatgtgttgaaagtgctaccatgttgctagatgccactcataagacgtagaatcgaaagaaaaattaataataccttgtctgtctcaagtagatgaccagacttcgatagcaatctaaacattctgtaagcatctctcccatatcttttcaatacaatggattcaacctgcagtttaggaactgtgaataaaaatctataaccataactaaaatgacttgatataagaaattaaataaagacaaaatagacaaacctcttcattctgcgccaactcaattattttcttcaagtcttgagaaatgatgccatagaaagataaaagagaaaagtgaaatagttgattaaataaaatgtaactctcaaaacaaaatcagactggaaagtgcagcattaatagtaaattaactgataatgaagaaaaggacatgtaccaatgctatatgtctcatctgagggtgagcaaccaagctgtacaagagaagctctgacacgatcaagagtaaaactacgacctatttcacttttcatcacctcttcaaaaatggtattcatcgagaggggaactgaaaagtaatattataatataaaattatgggggctgtgtaagcagtagcatgtgttttctttttcctgaattcttacctgaattttcagttctcactttcttctcaatactcctagttgcatctaacattgcttttaaaactatagcagctccgtcatccagtcgtgctctcacattctcaatgcaagcctagaagacacgaatagaatatcagcactggaaaattatattcacaatatatatataatcatttaaaataaatcttgattgactgagtgagtgcatgaatgtaaacgaaaaaaaaaatgcaattgtgcaataatacccaagtatacctctcaattggcaattatagattaatacctaagtaaaaaaagcgtaaatacctcgttgttaagtgtctggtcagtctttgattggtccaggtggatttttttattttatttaaaaaatcatgtaaaatatttaaaagataaatcataataatattataaaattaaaaaagaaatcttttctcttttccttttttatcctagtcccccctctttttctctctctcccggtgccctccctctcagtagttcaagctgaagtctaacactaagcaacattaatctccagtgatttggaacaacaaaatgtcattataagcaaaaccaaccacaaaataacaagtaatttccacaaagactagctgaaatgggcacacaaagaaaaatagaagagaaacaaaccttcaattccatccagttgaagtagtccctgtcaaaggcctgaccatctctctctagttctctagacaaaggccacgaatgaccctaatgctcggtctaccatggatgtcgacaaagggagctcacaagagagcaaacgaaggaaagcacgggagaagagagagcagattatgtgagaggcagagttttgggtgttttcaggatcaaagatctcctatatggtgctagctccaatggacagtgcccagaaatggcttgtcgtgctttggcaaggaggacagagagggtggaggagagggatgtggattttggagactggtggactccgtttaggtcactggcgttgaaaacctctcattcgggtttgggaagagctgtcatgtaaggtgaagagctagagagggagaacggttgagaaagaaaacgggaatagaaaaaaaaattatttattttttaattttataatatttttaaaattgtttattttaatttttaaataaaaattgaaaatcaaataatttggatcaaaataagtccactgccagatatgcatctatttgtcatttaatagaaaaacgtgaggtacctcagttataacaaaattgtaagggaatatatttttaccatcaatttttttacatatgtattaatctaaaacttgaggtattatcgccgcaaattacttacttaaaaataataataaaaataataatgcagtgcaatttaaccttatgccgcagacatcggataaattcctcaaaatttactcgccaaagaattacttccttgtcctttgagccatgttcttcattcaactccaatgaaccatgtttcctctatgaacaagaaaatctcattttagtactgagtataacttttatagttaatattatgaacaatcagtaatgcaaaccttctccccaactgaggaaccagaaacgtcttcatctgcatcaaaatcagttccagaagttgccagatttgaaaatcgaagaacttctattggtgctgctgctgctataatgcgttgctcttcagtctctggagctccatccaactaaaaattaaagcaagaaacaattacaaaaatgcacttctacacagaaagattaaaatagcagtctaacttcattactaactcaaaataaaagcatacaaccaccaaaacataaatttaaaaacacaaacttggtgcacttggcgcgcacacaaaataaagcgcatgaataacatgcaaaaaaataactcacatttgaccatttaactaacacaaacaatcagttaccttagctgacttagcacctcttttatttgaactcttcgtttcagttggtggttcaagaaatggttcaggagccgggcatcgttcaataaaacgggcatttagaagtttattaaagttttctcgcacagcagcccgaacagtagaatctcctgaaggtttctacttaagtacataacatgattataggatattttctctgacaagaaacacattttagcacaagagacttacctcctccacttttgtctgatccagctctatcacatatttggtcaagtgttagcctcccgtgctgaatcaaaccctcaaaaatttcctcacactacaagaatcaacacaaaattacatcaacctaaagtgatctccaaatgaagaaaccttgggaaaactttgaaaatgagatcaaaagaactaacatctttatcaagctcttgggatactattgccaagaatttgggaaacctcaagcgatgaagtatgttactaaacacagctaagtactgggttacttttacttcatttccaccagcgcctatccgttaaaattcagcaaaacattatagaatgacactatacaaacatcacaattatatatgactcaacattcctgctactacattaaaaagttaagcacaaaaaaacaaaaacaattatatactagaccaacaatttgtgccgaacaaaaacttataaccataaaagtaataaaaaatcatagaaattcataattaaatttctatatatatacagaatacagaatacctatttgttcgatggagaaagcttgaacgcagttgtgttgaatgagaatgaggagggagttcttaacttgcagaggagtgagctctgtggaacgaattaaagattggagagttaagggacctcttcttagaagattttcacaaactttctgcatatgtgtgcataaaaacaaaaaatcagagtcatgctaaaaggaaaatgtacaattatataattatgtagaagaaaatatttacagcgacaagattgccgaagtgggaggtgatgaggtggacggaaaatttgatgccgtactgattcaccatgctgcctacttcccctccagtttctcagtaaaacaaatttcacacagaatagaacgctgaaatgggaaagcaaaagtgacttctagggcactaaacagcatttaattaaaattatcatcttggctatgaataatcttttcattcttatttttctatttttctttcttctaaacaagaaacaggacattgtattaaatcaaaggaatacaatacaaagaaaacatggtatcttaaaacgagggagcctgaaccttagtgctcctctttcttcttcaaagtccagacattcaaacaagttgaaaatgatcagttccttatttagttctaagaataaaactcttggaaagatcatgaaatatttgagaaaagaatggcaaacattcattttatcaatcagtctgatattgtaacattctttctgtttcatgtatgaactagaactctaaatatcaatgataatactaaaaaaatgatatagacatttccacacaaaataatcttggataaaagttatacaaacaaactcttaattgtcacgatgaggatataattagatacagatacaatataactaaaaattagggaaatcaatctcaacatcaaaactgaatacctgttgcctgttggagcttgaaggagtacccccaattgctgaaattcttgctagtgatcctaaaagaaaataaagtacccatcttcaaaatttaaagaggaagatcactactcatacttcatcaacaaattacagcaataaacacaaaatcaaaaaaaaatgattaactctacttactcaaagattgagtgaagcttataaataaaaaatagctggtggagattcatacctctgcagtcgtcgacaaaaatagagggaggccgtagctgggtgtgccaactgccgagggaggagtagttgtgtgggtgatgcggccgactgctgacaaagacaatagagagaagtgagaagtgagaagagaagtggagaaagagcgagtgaaggtgagaggcgcacagagataatcattcgtggcactacaacagaatgtgctttctacaatacacacgtgtcacctatgacactaaaaatacattcaatattgtgataattacaacaaaaaattatatttttattatgaaatattagtattatgtaatattataatttagagaaagaaaatagagaagagatgagaat

SEQ ID NO: 111007 - DNA, 1408 bp, Cannabis sativa
  modified_base (218)..(218): a, c, t, g, unknown or other
ttttactagtatatatatatatgcacgtatttttagttatatttttaatttttatttttgttatgtgtattttaaaatttttataaattaaaagaaattatatattattaaattttttaatttttttaaaaaataatatttaaatttttaaaaatttgaaaaaaataatataaaatttatatttaaattaaaataaataatatttatatttatatatntttatatatatatttataaaatttatattaaatttaataacagatatatataaacttcattttattaattatgcattgacgatgatagctaggcatagctatagatatgatagttattttatatttgaattttattgtatattattaattagatagaaaaagatataataagaggtagctatgcagagtactacatccattgtatatagcggttgttgaggagagcatgcactccacgtacgtacgtaacagatcgaattatatatgaaaagaaaaccctaaacgctattacttagtcttaccaacagtaaattttggtggaaaactcttgtctcttaataagaaatgtcaataaatatcaatgtatattcaatgaagttggttctccaatattcaatagctagctagtatatatatatatatagagagaaatcactatattgcaagcaatgacgaaaacccttcatcacaaaagtgagttgtgggttgagaaattaacataatttttaaaatcgaaagaagtagtactagctagctagtgtcatggttcttattttttttttccttttaattgtttaacatgcatgttacacacaatgttacaaaaatattatacatatttaagatatgaaatgtaaatttagacaactactcatattacaccacagttaataattaaatagtgtacatgattgtttctcgacatcacttccacgtggtagaatttacgataaggtaatcctatttcaaaattaattgatatttttttttttgaagaaaagcgtgctgttatataacataaacatagttagacctcgcggtcggtacagaataagttatcaggcatagaggatagtggcagagaaccaaacctctgaaaagaaaaagcccacttagctacattatgggctataaaattacattgtctactaacatgctgaaaactacaaccaataaaaaaaagagagtttcttttacaaaaagagacatagttctcaatctcccaacgagattccttcccattaagggcattgattgctaccctcgaattactctcaactatgataaacttaaaacctcgagctttagcttcctccaatgccaaacagcaagccatcgcttccccacagagagcatcatcaaactccaatttagacgtggctacccagatcaccttgccgacgtgatcc

SEQ ID NO: 111008 - DNA, 1335 bp, Cannabis sativa
aagttacgtgcgaagcacgtatacatagtttttttctgatgcaatgatacgataaataattgaacaaaaaaatttattgattatattttgaaattatttttacccaacaaagcattcacacataaattctattaaaatatccccaaagtagtaataaaagaagaattatgctaataaacaaaatcagtcatataaacgaagaaatgagattaaagtagaggaaaaatatcaaatttaaaagacgacattttctaaaattggtaaacttacaacatgtaattgattcaaactgtgaagatagatcgagaggcaaaaatcgatgggtcaaacgaaggaagggaaagagtcaatcgcaactcaattggctcaactgttgcttaccccagtaggcgcaaatcgacagaatttacattgagttcactaccttgtactcagatgcaaaagaaacttgttctttatgtcgagcaaaatcatacaagaatcttctgtagtcctgcctggtacatttttaactttcacttcctacacacacaactcaaactcttttaattaaaaataaacaaataaaagctcaacaatagaacctctaaattatagaagaataattttcttgcctcctcatgagaggaaccactttcttaatcaaagctatcacttgattcaattttttgtttaacagtagaagttggtacatttgttaccttaattttctacacgcaatcattttatttttgtaaaagaaaactatcaatagattatttgaactatattactcagcagaagtataacactgaaaacatcaaacataccttatttacatcaaacatacctcatcaaaatatctctcttcttcatagctttcatctaaataatctttcttggctgctacagcaggagctttctatgcttgtggaacaaccttaccatatctaatcaactaatttcatgccaatcacaaaaaattgtgtttgacagactctaaccaaatagatatcagattcaggtagaaacaacattaatgaagtaaatacctaagagaaacatcaaaagaagaaaattcaaggtactgccatcgcaaatggcgaaaagctcgtgttgattctccaccattttattgatcctaatagaaacctcctcttcctcatcttcaacatccccataacgacatcgtattattcgtctccattgtcctcctcaagagagtttccttgtagctaggctccaaataacccttatgcgtatgaatagataggaatgttggttaattcaaaattcaagatttttctaaatctatttgtacctgttgaacgataaaattttaataataataataat

SEQ ID NO: 111009 - DNA, 6675 bp, Cannabis sativa
  modified_base (6635)..(6650): a, c, t, g, unknown or other
aaaaaaatatattccctttacaacaaaaagatgaatatatggtaccctacatcatcaacttctctaaaataaataaccatttgatcaaacgatagataagtgcaacccaagtaaagggatatcatatcttgtttatcataattttagacataaaacatatatggtgtaaagtagttcaaatgttgcaaaataaataaataattgaatagagtagttgtaacttaaaagtttagatttcattcgtatagtctgctaaatatgggcacccaagtccaactaggtagcgtaagtatgaattagtgattaggtgagattgacacatttatcatatttttatatcgagatgtttatcttcattattcggcaggacctatattgctcattcaatcacatattaatttaatgaatttatcccacttgctaattaagcctatttttcattaaataatgaacattatctcacgttttgtgagtgggagatattatattaatatgaaactaaacaacaatactttgagtgcggaaataatgaatatatatttacaaagattgatattgtgtaccctttagctattgatgaatataagttacattaatatggagatctttaaatatgcaaaattaagtatttatcgagatttttgaaaattaaaatatttaagagttaaaaaaaaataaatggagaatattgatagaaaaatgttttatacgtggttcaggtattaataaacttaagtctacgagtcagtttattagttttgatggacaatattgatgaatttacagtattatgttaaaaaaccctaactctttcctcttaatttataaaagaagaagaagatcaaggataatttagcagagtttttgctatgtatttttagcttgccctcttttcatagaaatgaaggggaatttatacttttgggtatgggtatagatcgccccacccatctaaaaattctgcttaaatctcactattggggtaaattacatgcaatgtaaagttgattgatcgatctagtgggtagcattatgcccttgcgtgttgcggctggataatgaggacaattttgtactatttggacacatgtcacacaaaagtttaacctttaaaagtgaaggacacatgacactcaaaacttgctccattatgggtagaaatcaattatgtccgcttggtaaataagagggtggtgatgcgtgcactaccatgctcgagtgcaggggacaagatctgattctgtcaggaaaagtataactgacacttggtgacctagtgtatgcggatgttaaccacaagagtctctctcccagacccttccgagtccaggagggacatttctcatcctgctcttgggaagcacatgctgacgcaagtaacctctcgtccatccccttactctggacgactcttagttcaggaagacctcccaaccgtatcttaggattctaattacatggagatggacatgcgtttcttcctttaatgccatgtgtctcgctctataaaaatgtagataatatttaccctcaagcttttaggacactttgtggtctaaaagcttgcaacactcttttgcttctagtggggaatctcagacacgtggcgctggctaaattcgtagatatatcccatgatttgccaacatgcatcggcatgataaccacatgtgtcatttgtgtggtccacatgcagcgcttctgatttatctgctgacgctgcatgatcgttgggataacattcctttagtaatgatgacatgacaattgaggtgacccctcaattaatgcgtacaagataaaagacttgtttaaatattctggtcgtacattaaatgcagtcattttggttccccatctgtcggatcaaaggatgcttttttgggaggaaaaatttgggttgtttgttttgatttcccaagattgtagttggattataaatagtttccaagaactcatttttcctctttccatcacccttactcttcataatccctcctctaagttttttgaaccagagcttttatttttcaagcacttcttattacgttgcctccattaatggcgaatgtaagaggcattaaacaaccttactcagtacttccataatcttcctcattttgttttccaaatgttgaacccctaaatctaactgtacttcacccccaacatgaaaaaaatttgacggtcaggtcggctacaaccgtttgattgactgggttcaacattcttggacatatatggatgacgaatttccaaactctatccaaacaccatgtaagttctctaacactttgttgaatttacactatgtcatgtttatgatatgaatgctaagctcaggctaggtccaaaacgtacggaggtcttgatagatcactcgatattaggagaaacaagatttttgtatgcagaatctttttccataagcattttggtcgtgtagcgagttaggatgtgtccaccagtaactcgtaggttttacatgccgataggaatttaaggttagggctgcacggagaattaagattctcgaatgtacttctgtaaagttcattcttttaggtatgcagggagttgtgaggaatccactatggcccctgctttttagagtcatttgtgtcgatgtcattttcggttgtttctgacgggttctcaactggtcatttcgagtctcttgtgacaaacttgttcttggaaacggtgggatccagtggggacctctccatacaattttagaggagccttccccgatacccaattcctcatttagattgtgggtatttgattgcttggtgtgcttttttcttttgtcagtgatggatttgaacgaagagtatcaccttgatgtagtggagattgaagcaactctgccaatgttcttgatggaggaaaccacttagggaactcaagaggggattcttgcagagggaaaccaattggccactatcctagaagaaagcccatctgacacccccaaaaagtctaatagaaaaaggagagttagggcttcgccttgtgtccagaaggttaatgattccatttggaagatggatcaaaaagaaaattacttacgctcgtacgagatgcttgagtcatatgctactggggctggactactctacattctgcggctgatgtggcataggatggccactccggaggagtgtgcctccgtgagcacggatgggttcagtgcctggagttggtctcatatttaaagcgagttcacctcccacttagacattatttcatgtatttcatcgaccgcattggaatagctccttccagctaatacctccatcctacaagctcttggttggatggtgtactttttgcaaaatgaaaaagtttgaagtgccctccccagaggaaattttgttttttatgcactgaagtctcatctaatgaggactaattgtaagaaattgggattttataagcttcataaatactctggcgcgtagtgtcccaccatctttaccaaatgcacccacaatctcaaggaatattggtttttctctactggctttccaatgaagagggtgcctactctccacctcagtttccagctcataggtaaacattctttctcctctagtgtcttaattcatttttctctctcgtctactattttggttcaaatgctgagtgaactgctctattttttatttcttttaacagattttgttccccgaagtgccgagattgaggaaatgatcaaaaagaaggctcggtataagactttattaaaccagctaaaagtggaggagtttgtcactaccccattactttggaggcatggactcattgtggctttccaaagcattgataatgttagctacaaaggtcatagtcaaactcctaaggattttagggataaattggcccgtgatttggccaaacttgtcatggaagctgccaaggaggatcatattctagaagagagttggaagctctgacattcaaattcgttgactaaggctaaggagatccaggaaaggtatgctgcaatctatcaagatgaaggcactctgtgggccaacacttttgggagaggtaataggcctttttgcgtcttgcatacccccaacctccatcatattttttagttggatcaagaaggatttgatagttactttttgaatttaagtcatgttaagtgtctaatgagcaaattcatagatagaatagacgagattgttaggagtcctagtaatccagagttcccttagacaatattgtagtggacccttttcaactatgtcctttccatcctttagagattatggcagctttgttggctggacagacatcactctctttgttcgcggggaaacttatagccactcagtgaatggttgcacccacatgcacacccttctaagagtatttggtttgaatgttgttcataattttgactttactgttctggtattggtttgctaacatgtgcttgttgcttttgtagagactcttgaggcaaaatgctgaaaaattttaacgataagttggctaagtcttttgccaagatggggggaaccaagggattaggaaaggttaagtccagggcttcctggattcaaaagccaaggcctcccttacctcttcttctttggatgttggggtgatatctccaccttaaaaggaaaacactacaggccccacccctactggttccacggagattgaaaaagctcttggtatgataggaggggtgtccaaagatttggttgccactgggagtggcgcgaaccaagtaggccatccaagacagcaggccctagcgaatgctccattcatggaggaattagcccgtgaagagaaagagaacgctaatgcctcaaaagatagcttggatgggcttatgtttcccaagaaaggtgtttctgagaccctaaagcgtaagactcctctgccactgtcttatagggtaactaaaaagcctaagtcccatacgattaggtggctctctcccgggggaactggtgatctccaaggatcctctactccactgataccaaatccaccaaaccaacaaaaacaattacaacaaatctaaccacaacagcagtagcagcaaatccaacagcagcaacgacaaccaccaacacaactacaacaacagtagccgcaagtccaacaacagcaacaacgataaccaatccaaccacaaaaatagtaccaaaatatccaacaacaataacctcaacaaagttaccattagcaacaataacaacgccaacaatcccaacaacaagaacaattggtgggcattgtttctgccaagggcagaccctaggcagtaacagagtcaaccactttccaccactcttctcagggttcctccctaacttttaattccctctaaagcccaaggaccctggtaggagcttttaaagcaactcaagtctgtagagagtttgttaagaaggcgctatggcaaagaaaggtccgtccttccaaaaagggttgacaatctctcagccgtgaagagagctgagattactgagggaattttcactgctactcccgtggattctatgattgacactaaggctttgagtaatcgactgatgcccaaagtagagagagaagttgttgtctttgctgccgagctattagaccaagcggctatcagtgcaagggagttgacttcagataagtgggcatcctacaacagtagtgacttattgcttttgcccatggaataaagcaacaagctataggggtaagtcctatatttttcccctctctctttctttttattccattacaattgtgtgctgcaggctcatgtttttgtgttgccaactgtctttgacagtcgagatgaccttgaaagaggttggagaaatggtcgttgagcttgacaaggcacatgctaagaatcagtctctacaatttgagaataaggcactacttgctgaagtcgcgcaaacaagtatcaaggtctcgacactataaacaaagtcaaggcagatgctaaaggttggattgagcaagctacaatcgagtggtaggtgaagattgatgctgcagacaaaaaggccagcaaaaaatactgggtgctatttgagaagtataaagccaagttagattagaagaataagtcagagctagaccaacttaagatccaagtgctctctagggtgatatccacacgactaacctggtaaaggacaagcttgaaatgtagcttgcagacaaaaatgctactcttctttcttcattagaccaggtgggccctttacaaaacaatgtccccaagaagggactagtgatcaagggcaagttgacgatttgcataaatatgtcaaacacgtgacaaatgaaaaggactcctggaaggttaaacatgagcaacaagttataatcacctaaggtgtttgtgccaccagtaatgctcccttgaacactattcaggagatgaagagtaaaatttcccactaactggccaatgggagtaaagcttttattgttttaagggccatgcaaagggctagagagactgctaaacaatgaatccgtgatgctatcaactcagtgactcatgataaaacaattcgtcttcgatctattaacttgtcttacgtattgctcctacatggcttgtgttgaccgagattttcggnnnnnnnnnnnnnnnnattataataaagagctgtaagaaag

SEQ ID NO: 111010 - DNA, 1718 bp, Cannabis sativa
  modified_base (1586)..(1588): a, c, t, g, unknown or other
tttttgatagaggtcaactcattgcgaggtggttgttcttttgcaacttgtgtgatcacccaaggaattcactcaattagccatgttcttcaatttggacctttcacttgcgactctttcacttagctttggttattttatagcacccaaccttatgtgagtttcaagcttaatgaaatcaatcaccttgaggacaaggagaaacttggtggcctgcaatgttaggccctaagattaatatggtgtgcaagaatattaaattaaaaagggtacacgagtctttgtttgggagggtaattttgagagagaaattactatgtataggtgagtaagagaatggagtggatatgcaatgtattgagtaaaattctttgcataaaagggtcctaaggactcctatagtttctaatcatttttctcatatattcaatatcaactttctcgttctactccattgttctactattgtttcattgatatttctattactttgttattgtatgtgtattttgctactggttaaagttattggcaagatgttcttatcaaatggtatcagagcaccaattatggttctctactatagtgctattgttgccattatttgacgaagaggatatgtttgttgtgtctttcacatagaagactatttccgtgataattaatttcctaagagagaaaagatacgggctgctaaaaaatgtctattgggtgttgctcagatatggtttcagatggtaaagaaggaagattcgatcaagcacggaggatgatccatttgattggttcatggctcttcgatatacaaactcgataacgatttttggactcggttcgatctgattgcaacatagttgtcgggttaccaataacttttattcgtgaattattctttaaaaaattgaaagcaattaaggtacaagaatataaaccacgtacactctcgaatgtgattaccaaagctctcatagtggaagcacaattaaagtttcaacatcaaattagcaagggaatgaaggatgtagaatgacaagctacttgtggatcgtcttgatgctcaagcaaaaacaatgcaaattgatgtgttaaataacaactctcaaccaaatatttactctataaaaataaggttgatggtgaagattattttgtacaatcgagttatgaaaagcttgttggctcatgtttctccatgcttaagcacaacaatgagattagtaggatagcaaaaaaattcatcaacctcctttgttctcccaaaaccatccgtcagtatgagcttcgaccttcagttgatggcttccgctacattttacacccaattgcctaagtttgaagaagatgagcacgtaagtcagtggagatgatttcaaccaacaaacaagaagaaattacagcaaatcggcaacaaactccagtgaagaagcccaaagcttacgagatggggttctcaccaataaaatggacattctcgaacttggagaagtcgctgcaagtcgtgtctaacgtcaacgccttcgttcagctagtcttctccaagggttcactaaagggattatttcacaaatacacaaaaacaacaaaannnttacaaaaatacaatttcacagaattttaaatattttcacgatttttttatattatttacataaagtacggtctttttatgttatactcttgttaatttattgttgatttttttgttatttgtatgttat

SEQ ID NO: 111011 - DNA, 3297 bp, Cannabis sativa
  modified_base (3184)..(3209): a, c, t, g, unknown or other
  modified_base (3258)..(3268): a, c, t, g, unknown or other
agaatagatgagataggggtatataattatggaaagtgtagtaaattttttattgttgaataattttattaatattttattgatatatataggtgcatgtaaggaataaaaggtgaataattctcatgaatagtagtacttattggctcttttaatatatgtaggatatatatgtttgcacattatgtttatggcaataaactctttcatcaaaccttttgtccctattggtttgttttctggattttgtaaaagggttttatgtctcaaatccatggtgaagaaaacatgttcaattgaaataaattccattatcacaatccattcccattgcttatgttataatacatcataatcttataacttccaaatctcaattcgcacaataaaagatgacataaaatattacaactagctgcaattcttgaaacacttccaaatctcaattcttgtaaaaacaaaccaattctcgttgatttaaatatacaaatgaagagatttcaatagacttaaaaaaagtaatgctctcagactagggccaggtttttccacttgagagaatgaaaagggaagtcaaaaccatcttcaaaattaagacaaaaaaaagtcaaagaaaatccaaacatagaagtgtttggcaaagccttcttctcaatctctaaaccaaagaggcaaacactaaattaaagcaatctgcctcttttattagacaaaaagaatcacaaagcaaaaccaaacacaaacaagtttaggatttaagtctttctgtgtcttaatccaaataaagtttcttcctttatccctaatcctctcttttcagtgtggttaaagcaaaatcaatcatcatcgagcaaaaattattattaaagatttgtttgggcgatgagaaaatgcgggacctacgagaaagggcaagaatcaacgattagagagaaattgcctgtccgaaggtaccaactttgagattcgatttcgcatctcatctcactctctttgctattattcaattgtatcagcagagagatttatataatcagatatgctattatgcccgattttgaaattgaaattggggaaattagggttggtaaatgaacacttcaagaaatcaattaaaataaagagcaatatctaagatttcgaatcgaagtttttcttataaaaaaataaaaaccttaaagatataaatctcagtaattaacaacaacccgaatcaaaaaagcaaaaatcaaaaagacgagttgatgagtcagaaatctcgtgtggaaattgccgattcatagcaccacccagaaagacggtgcgtcacttggcatgtaagcgaatttttcatcattcaaaatcgagacaaaacatgcattaaacaatcgaaatatgaagcaaaacacatactgaaagcaaataagaaccctagcagttaacccttgatttgggagagaagaagaatgatttatataaagaaacgaacttggttgccctaatgattgttatatggaagcccagtgaatcttgggcttgggcttgggcctaaaactgttatttcaatttgttcttaattgagagaaaaacaatataatggtatttttataagtctaaaccatttttgtttaaaacataaattctataacttttattttttattttatttaagtcagctttaggtctggagttagggccgtggtttgagtccgggactgagatcagggccagagtccgtgtcttaaggtccaggttggggtcaaagtccaagatattaattaagaaaaaaataatttttcttcgattcgagtattggatcgctcactcctaataattgaagacgttgatggacgtttggtgctagatatttaccaaattgttagaccaatatggtttgtttgacactcattacatggtgatggtccctcaaatgacagcctccgcaagccaggtcagaacgttcgactgggacctcatggattacaaagttgtaccacagacaaaattgaggtaatttgacgagattagattttttttaaaatgtgttttctaattaaattaaattttttattaatgttctctatgatttactaaattgttttgtttaactattgatgcagtttcgattgcaaaatatatgtcatagagcatatagagcataagatattagatctaccatttttttggagaagatgatgaccatatgccgctttttagataaagatgtaatgtaagtttaatcttccataacttatcatgaactttatatgttttttttaattatatttcttaaagaatctttactttagggtttttttgttgaacaatatgttatcaataacagtcagttattttttgggatcacattcaaattatatcgtaaattattagctttcatttaaaaaaaatatatatattaatcactcaaattactcaattttttttaaaaaaattgaatagcccgatactcattcgatgttggccccatatatgatccgataatttattatggccaaattactcaattttggtaaaaccttttatggatggcccgatagatggccgatggggtccgatatatggtatgacagcctatttgctcaattttgcaaaaatatttttgaatggtctgatactcgtccaatgtaagccccatatatagctcaatagtttgttatggccaaattacttaattttaaaaaccttttatagatggcttgatagggtccgatgaggaactgatatagggtttaattgggccacacaagatataagttgatcccaaaatggcatcagacctacatcggacttgcatcaaaactgcattggactagcaacatatcggacccccatcgggtgtatggtctgattgggccacagaagatataagttgatttcttaaatggcatcgaactagtaatattttataaaggaaattttgcagtaagtaaatgaaaacgttttcatgccacaaatgataataattaacaaagtccaataagaattcaataacaatatataatagtacaacacataacaatacgactaaattcaacaacaatttttaacctcagtatgtgcaagactttttgttgtgccccttaccaccatacttactacaagttcgttttatcacaatctttttcaccattacaatcagttatgtttgtcttaattcttccaactttttgttgggttttgtgcnnnnnnnnnnnnnnnnnnnnnnnnnntcagatttacttattaataaatatcagaaataatattttatgttgcatnnnnnnnnnnntttatttcatgattatatacatataatgt

SEQ ID NO: 111012 - DNA, 4457 bp, Cannabis sativa
aataatattttttatcaaattatcaaacaatgaatacatgttaaggatttatgttggcttcaactattattagctatgttttctttaagaagagatttttggttttggttgtattttaattgttctaaaataaaaggtacattgttcttaagtaatacacattaatttattctatttgagtgtctacaaaaaaatactttctatcaatatatataaataccaataaattgataatgatctttcattttttttaaataatgaaaaatataattattataattaagtattggccatggtggcctggtggggcttatgctttgtcatataggttcaaaaatttgatcgaactaatatatagcataggtttacctggttgggctatgtcaaattataaattgtaaatagagttaatatttatttatttacttttgataaattaaacagagttgataatcatcctcataatatatgagctgaaattgtagtaatcatcatcatcatgtgtcgacattggtaaatagagttgataatcgcttaaaattgtactcatcgtgtcaattagtagtctgataatagagttagtatgatttaaagttttgtgaaatttacagtagtttcacccatattttctcctagctgtcgataaaacttagtacacataaatgaaaattaaaagggttgaaaaaataaaggaactgtaacagtgaattctatacacccctttgaaagtatttcttacatgggtcagcagaaggggctgaaaaatatgcatgaatttctatatctgattctgattgcaatagatcagaaaaagaataataattatattaaaaaataatggtgtgtgtgttttgttttaataatttacttgtaattttttgtggggctaaataataggtgatagacatgataaaaactcatgccacaacatcgacttgtcttcttgtcaatcgtgcatacaggccatccttgtgaagaagctccttgtgattgcccatctgtatgtgaagccacaacagaattaagccatttttttgaaaatgaaaaaacttattttcaaaataataataataataaagaaggatagagaaacaaacctcgactactttaccgctatccattactattatccgatccgcagcttgtatagttgaaagcctgtagatttgggtgtggagttgagaggaaatgtaagcaaaaattaggacacaaaatagattattaaaaacatacctgtgagctataattatgacagtcctctttgatgccatgtcacttctcatggagcgaagaacaccctaaaatacatttgcaggtaggaattagtagtgaaaagaaaatgtggaaggtcacatactaaatatgactggtctcttttgccaagttagtattgtaccttgacattgtgctcactttctgcatcgagtgcactggtagcttcatcaaggattaatatggatgggtccctaagaactgctcgcgctatggctattcgctgcttttgccccccacttagtaaatcatcatcaactaatgttttgtaaccatttggtagtgctgaaataaaatcatgtgcatatgcctgcttcgcggccaattcaatgtcctcctgtgttacatttcttgtacatccatatcgaatgtttgaactgatatccatacggaatagtttgggttcctgttaaggtcttgctgtaagataacagcgagatgccaaataataaaattccattaatgctggaagcaaaatacaaacctgtcccacatatccaattctttccctccaccacttgacatccaactttcgcagggaaataccatcaattaaaatctgcggttaaaatagcataaatactaataattatctacacaagctgaattaaaatgcataaaaatatagatagtggttgatgatcatccttctcatactctacattgaggtctcgcattaggccatagttgcaaaattttatctcattaaattaaaggaaggaaacttgagaattatatattgtaataactagcagagctcttgactcctcttttttttatttaaatactccatatatataaataggtatatcacgatctgcactgcacagaatctttatgcggaccaatattaatttatttgtttgaaaatcatacaaatttgctcatgtaccagggaccagattcatatgccagaaataacttcatacattctttttgatattataggcgtacagggcccgaacaaaaattacctcaccacttgttggctcataaagacggagcaaaagattcaccagagtgcttttcccacttccactaagaccaacctaataaattgtggacaagcagtcagtgcttatagtcagcaaagaagcacgtgacattgacaatgtacccagagaatatgcattttcttaccaatgcaatcacttcattaggtttgactgatatgttgacatgttgtagtacaggaacctattcaaacaacagtttgttagttctttcaccataagaatcattaaggttgtgtttggaagttggattttagtgggaaaaaaaagttagaaaaatgtagggaaagaaaagtgtggatgttgtggaataatataaaaaaaaaaaaaatcaatatttaatgtttagtatggaaaattgattttattttgatttttattctccacacttcttttctcctacatttttcctacctttctcttttcccaccaaaatccaacttccaaacatagcctagaaaaaaattcacaatcatacatcaaagatggaatcagcttgccagtaacactatcatgttcaaacaaaccatgctattacttgcaaaggtatgatcttatcaaattatgttctaagcccgccccagtaaactagctctaaagtgataaaaatataataatcattgcaacagaaagaatatgcttagggaggaaaagagcaaagtcgttactaattgctcccaataaaatattccaatcacttcaatagaatgttgatggaccagaggtttagaaagaaacagtcaagactcaactccagcttaataattgcaatctaccagcattcacgcacttcattttggtggtaaaacatttgcaacgacatcaaaagtatgtgacaaatcaaaattaagatagtgtaattttcttctagtactaaggcaggaaaattaccgttggccttgaagcgtaatgaaaagatacatttgtaaaatcaatacacccgattagcttttccagcgttacacctgtattgttttgtttattaaaccaaataaatcatagaatattttcaatgaaagaaaatatatgcacacacacacacaaaatgtctctgtcttggccaagtagatgttcatatatcaagaaagaatggaaaacaggtaattcaaagtaacatgtctaacaggtaagaggtgaaatatccacaaaggtagaatcacattctggacaaaagttaacgaaaagaagaacaaagataaaaagagaaatcaaagaaaacaatgaagttataagttcaagatgaaattatataactgcaagagaatttgcgatgagtttacaaattggttaccttcagatataaattggtcactaggtgatagatccatcaactggaagactttttcacttgcaccaacagattgcatcaaagaagatagattatcacccacccaccatgttgaataaatcaaccattcgctgtataatataaactttgtaagttgctctgctgtaatatgaccagctagaatagacatgcctcctaccagcacagcaataacctataaaattaagtttattcagttaaaatttaaaagatgagtcaactgctataaatttcagatttcaaaccaattttcagcaaagaacaacgggttcccatgataccgcattttggtcctaagacatcacagtgtcacactgtttcatcagagctgtcctcttgtgagtgtatttttacaaagcttgtttctattgaaggtgctcttcctccatcttatgagtctatttggaaataaagtgctcctataaagattaaattctttagttggccgctggttttggacaagctgaacatcaaaaggttctacaaggtgtaaaccatcgtttacaatgtctccaacttagtgttttctatatactaattttggcctcacaattgttgagtgtcaacatttctcaggaaggtttggggtttaatggcactgacggaataaagaagaagctgtggaatgttactgctttgattgtttattggttattatgactaggagaagcccggatacagaaacactctagaatatgattaaataccacctcaccctttggatccttgcaattctagttcaatttctgaataatgtagcgattggattacgcggatgaagctaagatgataccttgccatcatctgtagtctttttacatcataatatttttttttttttaaaa

SEQ ID NO: 111013 - DNA, 2696 bp, Cannabis sativa
ccagacatgtgaagaatgtaagctgatatgttgatgaagcacactctgccaactttacgttgtttcatttgggaactaattatgagttgtaggctaaattctgtaacaaccaaaactaaatgattcaatcacgtccactttcacatgcagggctgcgcttacgttgtacagtcttttgtagaatacattgtaaatcatgggaaagtgattatgctgttggtggaggccataggtgcgtgctttgaattttctagtgatagttttgtctctattgttctttgattgaagaaagttagaaaaagatccatgttttgttaattgctaaagatatgacgaatacaattgtcatgttccaattgatttgattttcacttgggaccggttttcatttttcttatttatttttgtatgtctcttctctgcaaggtaagaagggaccgatttattatccaaataatgcacggccctatatctattttaggaaactacacttgcaaatacaaagtcaaactctaactttgccaacatgtccaaatatgcttgaaacatttgagtgagaaatatatgattggttttctctatatttttatagaaaacaaaaaaggagtagaagaactcattcaagtcataaacaagctattgttcttatacatttgctcacgttttatcacaagaaaccatgttttagcaccctcaaataaagaaaaaatgttgttctgttacaaattttagtaaatgaaagtttgtaacgagctaaggatggctttgttgcatgtttagatgtttaccttttaggaacagtgatgctggtgtttggaatgggtctgtacgagctgtttgtcagcaatcttggtactgcaaagtcactaacagaggaaaaaggtccttacgcatcaaatttatttggattattcactcttaaggtcagttttgaactattattgggttgttttggattggtcactgcatatagatcattatcttgcattatttattttttcagttgggtaatcaatgtttatgaattgtatcttacaggaacgaccgaagtggttggatataaaaacagtgaacgagctgaaaacgaaggttggacatgtaattgttatgcttcttctaatcggtttgcttgacaagtgtaagaaagcttccatcaacactcccctggatttgctgtgcttctctgcttctgttcttctctcttcgggttgcctctttttactatctaaactcactgactaactatccataaacgatttccctgaagacatttacttttttatttcacatctgaatatctctttctgtataagtataaatgttagcctttaggtagcgtttttgtttactaaatgtggttagtttctccgtgtggtatacaaatatataatacatgtgtacctgtatgtatattattcattacaaacataacactaatgaatcgcattggacttgttcgaggatcccataagcttccctaagaattctaattaattcccgttgacactattctcctatatatatactagtagaaaagtcacgtgccattaacagtatattattatacttttttgttttcaaatatattttgaaagttctagtaattccgaaagttaagtaattgattttggtatgaattttgatgaattaaagttagaaagataaattaatgaacactaaatttacaagttctcattgtattggaaatcaaacaacattatctaaaatgattttacacaagatctacttaactcttgaatacaatcaagaacacggatctaagctcacttagatccaagaagacaagctccacttgctttcaccaagttgaaatctctccagcagatcagtctgaactcttttcagacattgtaaattcacactccttcaacctttaaagatccaatgaattacgatatgcaagtcataatcaaagaaacagaggaaagtattttgccctagattcactaggagattctatcaaaaaatagagagttagttagaaagagtaatatcagcttaatatatctcatacttcggtaaaaccgactcaactaactaactcaacaactcaagccaggtggccccaactgaactgattaaaagacaaaactaaaaagctaacctagcaaacgataaatgaaactagactaagcggatgcaactaagacaaacttaaataaataacccaataagccaaatagcaactagaacacaatacacttaaaccaaaccggtaaaaagcaacataatttttcatacaaaaaacatggcacttacaatctctcccttgacaaattatgatcaacgtccaagcacaatattcaggaagagagacacgaaagaacaaatcacataaaaaaaataccaacaatccaaaagataatatcaagatagtttatcaattgcaaggttaagttcaacagacaagaaaacaaccagacaaaaactaacccaaaatatgaacaatgtttagtgtatttatacaaaagatgaaacactaaatctccccttcgatgatcagaattagtcactgctagaataggcaacaagagacagagggaacatgtactaaagtagcatcatcatcaggaacaaaggagagaacttgttgaacgataaaaaaaataagggaaagaagaggaataaataaatttattattatttcattattggttttaaaataataataataa

SEQ ID NO: 111014 - DNA, 4377 bp, Cannabis sativa
aaaattaaatgattctgattccctttctagtcaatttagtaaacagcataataaaataatgattccgattgttaaattttttattccttttgatttatcccattcatttattctgatttcaattacaatttagtaaacgtgccattaaatgaaacaattccatctttttccaaaacaatatcatttttctattctaattatttaaagtttaatttatctatttcaaaaaaaaaaaaattaattagacccacaaagtgtcttattaacaaataaaccctctcttttcttctcttatcaaatttgcccttccgtagtaaaaattcatatataagacataatcttctttagaattctaatggatttactaaatcaattaattgagtctataatgcaatattatttcaaataatgtggggaccatgagcctatgtaaccaagctcctaataagcagttcttgaaatttatgaataaatttcttaaacttattaattccacctaactctattatagatttagaattgcactctgattacatagaacactctatataataaatatagatacactataaattatccagtatttcaatctaaatagtcattgattctctatagacagttaacatcaagtaggaataaatttaccattttaaccttcagtgtattttatccttaaaatatttggctatttataaatgatatttcagtaaactaatataattaccgaaaataagagctcttccatttatattattttagtcaagctctaagaaaatcactgtttcacttctaaatagttatagaagctatagattctatatttatgattaatgctcccactcaattacactaccgaattcccaagatataagtatgggctaatcttacgggtaagttggtaacgaataagtcaaaaaaaccatatagtataattaagctagagtctaaccatctcaggattaagatcaatttacctaagatcaactaagtcacatcgacttaaaaaatataatagtaagtttataatatattttttattgtcaatttcagtctagtctgatgtatagccgatacatctgatacaaatttactttgctaataccttgaaaaggatattgcacttatacaagtgtaattaaaacacatcattgattatcacatcagtataaattcagtgcattgataaatcgtgggactaaataatttgaagtatataatcataattattttctactgtgttgaaaacaccataatcatgagtaacaatttgtttaggatttaataaagtttatatattaaacatataatcatgaaagtaacatatgaaccatgaaacataaaatgatttttgatcttttattaattagtagataagattatattgaaataagttttatttaaggcataaaatcccaacaaaatccccttattcgagttacattttaaaaaccataagactaaggtcttaaacactcgaatagggtgatgaacattaaattgttcgaatgaaatgatgaagtgcacaaggaggaactcaaataaggtattgagatgcacttcattcgagtgtcacatagaagacaataagtgactcaacaaatataagattgaagtacacgctcgaatagggtgttaagtctaaccctaatcgagtatgatatgaggatttgaaggcctttatttgaacaaggtaccatgtttaaccttgtttaagtataggttagaaatcaaaacgagaagatcttaaataaggcagtttgtttcatcatgttggagtatgaaatgataaatccttatggttttaagtgaactacttgaacaacatggcatgattaaccttgttcgagtagaataaaactatgatgtgatccttaaaccctagttactcaaagagagtatatgtttaaccctggtcatgtagtgcaaatggggtttaggttttaatgctatttggtgatccaatataactcaagcttttaccaagtcccaagattcaagaaaagtatcatcatgaatcctggtggggcacaatctaagtgaaattcgaacaaggtaatgggataccttgtttgagtatttgattaagttaaagggtttgaaggtgttcaagataacttctaataacaaattgatgattcacacgaacagggtagaagctttaaccttgtttgaggatataggatcattatggtttcaaacttcatcagaaaactacaacatgtttcctaagaaatagaagcttctagaaagattaccaaagataacaagcctcgcaagtaaaggatatttataatttgttgttatttgaaataatattataatacttattcattgtaaatatatcacaatatttaaaatgtgaatttaaattagttatttgaatgtaaatatctccctaaaaggaggggatgtactgtgtcatgctatgtcttataaatagccttgacctaacagtgtaaagggactctcgatgtaatctctctccaactccttaaacactaagaaagagaaggactactgactatttgtattcactctaaaacgacgcttggagaacataactttggccgactgttcttgagcattgttaacctcaaaattttacaagatgtaatatcgaggttttgttaggcagagtcgtcacaagataagagttcatccactgataaggattttagagggcttatcacattattataatcattagaagtacttttaacacatattggtgaaaatgacaaggatggataagttaggttataaggaagaatttgttggtagaataaggaatttttaaatttggaaatagatctaatagtaaacatgaaagctacatatctcattcgaagatttttgaaacatcttgaatcgtccaattatgagttttattgaacaagttatggtcaaaatactgacggactacacggtaggaagaaccctagtgacccaaggcctcaagctcacccctatcaacaacccaaggcatagagttgctcccataacaaacccaaggccccacaggcttgcttaagacccttgacattcaccctggatcattattatttctaaagagaaaagtgcattcttctcaagatatctcattactgacaatgtgcttattggttttggatgtattaatgctcttaagaaaaagaagaaaaaaaaacaaggggatggttaccgtgctcttaaattggacatgtctaaagcctatgatcatgttgactggtgttttttggaataaattatgttaaagcttgactttcatggtgattggattaggaaaattttggattgcatttcctctgtggagaatttggtgttgttaaatggtgaggtcatgggatcttttactccacaacatggacttagacaaggtgatcccatgtcctcttatctcttttcaatttgtgttgagggcctctcgagtttggttagaagggattgtgagaataaattgttgtgttggctttccctgtagtcgcagtggtccaattatttctcatctcttatttgttgatgatgcttgttcttcttcaaggtttttgatgtgagttgtgttagattcaaacaacttttgagttggtatggggcggcctcgggccaattggttaattttgacaagtctgtagtttcatttagcccaaatgttctgagttttgagaaagccaaacttgtggatttgttgggagttaaggcagttgattgtcacgagagttacttaggccttccttattttatggagcatagtaagactagtttgtttgatgccattcatgatagaatttggaaaaagctcaataggtggaagttgaaacttttcactatgttaggtcgtgaggttcttatcatgtgagtcatttagtccattccaacatatactatgaatctctttaagctttcaaaagcttttataaaaaaaaaaaaatttatcgtatatgtgcttatttttggtggggtggaaataatgctaagaaaaaatgcattgatgtacttaggagaaactttgcttgcataaggaggatggtggcatagaattctgggacttttatttgtttaatcatggtcttctagctgaacaagcttctcatatttacaatgttcctaactccttgtgtaacgccctaaataattgagcacgctacccaaaatacttatgaagccctaatcccttaaccgggattactaataaaattagcgcagaatttaaactaataggaatgaaaataaacctgtaatactttaaactttataaactaaaagttacagtagttaggatccaaaaaaaaaaactatttacaaaatattattacaagtccttttctttcagccggcctaagcggcaaaacagagtctcaaaaacacaacactggtaga

SEQ ID NO: 111015 - DNA, 3687 bp, Cannabis sativa
atttcgtaaaaatgcaaaaaaaaactgttttgaagtgtaaaaatgaaaaatgcccaaataaaaatataaatttagaaaaaagaaatcctttgtgttttcatagattaatgttaatggacttgataaaaaaaattatggacacgataaaaaaaaaaaaagggaattaccctatatactaattttttaacttttttttaaaatttacggtttaagtttttaaaatggttgcagcgctagttgcagtaggggtttctatacgatttttgttgcaatttaggttgcagcgctagttagaatagaagtttctatgtaaaatttcataaaaatacaaaaaaaattattttaaagtataaaaatgaaaagacatggtaattaccttattattattatttaaaacaatttaatctattacaatatattttttaaaagaataaaagtgatgtgtaattttttcatttaaaaaaagtgtatttttttcaaaaacaataaaggttactgtatgggaaaaatcacaaagtttgaactttgaactaaccaattcaaaagaataaaaaataattactattttttctttctaaacttctagcacaatcagattttgtccttatgtttgttaaaaaaaaattctttaaaatattataattacataattatgattcttctgttaggttttgtttttttactgtcaaaaattaacatttttaccccttgaactttgatcaatacaaaattttcccccttttataaaaaaaattaattttgaaaattgtaattctattaattctgaaaaaaataagaaaaagtattaaaaaactttataaagatattaaaatttattacaaaatattaattttactttaaagaaacttaaattatttctaagaaaatatttttaaactttattttatttataaacacgtatcttaaaaaatcaaaccaaaattattaagaatctaataaataatttaaataaacttaaattttttgaaggaatatcaaacttattaattaaaaatttaataaaaatacaaaatatacaaaattatttgaaaaaaaaaattagaaattaaactaaaaaatattatgtttactctaacaaatctacatttttttgagaaaaacaaaatagacacaaatttattctcgtaaaatttagtttttacaaaaattaaaattttaatatattttctttaagatcaaaatgattttttaataaaaaataaataagtttttacatcacttaattagttttaaaattttaatttattttttaatttccttaatcatccaaaataattttattaagatctaaattaattttttaagatttactaaaaaaaatattgaatctttctcacttttattttgaagtggtacgatttgataattatcaaagttcaggggataaagttgctaatttagaatgacacgtcaacatttaaacgaaataatgggacggaacataacagaaggactaaatttctgtaaacgtaaaagttcataaggtattcttgacaagccgtatattttaagaggtaaaatcaatattgttaaaaattcaacgagaaaaattcttaattattcaaaaaaaaaataatggaatcttctgattttttatataagacaaaaaaataatttgaaaataaaaaaattgcataatgttataaataatagatatatatatccaaattattttaaatcaattatcattaattaattgtaattagtattttaaatttttttttaattattagagaaccccaactatcctctacaaactatcctctatgttttcttcatctttaagagaaacttagagaaacagagttagggttttatatagtaaacactacttgtaatacattttatagcctaaaatgccaatacattgactcgtggactagggataattaacgctcgaaccacgtaaaaattctccatcttatttacttaatcactatttaatttcctgaatctcttatttaattagtttccgtaaatctcgataaacactagtttattaagttcaaatacaattatcttttaagtacataagatgttaagtggcccctttgcaatacgtactgaaaaagaaatttcttattatgcccgagtggggttattttctctgtagcggttattttctgtttcctgggatttctgatcttcccttccacttcttctctcttaatgccatgtccatggttaaccgaccatatcttcatcctttttggatgaaactacttgttcctaccaaccccatgatctcctttttagatactaacctggcttataaatatcatcacagcctctaccatttgttcctaagatttctgttctccttctcttcttcttattcttgtatggaatcaatcctaaaggatatgaactcaacactctgtttgtctgagaaagagagaattgtgcattctctttatgaagctgatctctatgatcccaaccaatcccccaatttttttgctggtgactaagtgtctcgcaaattcaattaacccgaacacttttatcataaagatcggcgaattttgaagtaacaaatgtcgttttgaagtcgttgtttcagaaatgcattctgatctctttcttttaactttggcttgtgcaggggatctacaaaaaattcttgttggggagccatggcactattttaatcaacttatattactgcactctccttctttgcaaaatgtaactagagaagacctctgtcatgcccagttttgggtctaaactcatcgcctccctttcttcagcaagtcgagagctttggctaagaaagttggggaataggttggagagttcattgatgtccatgaagactctcttcatgaaggctggggttctttcatgcgcaccagagttagaattgatgttactcaacctcttatgcggggtaaaatggttactctgcctcgggtgaaggatcaacattggttagagtttcactatgagaattggcctgtattctgctttcattgtggtaaactggggcacccctttgacaaatgcatcactttcatggagtttgtagatgttggagttgatcctgaacagctctatggcccacaaatgattggagataaacttccaatttcaggatacgatcgataccgaagtgatttttccaaagcaaacgcttacccttttcttactcgtgtcactagaataaccgttgcttcatccattcccactcttcacactcatcgaaacttggccattggaacacagcttcagccaaaatccttaaccttagccgagtcatctacaccagaaaaaccagcaactatcgataaaggaaaatgcccttaattacctctgcctttcccatcttatatccctactattttccctcatgaaatgccatcgaaaccaccaccattgcaacctgaaaatatacctcatttacccttgaattcgatctctcaaagcccacctatcagaacctttgaagtctcgattactgcagctttgaacaaatggaaagctgtgttgaattctgaggttcctgatgagaatattgattcagtcaagtcctttaagagacaagtagatccagagaatttttgtagtgttctgaagcgatgtcgtggtaataaaatggatagttcatgtgttgatggtgttgggttttatgccttaaataaaactctttacaatctgattagt

SEQ ID NO: 111016 - DNA, 7139 bp, Cannabis sativa
  modified_base (6646)..(6659): a, c, t, g, unknown or other
ggggtgggggtttgctgtgatttttctttttctttcttcaaatttagattcaatccatgttttacccattccaatccattttttcaatcttgagtgattttattcaaatatttcaggaacaaaggggctattgtcaaagcaggggcagttcacaaaatgttgaagcttatagaatcaccgaattctctaaacccatcagtttcagaagctatagtagcaaattttctaggtttaagtgcattagattctaacaaacccatcattggatcttctggtgctattcctttcttaattaaaactctcaaagatttagagaatagcactagctcacaagcaaagcaagatgctttgagagccctttacaatctttcaatcttcccatcaaatgtttcatttattctggaaactgatttgatcccatttatgtttagttcattgggagatatggaagtgagtgagagaattctttcaattctgggcaatgtagtttcaacccctgaaggccggaaagcaatcggtgttgttcgtgatgctttccctattttggttgatgtgttgaattggaatgattcccctgcatgtcaagagaaggcatcctacattttgatggttttggctcataaaacttatggggataggcaagccatgattgaagctggaatcgtttcggctttgcttgaattaacactcttgggtagtacattggctcaaaagagggcttctaggattttggcttgtctaagagtggacaaaggaaagcaagtttcagaaagtttttgtgggaatttgggtggctctacagtttctgcaccaatctgtggctcttcatcctcttcggcgaatccaaacatgggttctgcagagtgtatggaattggaggatatgatgagtgaagagaagaaagcagtgaagcaattagttcaacagagcttgcaaaacaacatgaggaagatagtgaagagggccaatttaccacaagatctagttcctactcacttcaagtcactcacatcgagttcaacttctaagagcttgccattctgagtaactcaacctgaagattgataagaagagtatctgaagttagttttctcttttcatgtacttagtattattaatcaagcttctaatagtctttttctacctttacttttttgttagtgtatgaaatagttatatccttgtttatcaaaagttaatataaaattatagttgttatattgttctgtgcctgccattataaatttagctcgaaatttatttataaacaaagtttctagtggtatgagatgcaaatttagaaaatcatagggatgttttagtccatatgtataattatatatagttgttgttgctcacttttcaaaccctttattacattgtgtccattccttggccataccccccaaattccttcttcttcacatttttttaacacaatcggttgaaaggggtgtcggtcattttctcatgcctactgtattctccatctgagggaatcttttctctttctctctctctctctctctctctgtatgtttttcaactttggatattaaatgttgtttagggagtgagaataaatggatctttttaattactcctaaacttctctcttatcttcacttgattagtttaataattttcattttcagtgcctatctctcttgtattataatgttaaatatgaaattgttatatagtgaaatgaaatttccccatattaataatttacagatctcaataagtaaggtcaagtctagtttggagtactgttttgcttagctgttcgtcaatggtgatatattatagattagatattgacatctcgcccccacgaggtgtatatacatatatatttttttcttttattaaaaaaaaacataattttcatttgtggggcagattcattaaagtaatattctaaattataatctctctcgatgggttggtttttgtcatctctctctctacgtggttataataataataataatgtaattgataaaaacatgaactgttcagagttttgttgactttttacataatgctacaaccttgagtttaaatgctgtgtatgtacatgagccaaaagtcaattttgatactgaaggaaccagaagttttcattcaaagaagaagttacaccatttcatgcaaaaattggaattgggggtcatcattttcatttgttagttttcatttttctgctttcttagttgaggtatctttgtaaaagagccaactttgaaatcgttttgctcttttggtgataaataacaaaatattacaatgaacttgtgattttttttgcctttcatttgtttggttttactatttattgaattatatatgtggtccatatttgatttaagcgaattatttgacactgaattcagtcacaaaacgcaggttttggcgttttttgttggaaggtgacacttactacatactctcatttggttacttgtttgtaattgtgtaatgtaaatggcaaaaaacgtagtgagatttggaattagtgtttgtgggaatgagtgaagaaggcttacatattattattatctatcatacacggttggtaaaaactaaaagtaatgttggtaggtaggtattggtcataaaaattctctgctttttcatatatcatcaatcaaatccataaatgatgtatacttttatgttggatgtaaccatattggacaccagtggtacctaacacctttagatatgttgccttgcgattgactaatgatattccttaaaaattattatattaaattatatgggactcgatacttagttagaccaataacgatattaacacatagaaaagtgttaggcaccactaatatcttttagcatttctctactaattaacctcagagtaatgggagaaatgtctctattagcaatttttcttgtttttggtcaaaggttcgaattctaccgatggccgcattgggattttatgacggtgggcttaaaaagccacccagagagagatactttgcacccaatcattttgtataacgcttgtatcatttgtattaccgcaacaattgacacaaagttagttgatgtagttcatgacccgtaagccttctacctccacaaggccatgtctgtctcagtgtgaatgatcattgccttagggcggttgggacagttttcgaagaagcctcccaactatttttttttttttgaactttggtctataagacacttcaacaaaattttacatcactattggcaattaatctttagaattgtcaaagtgggaaatggataccaaaatgtgtgtaaccataaaaaatctaagataagtttgacacaacacccccacccttccttttttttttttctttgagagaggattattttataataatgctgcatgatgtgttgggaagtggcatagaataattgatggttctttaagcagaacaacaaatgggtgaaagtaacagcttctttcttagttggatccccaaaggagtgatggaccataaaagaaaactactttaataactgttatgttacattttcttcttttcttatttggacatgacttataaagctctcacttataattattttctttttctttctaaaaaattaaacttatttacatagtaaaaaataatttaaaaaaagggttgatattccttcatactctcatttgagtgaatgtgaggtgtggggctaattcttgtttagtttttagcaaaggaggtgactttttcttcccctttgttaaaatattagcaaacagattcttgtggagtggggactatggtatgaccttttatttttcgattttaattatctatgccacaactgttttacaggcttacagcttgatcatgtactacaacaacaatgggtttcaacttcaataaactacaaaaaaaaattaataaataattttagtcacaataaattttataagtaataaaaaattgtgactaaacataaataattatttctatattatcactaaaagtatttttggtagtgttatcaatattacaaattactcgcaataaatttagatgtatttttaatataagttatatgtagttagatcacattttgaaattatgactaaaacacttattgcatatgtccttagaccatttttaatgtatggtgtatattttgaattaaatttagttcaaaatataccataaaattatatttggcacgatttttgtatttgtgttccaatgcacacagtaaaaattaactataaaagtcaatattaccattaatgctcattgaaaatgtataaaataattaattttatttatattattttaatatcttacaaataaaaatatttttttattaatgataatattaatgagtgaaaaaaaggtaattaaaaaaagttatttattgtggctaaaatttggcccatgctatcatcttttgtgccaaatttagcataatttttagctttgaccaattttgatacacattttacatcaccattaaagttaaattttaacaaaatattttaagaaaataacaatacaccacatttataattatctattagagatgctcttatggctataactatattatacaccgtcatgtaaaaaaaatatactgaaaatacttatatgttcctaaagattatatttaatgtaagtgaagctcaagtcttaatcatatcttattattgccatgattaatcaattatttccttcatataaagtaagaagggaaaaccttagagaaatacaattagtttagaagaaaatgccaaaagactaagttgactaattaggctaaagttttgtatctcactaacaatagggtttacttgtatttttatgttagttggtggagaattaaaccctaattaaaaacaataagaatgacttttataatttagtaattggtgggtatgtatttataataatgatattaattagaattaaaagagggaaatgtagtgggtatgcatgacaaaatattgtgattaattaaatgaaaactaaataacatggttaggttagattgagttttatagggtacaatacatgtgtatcccttgcaagatcagaggcctttattataagaagataaaaagtagaacctttctaaaaaaaaatgccaaagtagaacataagataagtgtccttttactcctcttcttcaacattagtattattctacacatgattttgtcaaaactaatgatctacacactctctatttttcaaatgtttggggcccttcaattgagaagaatctttttcaattaatcatgatcctagtatttttttttaatggaaaattaactttattaactagcaaactcagctaccaaataaagaagtatctcagttgggacatcacccaaattaaaaatataaaatagaaactctagcaagattatgagctaccatgtatattaattgaccgtttaacaaaacgtacgagtcaatatttttcaagtcattaagaacacacttacaatcaccaataacaataccaaaaatggtagtgtttttagaaataagaagactagaaaaaaagtgaaaataatttttcaaattctaataggtactaatctcaatgttattaacattcaagctagctttgactcgttttatttatttatttttattgtaatgattgaactaattttacaattgaataataacattttgtaattgttgttaatttttgtaattaataacattttgcaatggttggtggtcttgatatggacatgagcatcatctcaatgtgcttcattttcaacttattagatgttggaatacatggctaatacttttttctttaatttctttctttttcttaattttcaaaattgggtcaaggctcattggtgagaggaccacaaaagtttagagttagatgaaaatagtaggtgaaggtgtaaatgatgaagtctctagcccaaaaatataagcttggatatgttatgtatagtatatatagaactgtctgtttagtatcattttcatgcatagaagaaaataaatatgattgaaagtaggggaccagaccactcattaataatagtgtgtattgttgataaaacttaacacatataaacattatatacctcaataatcaagtaataatcatcaataatgcttatgagtatacaaaccaagatcaaatatttatttaaagcattaatgattaagaaaatatacctcttatattatttattccaacacattgagctattgcaaaatatctaaaaccagcatactggcaagagcaagatttgagtgtaaaatgcaagagagagaaagaaagacaattgtggagcaatccatcttttctattcaccagttactattcatcttactaaaaatccattaaccctttatatatacatatatcactatctaatcctatggttattaaatttattgggctaatatacattattacaggtgtattatgggcatggccggcccaatcattttggagactttgtgcaaaagattaaaattagacttttataaaaaaaaaaaaaattgtatatattaaaacctccattgctagttttttactttttttcttttgttaaagatatattctaaacttttaaatataatttttttaatatatttataataataataataannnnnnnnnnnnnnataataataataataataaacatttcctataaaaaatgggtttttaaaaatgggaggtattgtgcaatggctcaagctgtccaaagtttgggccgaccctaactatgggtcaattatagtataagagtgctttcatgtgcctcaaatatatttagtaactattaactattctattatggtttttgataaaaacagacacatagttaataattgtgaatatagtattatgcctataattatattagtccataatatgattttagccactcgtttagaatggatccaaacttatttttactctaggcagttaattgggttgcacactgctggaaaacttcatcaattccttcctggctatccaacacagtgataactctatggtatagagttatttttttatgcttttaaactaaaagtattgtgagaagagtagtgaaaatgtgtttgtttgcttaattttagttagttttagtttcattt

SEQ ID NO: 111017 - DNA, 8562 bp, Cannabis sativa
  modified_base (37)..(41): a, c, t, g, unknown or other
aggatgttaatgaaacatatttgttagtaaatctagnnnnnggtaaaataattccaacagtcataatgtttataaatattttgtattcctacagcttttagttcatattatgagagtataaaatatttttcataaattgcttccgctttctactctaatttggactataaaaacaacattagctccatttggtgtggattgaaaaaactagaggtgtgccatcccgttagaacattctttacaactgctctgctatagaagataagactctaaatcataactgtaacgggttcagagcctggagttagactcacttgatgtctagggccactttactgctacaagactattttattgatttcttattttttgtggggctagcccctttccaattgattcctcaagcttatcgtttgatggccaaacttttcattttttattccttcaggggttgggatgttcttacccgtgctaaaatcttgtattttcatgaacttgtttcactcctaaagaaaggagataggagctaggatgacttttatgccctctaagcccatctagagaataaagatctagcactttttaactattagaagaacgttaaagaatttgggaaacacttcttattttctattgtgttttgagcatttactcatcctaatttgttcactagtggatgaggataggtaagctagactctcttcgtctccttctttttttctcattttcttttgctgaaggtcttcaagaggattaacatatttcattctaggtcctttcttcctgaatgctcccagtcatctatttagggaccataaggcagtcttcctaaagttgagtagggaagagctgaatgtgcgggacttggtcaccatcgccaattaggaaaaaatggatcttttagtggtctcacaaacgatacaggatgttgatctctccatacttatttgtcccaatgccaaggacaaggagaaagtggataaagagagacttgattacatctctaatatggagaagcagtacaacgctctttggaggcgcaaggaggtggaagatcaaattgctcatgcctagagtgaggctgaccgcaaggaggcccataaggcggcctagaaatttggttcccttcatctggatttggaggctcctttgcctaatgaagaagcttccagagctagctcctctcattgtaagtatccttgtccactgctgatgtgacaagcgagggtataaactgcatatgaatgcataggaaaggtacatgtcaaaaagggtagtggagaaatctcaattcttatttgttttatggaaaactcattttgtcgttagtacggaaggggcatgctataatgtttttcttgatttatacgctaacaaaaggggatcacccttcccagaagggtagttgaagggtcaggccctctaaaacctcccttcttaagaggtagacttgatgtctttgcaaaacctagtggcattctccaagatcctgaagggttcttggaaagggttcttcttatagtagcttcttgacttccaaagttgcttatggtgatacacccatttcgaatgggtcatttgtcatctgtcatgacttttgattctgccacatgttttattgtaattctaacttaagaaatataaattattttattttaaacaatctattttttttcttctaaaatcattaagaaaccaaacaagataagagagagaaaaaaaaatatatgaaaatcagtttttttctctacaatttttctttctttaaaatagttttttttttcttttcctcacactttttttctttccttttcttcacttgtttctttcctgagcaaattcactttcaaacacaacctaaggaaaaaaaaagttgtcactcatgaaaaacaaatgagagatagttgactatgaattaccacactacaatcccgacaaaatacccactatcaccatctcttctgagcaaaggagagagcccttaacacaaataagaaacaatgaaggtgatagagagtcaccctaattgaaatcacattgagtaatcacatcattttaaaaccttgaaaaatattgaaccgaatccattaggattggggctctttaactcatgaatattaaatacacatcaaaactagcgaaaagcttaatcagttgcatatgttgatcaatattaagagtagcactcataacaaaacaattcttcttgatatcacttgtagtagaactgtggctacccacaaaaccattgaagtggtttaaataatgaaagaccatctcattatagtcatccactaaattactatattcgttaacaaaagagtcaatgtgattggtttcctttcattttttaatgctagcatgaaagtaaattgttttttaatcccttgtaaccaattaatatttatttatttattttgcctgtagctttccatcattttagagtaagagtttaaggtagcctttatctctttcacttacctcaccattgataagaactgaataagatactaaagagataaactgtgaaccaaccaggtccaagaattatagaaccccaacttcttgatcatctcacacagaaagatcctctcgacactcttataacccttttgccatgtcaagcaccgtttcttacctttttcctacacttcagagaattaacacattcaaaagcgataaattgaattttttttaatagtgaaaaaagtgtactttttttaaattcaaatttcctttttttggaaataaaaactcaaataaaatttaatttaattaaattaaaacaagacagataatatcggatctgttggttaaatcaatcaaacacatttccaaaatagaagaaaagaaatcaatcaactattttttttttaaaaaaaaagaaaaaccagggctgagtgagtacagctggtggttaaactgaaacaaagaatctgagagagagaccattgttttgttgtaattggggtcacagaccaaccaactccaactccaagccgagccgagtaaccaaacaaaggaagctgctcaatttttgtcgtgtataaattaacccgagttagtttcaactcaaccacggttaatgccccataggccgcgccacaaaaagaaaagaaagaagtctgccttttacccccacctctttcttttctctctcatgggagacgactaagacctgctgctattcggaccagagggaaaagtagctgaagaagaaagcactcgttttgcgaaaaagaaaaacccttttctttttgggtcaccaacgaaacggtgtcgtaacaagagatctgactacagagatagagagagagaaagcttagtggtacatccatggaggaggagaagagcgcgcttgtgcagagcgtgatcgacgtcgttagcgatataggttcgatctccgaatacaagtgtacggtaaagaaacagtattgtaatttagctaggagggtgaagctattgaccccaatgttcgaggagattcgtgatagtaaagaggggttgcctgaagacaccatgaaagccttggtttcttttagggatgctttgagatcggctaacgatttgcttcgattcggtagcgaaggaagcaagatatacctggtgcgtgctttattattttatcttctcgattggtctatggtttttgcagttctgtgcttttattttactgctcttctccattgttattattataattataatatatttgcttttcatgtttagttgctaagaaaatagtgaaccctgagagaaaatagaaaattattttttgtttccatgggaacttggagcatcctgttgttcacttttattatactattgccgcgcagtaactaataaatccttataatcgcgaaaaatttgcttaaaattcagttgaatgtgcaactggtttgaacattgaaatttctctatttgttagatgatatggttatacaaatctgagtttcaatttttgtattatattctcactcttgttttatttaaatttttgggattaatttacttgagtcgtttgaatatgaagtcaacataggtttactgtcctattttttcttcctgattgaccaacaatttcttattatggttttttcttagtttataataataatttttacgaattctatattgttaatttgaaacctatggattaggtgatattcatatcgtaagttttttcttatatcgattactgtccaatcaccagtctgtagctgtgcgaatttgaagtaaaatctcaatctattaattggcccaaacttaaaatataataatttatttgcctggttctttgattctagtgctatagtattagttctcttggttactccttgatctactacttgtccatgaacttgttttttctttttttggtttatgcccttgtctggcccttcctggatttacccattgaaagggcagggtgtgggggtgagaatcatggtctctgattccatttttgactttcaatgaagaattatgagataaagtgatgtttttaatgtttcagaacaataatgcagacttcattatttagggcttattttatttttttatcattggcacactaagtgcttaattgaaactaaaagtctcataaataagatcggaagttcgaacgttgttgtcatcccaattctcaatccccctcagcactgaccaagcctatcatttagggcttaatagactattcaaaatctagaatttcagctgttctttgtgtaagacaagaaaactgagcctggtacctggcttaagaagaaaattagctgctggtttcgaagtcgtattaagagaggaatctttttttgatggtttaattatatttttataaaccttttttttgactagtagttttctcttgtatggaatttgcaataatctaacacattgtcacttaaaggaatagttaatgatattatgttggtttgttaagtatttgatatagccaccaatcactgttgatcaatcaattagaaaatatgagtagatggttaattacgcctcttgctcaaatgattagaattagttttttctcactggttaattgttatttggcctctttcatcaatttcttactctcatttgtctttacttgttctggagtacgttcctgattactctattgtcttgttctttctttttcacttatgcttgaggttcctttttattttgtttacttttggtaacctttattcatgtaggtcctggagagggagcaagttatgagcaagttccatgacgtgacagctaaattggaacaagctttgagtggtatttcctacggaaaacttgacatatcagatgaagttaaggaacaggtacacacttcttttatatgatcgtaacagttctgagacgattactgggagttttctctttccaagcatgtcacatcttgtctgatgtgacttagtttagatttttcttttttacacctcagtattcttattgagttgatcaatttttaacacaatcttccttcatataaagatcccatttaattccaattcattgttttaatatttttctcggttcaggttgagcttgttcttgctcagttcagacgagccaaaggacgggttgatgcccctgatgttgagctgtatgaggatctctcatcactttacgatagcaatgatgcaccggcagatccagctattctaaaaagactggttgagaaattacagttggtgggaatagatgagcttgcacaagagtcaatagctttgcatgaaatggtaactgccagtaatggggatcctggggcaagcattgaaaaaatgtctatgctattgaagaaaatcaaagattttgtgcagacagaaaaccccaacttggatgcccctgcaagagaaaagagtgttcctgcaagttgtagtgggcaaccctcaactgagaagaatcacaaggtcccagtcataccagatgattttcgttgtccaatatcacttgagttgatgaaagatcctgtcattgtttcaacagggcaggtaatgcatcatttgcttgctgtatcatgactgttgcactatgatttcccttctatattttgtaatttgtttttctattgcactggaggtcctcaagatgttctgtcagtcaagccaaagtgattacccattgtaaatgcacaggaaatcatgggccagatggactgtttcttttaacgtatttaatggaatttgattgctaactgattctgcttccagtttactatttttttaaaattcaatcacacttagttttgtttatatatcttaattctttgtctaatgcaattcatttcccactgcgacagacttatgaacgttcatgtattgagaagtggctagaagctcatgggacatgcccaaagacgcaacaagctctctctaacaataccctcacaccaaactatgtacttcgtagtctcatagctcagtggtgcgaagctaatggtctcgagcccccaaaacgacccagcagttctcgacccaataaagctacatctgcttgctcacctgcggaacgtactaagattgaaaccctcctgcgcaagctcacatgcggaaaccccgaagacaagagatctgccgctggagagatccgccttcttgcaaagcgcaatgctgataatcgtgtggctattgccgaggctggtgcaatccctctccttgtaaatctcctttcaacacccgattcccgcacgcaagagcatgctgtaacagctcttcttaatctttccatatgtgacgaaaataaaggaagcatcgtatcctctggagcagttcctggcatagttcacgtgctcaagaagggaagcatggaagctcgtgaaaatgccgctgccaccctcttcagcctctcagttgtggatggaaataaaattactattggtgctttgggggccattccaccacttgtgacactgctgagtgaaggtaatcaaaggggtaagaaggacgctgcaacagcactgttcaatttgtgcatttaccaagggaacaaggggaaggcagtgagggctggtgttgtgccaacactaatgcatttgttaacagagcctggagggggcatggtggatgaagcactggcaattctagcaattttggctagccaccccgaagggaaggctgccattggtgctgcagaggcagtgccagttttggtagaggtcatagggagtggatctccaaggaacagagagaatgcggctgcagttttagttcacttatgtggaggtgaccaacaacacctagtggaagctcaagagcttggagtcatgggtccactggtggagttggcacaaaatggcaccgaaagaggcaagcgaaaggctgtacaactgctcgagcgtatgagtaggtttgttgagcaacagaaacaagctcaggagctagctgaggctgaagctctagccgaggctcaagctctagtcgaggctcaagctcagatgcagcaattacaactttcctccacagagactgtagatctcagatgcagctatcctccacaaatgctgtagatggctgacatgtttttttttttcttttccatttgtctgcacttaaaattaaattatcaaagggagcggcattgctttgcttttggcgggaggaggtggaagatcaccttcaaaatctgcaagttaaatatattcaatttgttttgtgtgcaccacaccacgaaggaccatacgaacatcagattcttaaaagaagaaaaaagagatcaacaaaggggttgggggtaaactagaagacaggacaggaggggtgaaatatacctgacatgtatctaaaattgtaccatcgtaacatcattgtaatcatcctcagtttttagtgaagagatgtttattgtcccaggaaaggagaagaaatgtctatttattgtactcgaatcaaatttactgttactgcataatttagtgaaattaatgattgtgacgaagagaacgaaagaaactttagttttatcatctcacggaattgccactaggagaacatgttgaattataatgctagggacaatgaataagattaaccttctcttattgtgcttcagaaaggttatgatgagatttttatcatggtggattagactgcattgtcaatcacaagaaacatgttttgcttgttaaagaagtttttagagtagctcaaactaatttttttgtgtagatgggaaattagctcaaagccgtttgctccaaaggaagataatgttaaaacgctactatagagtaaacaacacaatggcaaattagctagtgcaagtttgcaactacagtagtagtagtagtttccaaatctaattagaataaaaagagacgtacctctcccctcactttggtttgtaattttttgggaaaatttacctatggtatactaacttttgtcattttttttataaaaatactaccaaataatatttttttacttttttactgtgtttttttataagtttcattttgcaggatactgtgttaaattttcactagtgttctactagtgttttttaattgttatactgttgttttgagttgttcagctttgtgttttactggtgttt

SEQ ID NO: 111018 - DNA, 17050 bp, Cannabis sativa
atccacataattattaatatttataacagcatgaaattttttaattagataatttgtaaagacatgtttagaagtaactatgtaattactaagtagtgtaattattaagatggtaatcaatatatatatatatataaatgaaggtttaaagaaatgtgaggtggtcctttcaaaaaaaaaaaaacaatatgaggtggtaattacactatattttaaaattataggtgtgtttagatatgaaattgtaattacatatgaattcataatatcttatttgataaaatagttagtaattatattagaaaataatatttttttagtagtaccttacaaaagaaaaaaaaatattttttagtagttattaattaatgtttaaaataattttatttagtaattagacagtgtaattacactcaattcttatggagggccgtgagaattagagagcgtaattggaacccctcaagctcaactacttctaattacacagttatagtgtaattacatagtcaaataaatatattaaattgtataattactttcaattacacgcacaaatctaattacattttgattttctaaacgcgccataaatctttactaaacacttttgttataactttctttagaaagcatcttttagaacattaggtcatgtttatgaaacttattcttagtatccttttgagtgcccgagaataaatattatttttattggagtgaagagacaatctatatggtatttatttagtgatatttgcgtacaagcttctacaatattttaaaaacagatgaaggaatgatgattattctgaattgttgcaaaggctttggtaattgaaaattctctaaatgatgaaaatttagtttggaaatcaagaaaggggtgtttacctattatctataagttgcatctaaaacatgttagagtctaaaaagagcatctcgtatgtgaaaaatatgagactatttttcatagtcttgtatgtataagtgcaactctaatggaattgctagtgaatgtggctgtcagaaaaatgggactcattgtcaaaaaaaatattcacttttcaaatataaacatttgagagctgttggacaatagcagcgatgctactgttatttattatttttttttctgattggttagtttaaaagtattataattaaaaaataaggtccaccaacgtagtaaaaaggtagcttgcattggatttgccctaatactctcctgcaagtcgttgtttgaacaacattaccccaatcgcgcctattggcataataaagtgaggaggtagtagcttcatctagaatctttattggccaatgaaagaatgcccaatggaaggatgcgtttgcaccattacaattggttccaccagtggtgctagttcttaggtaaagtcttacgagactaagctcaagattaatgtgaatgttgccttgttcaacagaactgaccaacacaggtctgcttagataggtgagggatcatcacagtcatgtgctaatggctcacacttgttgttaggatgagttgatggagccctaacttgtaaaagcaattggcatcaaggaggtgttaagatggcttgagattcaatattgacagatggtggtgctcgagatagattgtttaattattgttcaagctcttcacaatcatctttcgatgacttctctactcactttggttgttaatgatcataagaaattgttttttgatgtaatgtgtctttaatttttgtttattattctgttaataaaatagttcattgttttgctagatctttatgtaatattttaaattatttttaggagtaatatttttgtcgaatgtatatctaccatgttacataattgttctaattgataaaatgatgttttttttcttaaaaaaagtgacataagtaaaaagaaagatgaagccggactaaaatgcaacaaattgaaagaatggggagttaaagtaaaacaaggtaaacatatacccaagtgacactatactaatatacaagttggagctttgatatatatcaaattatattcttgaacttttaaggttgttaaaaattcatcactattgagattgttaaatttaatgacttttgtttaattttagtacaaaaatttaacatagatgaaagttcaaaaaacatgatttggtacacgtcaaagttcgaaagacataatttcatagatatcaaaatttggaaagcataatttagtatataaataatcaccgaatcaataaaattgaatgaaaatgaaaaaagtctttaaacggataatttcaataattcaagatgaatttttaatagttaaaatatatcaaaatcataatttaatacatgtcaaaatttaaagaggcaaagtctaaattataaagattgagaatgatggtgtgagataatggggtttgaatgaaaaagataattatgtgaagagcctaaatgcaaaagaagcattttggtgcagaggagcttaaacagcataattgttgatgagtgtgagagtccaaaactgattatggtgggcgaagaagagtagaatatgcacaattcaaaggtagccatagcttttctcatacgccgcaccaaatcattctcttacaataaacagtctttccttctctcctcctcttcttcttcttcttcattttgcatttctagggcaacaagtaatctgctctctctgctcccgccacattcttcttcttcttcttccgccgtttcatatggtagttttctagtcccgttgcgtagctatcgtgggtacgccgctgagcagttctccgatgacgagtacgactgcgattttgagagccactcggttactattctctttcttatataatttcaaagtttttttattattatatgcgtgaaagtaagagcattgaatgaagttgaagaattctgcgtactttgatcattgattgttgagttggtagtttcatgtgattgttaccctgatggtttctatgattggaaatgttcactattgttatatttaatctctcttcaagtaggtttggtacatttgtttttctatgctctcaggatatgtatatctgtaaagcctaacaatttacatttttaaatttctatagtcacaacttcctatgatcaaattaaatttgtggatatctgagtaaatcttttacgagaatgttcaattctaagtcaatgtcatggttatataggcatcatcttcagttgccaacattgatgaatggaaatggaaactcagccttctattacgcaatgaaaaggaacaagagattgtttccagagataagagagatagaagagactatgagcagatatctaatcttgccaaaaggatgggactttataggtggaggattattgaccattatcataattttggttatcatctacattggttcaactaacatgtgtgctctttgtattcagtgaactttatggcaaagtggtggttgccagcaaggttcctcttcctaattacaggccagatttggatgacaagcggccacaaagggaggtagtcatttcttgaatttctgattcatatttacttaatttatataattgtcaagtctagtattatggagggttgaaactttgatgcactactcttgcaggtagttataccactaggcttgcagaggagggtggaaggtttgctacaggaacacctagatcgatgtgagctaaattctggaaaggtcactaacagtttgggtgatgataagcctataaatcaggttgaagatgtgattttggatgagaatgccgactctttccttgatcgctctgtcatggaaaaggttcttcagaggaagagtttgcgaatgcgtaatatgcaaagaacttggatggtatcgtttattatgaagtttatttaacgcagacaagctttcttatatgctgtcgaactttttcttctaattctattattcttccatagagtagaggatacacagactattatcatctctgttttcttattatattctcttttgcaaaaggaatcacctgaaggcaagaagttgttggaatttcggaaatcactgccttctttcaaggagaaggataggttgcttcaggcaattgcacaaaatcaggtttatatcattaagcttttgatttttttttccttttctttttcctcacttcatctacacaatcatgcttgtgtgtttctatgctatcctcttatgaattgtattctagaattctattactgctattaattgccataattgttttttttttttggtgaagggaagtgggggtggggtggaggtaaaatgattaattctcatagttcatttttaggttggtccaagctattgcattgggttttttaatgattgagttaaattgtgttaaatgtggcccttgcagatcaattcattgcatttgttaaaacctgtaaacaggacttaagaaaggaaaaaaaaatgtatctttatattttaaataattacaaattttgttttatatttattcactctactatctcttatgctccccaaataatctttttggggttattaaattggctatttataaggttatgcaaccgccttatttttacatgaaatttttgtttacatgttctgaaatcactataggcattatagttgtgcattgttcctttttcgaaaatggctcatctaaattcagatagaaatcaaggtttttgctttgtaaattcatagcatattaatcaaactagtttttctttgagtagaaagtttttgtcatttctttttgttgttcttttcaagttacacttcttattttttgtttgaagcagttttctttaacttagatgtgtagttgtgggcctttcacacttctaacttaaacttaatcataattttggatatagaagtatctcgttgatttacttactgcttcctgcaagactcctttgattataatctttattgacagtagacaagtgacccctgtctctttttttttaaaaataaaataaaggacaagctgtcatctgatgtcaagcttagtcagaaacttatggtctgtttttcctctgtttttgctaaggacagcttcttctttcagattaactggactatggatattaagcttccttttttgattaatgtgcagcaaattgacgtgcattaatatggaatcacgaactcagcatagattttcaaatcgtgcttttgaaatattagaatcattgtttgaattagctatataagatgtgcattattttcattttgttcaagtatcttttcagatggtatttagccaaacatatggtgactctttcaaggagtgctattgtgtatctaggactttttgtatcatttgatgcttctattttcatcacaatattcaagtatttcatccagtgccctattttaaataatactttattgggcttcatatttgattctggtattattctgaaccttgtgatggacatgggctctctgatattcttctgtttttattataacattattaaacgagttaattactcttacactcctgatcacaatctgattaaattgtaacaatgataggtgatagttatatctggtgagactgggtgtgggaagaccactcaacttcctcagtatgtgctggagtcagagattgaatctggacgaggagcattctgtagcatcatctgtacgcagcctcgaagaatttctgctatgactgttgcagaaagagtgtctacagagagaggagaacctcttggtgaaacagtgagtcatatctccctcaagcacacaagaagctgcaaattcagttcccccttttctgaaaaaataaataaaataattattataattatgaagcaaaaaaagaaaaagaaaataagtagtgtttcaaatttaaggattctttatgcatgatgataccacaacagatattttttggtaggttggctataaagttcgattagagggaatgagaggaaagaacacccacttgcttttctgtacaagtggtattttacttcggcgtttgctgagcgatcgcaacctaaatggcataacccatgtttttgttgatgagattcatgagcgaggaatgaatgaaggtgtgcttcctgaaagtttcagttcagtagccatttttgctaaagcaggttatatagttctaaatttttgattttgtataacttttcagacttcctattgatcgtgttgaaggatttacttcctcgccgtcgagatctgagattagttttaatgagtgctacactaaatgctgatctattttctaatttttatgaaggggcaccaacaattcatattccagtaagctgaaccctaattttttatcctgtttacttttatttatttatttataatttatattagagttcatgagctccgactgtaagctggctcgtacttgttctctgtatttgtttgcttgctgcggcaataaagagagactgtcagctattctagctagaatactattctatttgcgatatagagctgatttctagaagtacgtttgttcagctaaaacattaaatgcagtcaagtaaattaggaaagtcaacttcatgtaagtagtaattcctgggtaccttgcagtttccaacatggatattactgtttgtgcactgagtgttgaagagtgttcagcaagtagagttcaattataccaaatgcggaaaccactgaatagttgtcataacatattgtattgtacagatcagtttttctttggaaatcattactgtatttaaggtctttatatggctattttgtggtcgatttagttggaaaggaatggaagaatcttccaagatgtggtgagagattcagatgcagtttgggacagggttatgtattgggttgctacattggtttatgatttgaaaaactcaccatttgttttcagatttagttagaaggtggggttctttcttttaacttaggatcatatcttatcttttggtttgttctacattaataaatacttgtttaagccactgaagctagcttagttgtgagggaggggaggggaggggtaaggggtagttatttaggtagtggtggcaccatctgtgctaaacaattcaaaataaatagttcttgtttttatttttccttttttttttttttatttatttttttttctattttgggtcttacacgactctgtagtgttgttttgtttaaaggtaaagaataatagtttatgtttcttaaaaaataatatattgatataaatattgaagctgacattttttagggtctgttattcagggttttacttacccagtaaaagcacattttcttgaagatgtactagaaatgactggatataagttgagttcattcaatcaagtcgatgattacggccaagagaagctgtggaaaacacagaagcagctagttccccggaaaaggaaaaacctgatcactactcttgttgaggtgtgttgtgcttaccttttccttaaaagcatgggttaggtgaagtttgagtgctaaaaatacaatattagttgtttcttgcatctctttacatgtgtttgcaatggctgatcatgtgacttctgtaggaagtgatagacaattttgtagataaaagataagaacaatataataaaaaatggaagaaataaattactatagaaaaccttatattttgctgaattatgacaaaaaattgagtatcttaagcacttagattcgagaatattttaaagatttttttaaaaaaacttaaattaaaacaaaaatatatttatgtaattttgttaaagaattttttttttttttttttttctgaatgtaaatgtaaagtgttgtttataaatgtaaatccaaagttttctttctaattgtttgtacatgcatgggttaatttggtaagataattaaattagagttttgttttccttttgaaattattcaacaacaaataatgtaattgtaaattttctttaatattcagatgtacagatttttttaaaaaaaaattacaatcaaaatttaacagaatgtattttatggctcatatttatgttatattctgcttctggaacaatataactttaacttatataataattaagcatttttttcttggcatttgaaatgttgtgcaacaactatagtctcttctaacttaacttatttgtttagggtctatctggtgtccgttttgattgaaagtaacataaattgtaaattagcttgatagaagcggcagatgtaagcaatcttctgtaataagctgctgagagttgcctaccttgtttcttttgaacaggacgctcttaataaggcaacatttgagacttatagcccaaggtcacgtgactcgttggcatcttgggtgcctgattccatagggttcaatctaattgaggcagttttatgccatatctgtagaaaggaaagaccaggcgctgttctagtgtttatgactgggtgggaggatatcagctgcttgagggatcaacttaaagcccatccccttttaggtgatcctaatagagttttacttctaacctgccatggttcaatggcgacttccgaacaggtttgttaagttttcatattcaatcttccataagatttgtgtgtagattaatttgagtggtcctgtttatattttcctgactaaaaagtggtatggtatgttgtccttgaatgctgtcaatgagctaatgcataatcaatgttgttaccaaacaagatcttgacatagcagtatttgttatcattatgtggcaaaacggactcttcaatagattataacatagcatgtgatttctagtagttgtgttgaactaaccaaataaactccaataaagtttggtgtgttttaacttaattacatttttattgttcttttctttcttcaaaccagagatcatgtgtaaacaattatgactgtggcataatttttcaaatcaaagatgggatatctacttgcatgttcataaactgttgtcaaaggctaaattgacgtataagtgcacgattgttcattatctactgtgttgttgttgtcacttcctgcagaaacttatattcgatagaccacctcctaatgttcggaaagtcattctggctacaaatatggcagaggcaagcattacaattaatgatatagtttttgtggttgattgtgggaaggcaaaagagacgacatatgatgctttgaataataccccttgtcttctaccttcctggatatcacaagcatctgctcggcaagtaagttcttgcctctaggttctaggctagttgttccacttaccctagaatatgtacattgtcttttgaacgatcaaaacttgcttacttttcattattagtttttacttaaatcacataattataccttctatgcaatttgattgttggcctatttgtacatacatctttgtttttttctcctccaaatatgtttttgagttctttgtaatgtttggtggccttagatttgtatttctttggatagccttagatacaatagatggtggcacactttatttgaggccattatgatgcccttggcatctttactttacatttctgtattacggaaattctccctcacctaatataaattatgttattttattttgctacagagaaaaggtagggctggccgtgtgcagccgggagaatgttaccacctgtatccgaagtgtgtttatgaagcttttgcagaatatcagcttccagaactcctgaggactcctttaaactctctatgcttgcaaataaaaagcctgcaggttggaagtataggagaattcttgtcatctgccctgcagccaccagaaccacttgctgtaagtgatgttgcttagttacattgtgttgctgtttcaatcccaatttggttccatatctgtgtcatgcataattttctcagaaaaccaaatgcagcagctctatatttttgttgtataaatttggatgataagatttatagaggatatacttgtttctccgattcctaatgcaccagtccaaacccaatgaacttatctttttctctgctcattctatttcaaggaatgtcattcatgtaaagagtaatgtctttgactgcttaattataggacatggatccactgattatatattgtgcaattttctgataattttatgtggtggttaatttaacaatctttttttttaagcaaattaaaaattctgtggattgtacatatttaaattgaatgaatcaacaggtccaaaatgctattggctttctgaagatgatcggggcacttgacgaaaatgaaaatttaacacctcttggttagtctgtaatactcttatgagaaagtaaattaattattttttatggttgcatcttagctattgtcctttttgtttttccaggaaagtttttatcaatgctcccggtggatcctaaactagggaaaatgctgatcatgggtgccgtctttcattgttttgatcctgttcttacaatagtatcaggactcagtgtgagggatcctttcttattgcctcaagataagaaagatgtaagtacagaatccaagtactacctagtacctacagtgctgtaaaatatacatatatttttgtcctcagaagattaaatttggatgcggaaagtgcagaaggattaagtttcaaggggataatatttgaaaacccatttacattataagtactacttctactttgaccaaacatcatttgctattctttgtttgtattcagttggcaggaacggcaaagtctagattttcagctaaggattacagtgatcatatggctcttgttcgtgcatacgaaggatggaaagatgcagaaagagaagggtcggcgtatgagtactgctggaggaatttcctctcagcccaaacacttcaagctatccattctctgcggaagcaatttagcttcattctcagagatgctgggttgatagacgttgatgcaagcaataataaccgactaagtcacaaccaatcattagtccgtgcaataatttgttctggcctttttcctggcatagcgtctgtagtggtaaatagcttgctacttagtgatggttctcatattactctttctggaacttaaaattttgctgacttttattttttcaccatctgtgcagcaccgtgagacatctatgtctttcaaaacaatgggagatggtcaggttttactatacgctgtgagtgccaatccctaaacactacaattttatgaactcattatctgtcacttggttcctcacagcccttatcatgtctcagattgtttggaatttgactagcaagttagaccagagaaaatgtaaattaattaataatgaaagcagagaattggaaagatggggaaggtaattttgtaggggagatggaaacaaaaaattgttgtacttactactcaataagatatctctaaaggaaaatggaattaccaaagagaattttatgaagaaaagaaaaggactctactagagcaactagatggtaggatggtatcattgtgaagagaggatacagaaattgaatagctgtcgtactttgtaagaatactttcatatcccagtatggtcaattcttaggagagaagatcgtttgactaatacttaaatgcaagtagaatgttggtaaattatataaggataaatgagactcgagctagatctagcacaatctctccatccacgagatttgacagttgtttggggcatgatctgaagtttctaagttgaggcttctatgtatagaatatttttatcaggttctcctttcacttccaaggtcaaaagtctaatttaataactctgttacttgtagttttaatactgtgctttgatattacttttgttgagaactcgtgaaagttcatcttgggaattgttataatgtgtgatcttttataaatgattttatatttgcctctttttaattgtatccatgatttttctataagttactaaagcttgactgactagttctgatattgaagcacagtcattaactgatactggtattttatttatttcagaattctgttaatgcacgttaccaaacaattccctacccatggttggttttcggtgaaaaagtaaaggtcaatactgttttcatacgtgattctactggtgtctctgattcaatactgattctttttggtggtgctttacatcaaggagtgcaggtagtgtttctgatggtatataaatctacatcttgtaaaaaaattgaattgctgtgaatctatactaactttatattttcaatggtcttctaggctggtcatttgaaaatattggatggttacgttgactttttcatggatcctagtttagctgagtgctttttaaagcttaaagaagaacttaatatgcttattgaagggaaggtaagctagtaaagccatttgggtactgtcttggttattttcctccttccattgcctttttatcttgcattcataagctctcatatttcaatcatgtaacttttatcttttcgtagaacttgacaatattttgtgtgtttgtccaaccatgtatatcaactgcatggatgagatagtcctgtgaggacttgtgtccacttgtaactaaaggaaattttcatggataaaagtacactagtgaattggatataacgagggatgcaattgcccaaactaaatgatacaattttcgtcaatttatttcttttggctttagccaaattaatcgatagactcttgatttgttaatagctcttttgcttcttggttgcaaaagaagaaaattgttattgtggaaaaagaataagtcaattaaattagtaatatcttcatctggtacatgatttgatctttttataaattagtaatatcttcatgaaagccaaaacaaaaatatataggtaggaaataagacgatatactaaccttgagtttatattaggtatgccttggtcttttcttaatctgtcatttcactcaagtccaagttttatataggtaccaagtattaagatatctcagcagtggggtggttttgcctgagaaacctttccctgcacgggagatctagtatattttcctttataacacagtctgtgctgcataagtatagcatgctagatttcttttaataatctgttttcattctatttttaaatgaactgagaagaaaattaaatattggttaactaatggttctgcgacactgcagcttcaagatccgagcctggatattcacagggaagggaagtaccttttgcttgcagcacaagagctggtatctggagatcaatgtgaaggaagatttgtatttggtcgggaaagcaagaggcctagggagtctaatgacaacagcagatttacaaaagatggaacaaatccaaagagcttgcttcagactttgttgatgagggcaggtcactcacctccaaaatacaagaccaagcatctcaaaactaatgagttcagggcgcttgtggagttcaagggtatgcaatttgttgggaaacccaagcgaaataagcagcttgctgagagggatgctgctgtagaggcattggcatggctgactcacacttcagataacagccgtgacgaggatgataacaccccacctgatgtcactgataacatgctgaaacttcttgggaagcgtagaagatctaaaggtcggtaaggttaatgatgaatgccggtaattggtatataagctgttgccatcctgcccccggtgagttcattttggggtttgagttgatcgctgctgctttgtttgactagtaatatggagatgaattgaaaggttagcaagctgagaaggtagcagttccattattggtatttatgaaaacttccctttagtaaattagatacagttaaatttttgggaacaatggcttctttcaatgagagatatatgcaagtcaaagatgggaaggattttcatcaaattttgagagctgatcagagtcagagtaggcgtagtagtgaatatatgactcgggagagtcataatacaatattgaaattttggttgacaacaagatcttagggaaaagaaaatggatagatagcaattctaaaataatcaaatttgatgtttatttaaggggaaaaaaaagaagaaatgaattacattattgatattgtgatcaattgttaaagctagtacaattggggaaattccttgtaatatttatgtaaattgattcaagtccttgttttctatctgatataaagtataaatactacaagagttatttattgcttctcatttattttcatatctcatgtaagaccctgagcattttcgcgtcatgcgaagcacaaactgccgattatcctgctgccacagaaaatagaaaaggaaatactgaataaaacaactcaagttttgtaatttgtagtactccaagtctccaagaccaataaaatgcccaaaactatctcattaaataaattatcttttgaagtagtgaaagtcacttcggccaaaaactcaaaaaatcacacattttcattcgaatcggatgggtaatgagtaattaatgacaaggtaacactgcagtatcgatttcttttcggtggttctaaagtgcacctcaaaactattgtatcccttttacatttttagcaatgaaaaaattataatccaaattggttttatataaagtaattaaaagagagtgcattttttttagaatttcataaaaatcctgttttacatgtgtataacaaaatgcccacaataaataaattgtttaaatctttatttttgacatgtacatccacattaaaaataattaggaatatagagatatccctttatgaggcaccctagaatttatttatttttttatgaaaaccaaatttaaattgaaaagtgaacaaatttcaacaattataaagaagaatgattcattgctgcacaaaaaaattgctttctcctagtgcttcaagagttatcctgaaaaataaaatgcacagcaaaaagcaatcatacaaagtacaaacatatatgccaagtacctagaaaggtgctacttaatagctactcattgtctccttcgtccacctttctctatttcattaggaaaaaatggtatgtgcattgctaactctattctctccatagagacactactcatcaaacagtgagagaagccccattatctgctgctgtaagattcaaaatcattgcagctgcctttagtgcccaagattcaggtgtctggtacaatccggcggaagtgccaaagcatgaagcaagcatatcagtatttatcacaccaggattgagagcaacagttgccattccctcaggcaactccttagcaacagaccttgttaagccctcaacagcccatttcgatgcacagtaaggtgcaaccagtgctgctcctgatcttccccatccagatgacatattcactataattccttgtttgctagcaagcattagcgggatgaagtgacgcaacatgtttgctacacctttcacatttgtctcgataacagtatcaaactcttcttccggaacctcccaaattttgttgttcttgttgattgtccctgcattgtttactatgatatcgggaacgcccttctttgccatcaccgtccgtgccaattcttcaacactgctattcaacctaacatcagcattgatcagcaagtgtctgtcagatgatgaagagataggttgtgaagcaggagaaccagtagcagagttgagctctaattgaagggagttgagcttttcctgggcccgagagcacccgattattgtgtgaccttgctttgccagttccaaagctagggctttcccaagtcctttactcacccctgttattaatatggtcctaggattgacccccccagccattgctctgcttccaagcgcattcatctggctatcgcacaggctctcttgttcaaagctctatgttccctctaaccctacagttctgtatctgcaatatccatttcattgcttgttaatattgtatggttgtatgataagaccagaaaactccaaactcaagagaacaatacagtagccaaacagtaccaaaacactaaaaaattatataataagatgagaaaagattacaagcaagatgggagctcttaggctcctttgatgcaaagagtgactactcaatacattgcataactctctattctcttactcacatatatagtaatttttcactcaaaactactctcccaaacaaagactcaaataactttgtatttaatatatgctagcacaccatactaatcctagggcctaacattgcaatttacttaaatactataaataaatagtcaatttgataaaaacaattagcttgtgaatcatcataatcaactttggactcatcaaataacgcaagctctaagggaagaacttataaaaacaaaacaaacagttcaaataacaccaagcccaagaaaagttatctcaaatggtgcatctaaatagcaattgttataatttcttaatcctgaaattttgtagtatttcaggtatgcattatagctaggcatcaaacgaaattcaatatatataattatatacatatatatatttttactattagcctcgtccaagaacagaaccagcattaattcacagaccactcccgaatcacttactatcacttgaaaaatgaaaatattagaacattataatctaccctacgataaaaatagaaaaggtaaaattgccttcaatacctaaagaaattattctatttcgttctccaaacaaaccaaagagaaagcaataataggtgttaggaaggtatacctggaatggaaggttcgaggttaagaaagacaagaatattgcggtacgtgagaaatgcagggcgaaacgaagagatgagattaccaatttgacgatcaacgttaaaccagctcagccttccacttggataatagagagaatagagatggaggtctctggaattctggagagagataagagagagagagagagagagagagaagagggggagagagagagagagagactgaattttcttaatcgtatttttc

SEQ ID NO: 111019 - DNA, 7321 bp, Cannabis sativa
  modified_base (7280)..(7280): a, c, t, g, unknown or other
ttttcacagggaaaagatctctctgttgaatgccaacaaagttttgtagcatttgcgaactactctttggtttatcgaggatttgaccaattcctaccgctgtcgggaacttgacaatcatgttaaatatggataaagttgcttggaagttgtcttagtttggctactctttccccctagcgttagttttttagtaactagggtgacaggtgttgaaacttgtatgttgaagttatctgctagcaggaagatagactattactgaggtgtattgggttatagcttgtgcctccagaattcaagcaaaagtcccatccatcagcagaagtatgatgaatcactactgaagagtagtgtgggaatactagccagatctcgtataagggtgaaatcaaaggttattagaggacctttatttatgatttcaaatcatagatcctcgttagaggattaagagaaaaaactctaagggaggaaaaagaaaaatgaaatgtcagacttgtgctaagtacatcatcccatacttaagtgaagggtcggccctaggctaagccaagcaaggcatgcgcctaaggcccactcatcctaggggcctaaataaaaaaaatatattttagtaaatatacatatattttaaagaatttttaaaaatgtgatttacttttataataagggccaaaaaatttatttttcttaaggcccaaatcaactcagggacgaccttacttaggaggagtttaacaaccaaaagattattcgctatactggagtaggtcccatcatgtataaattatgtgaatcctattgattgataaagagatattgtattgggtctcttcaaataaataagttacttctcatccactagcaaagtgcaaagtggaccagtactgaagaacattgtaatttaaggattgtcttagatgctccctggtctagtgccttggtactggcattggaattaagttggggaaattagaatacaaactatgcatgttccaggtactaatgcttttgtgatgccctgaggctctcacttttctcattgagagtctttagtgtcgcttccatgctcaatatcaaaccgagacttgtaacatcttcatcattgttccttattcctggtcatcatgggaaatagagggagtatccttgccacttccccctactctaactcatcttcaatagtagaggctgattattcaccattgccccttgctcaaggtcatcctaggagagagggggaatctagttcaatgaaggtactagatgttgatccctccacctcttcttgataagtgttgattcgagactcagggagtgaacatgctgagtaatgcgaagatactagtggatcaacaccaccagccttcttggtggcctctttgaggttgtcaccatctctattagaaactcttgaatagtgtatactgctgtgagtttcaagtcccgccataatggacttatattagtaagtcctatctccattgcaatgactttttcatcttcactgagtaccctcatctgagtggatacctttaagaatcattgcaggtaattgtttagaggctcttcttgctcctgctttatgtagaccaaattgctgagatcaattagtctatgccttgattgtgagaatcgttcatataatgctcttgtaagtgctccttaagaattaatagatcatttaggaagcttggtatgctactgttctgctatttctaaaagcatggctagaaagatttgacattaagaattatctcgaataccttgtaaatcggtctgcacttcaaaattatgtataagagaaagttgatctccctttactgtatacatactccattttgacatcttaattattgagatagccaatgtcatgaaccgtctcgagagtggagacgatttgtatctattgagactcttatctacaacaccttttgaggttgcaaggtctctcaccaattttcctaagttatctagctctgcttgtgtatccttttagaggatcttcattagtttctccacctgagcaacttcttcatcttcaaccatttactccacctgagcaagtggttggtcttcatttccttcaattgaccgctctgcgtaagcaaatggttagttttcatttcctccattaccaggaggtggaatggaattttttggcacacattggtctcgatgattcttagaattatcccaaaagttgtcaatacgagaaccatcaatgtcattctcttttcatctcttgttgtgcaatatgctcactctagatttttataaaggaggtgagagtctataggggctcgatttcccttagcaagggtcccagtgccagttgcttgttgagcattggcaatatttttacgagaggcaacattgttctggccactcagggtttcagcttgagcgctagtcctcatgtggtcagttggcagatgtggaggaactttagcttcatttattctaatgaacgggactctaggaggagtaatattgttagtatgatatgtttcacatatcgtatgagcaatgttatctctccttcactatcgagaagcttgctaaatttctatgttagtccatttctctcgaaacaaactttgaaactcttcttatttttgcttgagagattcgtaaaggtgttgttgccagtgagcaaaaacttcctccagttgttcaacctcggtgttaagctctacacgcacctcgcgtagagggatttggttacaagtagtgcgagtggtcattgaattttgatgaatgaaacatcgattggaccactccaatagcggtggagggtccatatgggttggctgttccctagtttgaatccttctaaactcttgctgagggttgactttcctatgagagacattaggaggtttgtcacttctagtctaaggccttttaaaatcttaccaagcgtttgcttccataattgacacattagggggttgctcacttttatttttaggcctttcagactctcaccaagggtttgcttcctcgggagagacttcggtactaaatactcattaagtagtggtattactaccaagcgtggtagcatggttctacgcattcagggtttcacctcgagtgttggtgcctgcatggctagttggaagatgtggtgacaaccttcctctaacaaatgagactattagggttaccaacatggtgtcagcttgacacacatcgcgttttaagtaaggcaaactgactctccttttcttttaagagccttgttgagtctcaatggtagtcaattgctcttggaactagtgttgaaactcctctcattgcttttctagtaaatcctataaattttgttgtaagtaagcaataacctccttcatttgctcaaccttggggttgagctagttagcctatcctaggctcaaatgtggttgcatgttagcaaaaatctaccctgattgctcaaccaaggggttaagctcgccagcctcttctaggcatgactattgttgcaaattaacaacagtctcctctgattgctcgaccttaaggtcgagctcctgctcctcaccatgcttttcgtgttcctttttgaggcccataggctcctcattaagtttcacacgcaactcatgtggtggcatagtaccctcaatattgttcctagcttctgtcggtgtcttttttggtggtctcaagtaagggggtcttgacctaccgccgaggtcccgcccacggaagcatcacaaccaaaactagtggacctagacaccaccatctcttagtgagctcttaggttcttgtacttacgaattcctttcagaatgaatcacctatttgaacactaaaaacttgaaggaaaccaagggactcgagtggtgctcccaatgaaagagccaaaatattaatgttgaaaaatggtaagttctttatcatctgataagcgatagcggcaaatagaaaaataaagagaacactacaatttatagtagttcactctccatattgcgatggtaatggaactacatctacttagcgcttttattatcacaaaaagctaattgccttacaggagaactctagaaaaatgactaagtctaacttcacttcacaatttttagaaagagaaagtgtgaagatagagaagctctgaccttgtagagaggatggaaagtttgcataagggagctttctttttatggggaattaggtccaattaaattataataaaataattgaaaaatatgcacaaaatttgctaggaaatccaacactatatctgaaaatgttggcattatagtgggggtgtcagacacacttatatctatcttgaaaaatagctttaattggcaacttgaatcacatcatttggataaaaattgagagagttatagcaattttactaagggtgtgcaatgctaaaaagtgattgtgagatcagattgagttttggtcgccggggttgacataaatgtcaatccaggtgcctaaaacttgaattcttgggctttaggcatattatgatatgcttgtataatttgatagctatccttagttcattatttgaccttggggaagttctcttgcaaatttacttgatatgcaggggtgattcccggtgaatcattaatgacgactaggtgacatccaggtgatcactagtgtagatgggtgttggtggacttgcatgtgacacatgtacatgagatatttacttgcaatctcattttgggaacaaaataagactaatgcctagagcaaaattgttgtttgtgataaagcaccgagccgtaagccaatgtcaacctgggcacctagtgtgctaacatactggtgcctggtgatgcctgggggctaactcgctactcaaatgatattttatcctaattctaagtctcatatcatgtttttggagcaaaacaagaagaattcccgagaaagaataccaatcatcagatcaatagaaccaccagaagtgcaactatatcaacctgggctcccagtgattgaggagatgtcaacttgggcacccaacatttcatttgtggccttgatgactttgtttacttcctaaaagtacttgtatcttccttgtgggtaaaaagaaggggaatgcctaagagacttctctagaatgacgtcttggggtgacaatggattcaaatatgtcaacctgggtgcccaagatggcctagggtcctacacttggcaccccaggtagggatttacatctccaaaattgatctcgttgacttttaatcttttttttttaatgaaaattgctccacaaattttagttttgtcaaatttgcacaggcagaacttagtgaaacgaaatcagtgcccaggttgaaatgtcaacctaggcgcccattgttgtcgatgggctccttcgggaggtcattgattaaatatcatgtccttgcattgttccttgattcatttgaggaattaaggtccaattgtgtgcctataaacctaaaccctagccacggtgtgcccatattgactatacgtcaacttgggcacccattagggcttttaggtgccctggtgctatttcatgtagactcatctctaaagtcataaactttgctagggcatgtatctaatgtatcttaggacaatggctaagcagattgtccataagaatttgataagaaccaaaattgatgcgagacagcgcacaagatgttaacctgagcgtccaatactgatgctaaacctaggtcgagccctgagatgtccacgtgacatcctcagcttcatagtttttcattttatggtcatgcatggtgacctatttgatgaagcatagtactagaaaatgactttgttggattttggtgcttacctaggtgcccctagtatgtaggtaacagtgccctattctaggatgcgaggtcctcggtgttatttccttcatgccacatgttgatagtagtgtctatgtcatcaagctaattttttaggtaaacactaaagtagtaattacgtgatctaataattattttattttgaaacatacgtaggtattttgtcccctaaattttggcaaaaataacaaatatgcccctaaactattaccaatgttaaatatttttcttgaattatgattgctagtaaaatatgagacttctctactagaccactgttaaataattagcaattttatccttctaaatgtgattaatataatattttctcttccaacttatccacattagatgtgggtggtaattaggtataaattttaattatcttagatttatttaggtattacacagaaaaataatattatttggttattaattaattaatattaaaattaacattttttaataattacacttaacttttattggggtcacgagaattgatagtacaatggggaaccctcttatgtaataaattacatgtttactatgtaattacatacttagacagatatgccaatacgaaaaaaacaactatttttagtcacaataaaaaggtactgatgattaaaatatgatatttagatacaagttgttactaagttagttttagtcacaataagtattgtgactaaatacatttggttacaacaaattgtaatttttatgactaataaatttagtcacaaactttttagttatgacataagaaccattatttataattagtcacaactttttcacttctaatcacaagatttattgtgactaaaagtgtgatcttttgtagtacaaattatgtaattaaatggataatttgatttttttttttttttttttgctacacgcaagttataaggatctcacacaaattttcaaaaaattacgaaaaatttaattaggttgttgaattcaaagagcttattgcatgtatggttgtttgttatttcactatttataagtgggtacaataaattatttgaatattaatttttgcatttgaattattatgatattttacaatttatgggagattccgataacaaaattatacatcactacacaaaacaaataatgtagttgtaatgtacgggaaataatgagtaattgtgatacccatatatatactaagatgatattacgtgtaatgtatgcataattaattttctttttaattaaattcaattaagtgatgttaagtgcaatatatgtatatttaataactttttaattaggtaatgtattttttttttttttttgaaatggaatttgagattttgatctttaagaaatttttttaactattgttatattggtgtgtcatttgaatgtgcatgattatatatatatctattttatatnaagtgtgcctatataactaaaattcttggtttatgagaaat

SEQ ID NO: 111020 - DNA, 11107 bp, Cannabis sativa
tttgtaaaaactcgatttttcagtaaccataatggccgaataatttacatgaataggggacgccttaagaaaattagacagtaaatgtaacaccctactaagttagacgtgttatcgtgatttaaagttaattgtgcaatccgttgctaatgaacgtgtttattgggattcgtatttaattaaaagttttcttaatttatatttaattaaaataaaatagactttataaaagtcggggtccagatatttaaaatttacaaccaaaatacaaaacattagttacaaaacttgtcgcctagcgactaatcaaaatatagtctgttgtcccgaagatcgaacacttcaggtctaaccgccccgatatgtacaatcttcatctgctcgtactcactagtgcttagccttagctttacctttaccaacacaagtaaacaataactgtgagtcgacagattcagtaagaaaagcataatcatatcgtaacaaaaacggattataataaagtgcccatacacccaatcataaccctatcccacgttccacacgtactcagtttagattgttcgtacgacaatactattgaccataatatcagcctatactcagtactctagtcgtatcgatgtgatagcatcaatcagtactttagctaaacatacattcattggtatccaatataactctatgtatactaatacttggataccgctatatcaatgtaatctaacatgcatttataaacatgcacgctaaatttatattcacatatacatattattatactaatcttatctcgattctaaattcttgtcaacctgagtgaaactgctgctcgacggtttataggcccctaagtcacaacataagccaaactgataagcgatatatgctaaatcgctttccggggacttaaaattgaaactaaaagttttcctatcgataactagcatggaaaagtcctaagtatcgaggaaacatgagaaaaacaataaaatggggaaactgccagtttttctggttttgcaccagtaaaaacggtaggtcgtttctgttgaaacaacctgttgttttccactgtagaaaaacataggacccccaaaatgacctaaaaccaaaataaaacataccacaagctccaaaacatctatacatgccataataaatcatttacaagcaataaaacctcagaaaacacagtaattctaaaatcaccattgttgaaccaagtttgagttcatgaactcaaacttggtcaactctacaaacatataccaaaaatcaaaccaacaagcttaaacaacctcaaaataaactcagaaaaatacagcaaaactcatctaacctaaacagcaactaactcaataattttcatgcttaagccaaccaaaacatactaaaattgaaaagagaactagagttggagcttaccttacgatcacacctctagaaacctttctaataacctctgaattgaagattgggagataaaatcttccctgattttcggttgaactgaacaagatagaaggagagagacaagaaatggattttctatttttgtcatttcttttgaataaacctaatttccttccactaaagagaacccctaaattaatttttccttaagtggccagttgccaacaaaagagggagccacctaaccatcatggtcaaaataactaaaatgccccctccttaaagcttaaatggtaaaatgacttaggggtaaaatagtccaataacataatctcgcctaacctcgacattctaaatgtatagctagatcgccccgctattctaaaaatactaaactataaaaaagtgaccatgtaggccttatgtcgtgttccactattactgagcataaaaatataaaaaaaatataaaattcatgtataatataaataacacacttaaaattcaaagatatctctatatttattatttataaaaataataattaaaagtttacttttgaaattagaccctaattatctactaattctcataataaagttaagcggtcattacagtaaactaaaaaaaatatcaaacagagagcctaaatcattacagaaagaaaatctcttaaaaaagacagagatcaaatctaaacaatcaagctcaaaagaaatgagaaaaagtctaattttagcaaccaatccattgaaaccattattagagctacaactttcacctgaataacagtaaaatttccttgagttcatcttaatttgaccaagaaagcaataactgttgctataaaagttgataactagaccaaaacatcaaataaataaatttagtaacttcataaataaatgttaaaataacaatcttaaaattatgtcatataaattaataatatagtaaaattttgaagaaagagaattgtaaaaaaacttattttttgaagtccttgcatcttgaccaagtgagtaaaataaaatcatacccatataaaatatataaagtttaattagcatactacttaatggtaacattaaaatgagaatttttatttaaacgaaaaatattttgaaatattatattatgaagaaaaaacttatctttattaactgagaaacagatcatgtatcactactacttcacgatattcttaggataaacacaaaacaaccaccaccatatattgataccaaacaaagcacactgggcacatactactatacttataaaataagtcacaagtttcaaaaaaaaaaaaaaaaaaaactactttactttatggtacacaataattttcaatagacatcaaaaggtgaaaaaaaaaaaatcaatattttatattgaacagtgataagtatacacaaatttaaaatacatttaaatagtaagtaatttaattaattatatttaaaatgtatctcacttatgagattctttttgttggggattcttgatctttgaagttgtatgacattttttttcttttttaataaaattattcattgctataaaagtaaaagaaaaaaaaaagtcttaaataacttgttacataagtgtatgttaagtttgtatatttgtactattattactctttattgaattgaatccattgttaaattctaattgaattagattgattatttaatgtcaatctcaaaatctaatcaaatctaattatatttaatatatactaaaaattatctatatttatttatatattataaaaatattaaaaaaaatgaaaaaatatatattagttatatttatacgggtgtttgttttgttttgttgtgaatttataatacttagttattttgtttatttttttttttcacaatattttgttttattttattacttagtagtattgttttacttatttcaaatttaaatttaattacttgttgtttaataatataaaagaaactaaaatattacttttattttagtcatcgtttccatactaacaaaattatatatatatttttcatatctcaaaatatatttaaaattactacaaaaaaaaaaaataaaaaataatgtcaaagtatcttaaataataaactaacatgatatagtctaatttttttttttaaaaaaatcatgatttaaggttaaataataaaaataataaccaaatgcgtataaaataaaattaactttaaattatttttttaaaataaaatgtaactaattgatatcttatttacatcaaaaacaattaaaaaatggacttattttaagaaaaacttgcaaaaaaatgaaaatttctaaaaaagagatttttctcattttttttatttttggtaattttttagatttcaatatttacggtattttagtatttgtgcaaataattttattaaaagtatttctataaataaaatcaattttatatataatattgaaaaaaatttaaattaaaagagtagtattgccataaaaaaaaaattcaagagattaaaatataaaggaatatgacagtaaattactcttaaaaaaaagtttttatcacttaatagtttgctacttcgcttaaagttgttggaagtaaacgtaaataaacaagtgataatcgggggttgttgaaaataacaaaattatttatttatttattacttgaaattagagaaagcaaaatgaaatccccaatgaataataattgaaaaacccgtaaatatacgtcttgtcatgctcaacttttacagaaggaaaaaaaaaaggaaaaaaagtgatataattgtgaaatgcgatagcttctcgttccacatttcttgctaaaaccattacgagagctaaggtaatttcaacgattctctctcaggttccatgccttgctttctttctttccctcattttctcttttctttgctattgtgatcataaattaatcattattttttttcatatcttcacacctttcacgttcttagatcttagagaagctctttatcaattgtcttttcttcttttttttttgggctccatcggttttctcgcagacccttttgcctattctttaatcccatcttctcttttttagctaatttttttttttgtctcgtgaagatttgtgagtgtagagttgaggcatggggagattgtttgtggtgagtctagaagggaaggtctacagctgcaagcactgccgtacccatctcgctctttgtgaagacgttgtttcaaaggttgttttgatcacttccgagctttgattagtcgtatcatgtaatgttttcatctgggtgttgttaattttcgttgattttgcttgttctttgcttcttaccaagttctatatatatatatatatatatatatatatattggttgtcacacatttgtttaataatgcgtttatattcttgtcgttgtgatctaggagcttcgtttttttggattataaatgaaacaaaatttgcggtggtattgattgagagttatgatcatgactttacattcaattttggttgtagcttttagccaagttttagctttgagccagttgatccctttctttccctgctcaaaaactgaaaacttgattctccatccgatccttttcggttggatgatttcaatgtacttggcttcaggtggtaaacatgtaatcttgtgggagaatgattgaattttttttatgctagttaagcttcgtttggcttcctaataaagtatctgaaatgtacttgtctcacaacgtcagtgtatgagattacttataacgttgatctgcaaggacatataaggtttgttctttgtgaggtgagggacattatatgatggttttaaaattctttaaggaagtgctaaactgttggaaggttttcttggtttatgggttgaaagaaatggatatttagtttctaatttgtattagttttgatgtatacatttcaaagtaaagtattcaacttattgtttgagaaggagtatctttcatagatgtcaaaatgacctgtttgactttatggtatcttcatatgccagatgcatatatggtatcttcaaggatgctgcttaaatacacaaccatatatgcatctgtcatatgcatttatggtatcttcatttactaaatatcaagtaatatggagagcattctcttggtgttgtgcttagtttcagatttttattagttttgctgagttttaataaataatgactttaatttgtaaaaatggatttttgtaatatcttgatgataattatttgagttttgttgtttcaagtggtctacaaatgtgaatagtgagatcagcaagaaccgaataatctaactacatgctttgccttgttgcttctacagtcatttcatagcaggcatggaaaagcttatctcttcagtaaggtgtaagttttcttttttctcccccttgaaaaaatatcaaatgttctaaacataatcttataacatttttagaactttaggaaaaacaaatttcaacccctcaaaaataaataaattcaagtgtacatatgtaagatcgtactattaagtgttagcacttcttaacataaccttcaactcttgaatcccttgaatacttgtggatgcaatgtggaagttatggactctctggtattatgtggaacctaaatctgatgctgcactggtgaaagttttattgtgctcttacaagtattgagatgtggcttagcatttcattgttcagtgtgatattgtgtgctcagtgatgaaataagtttgaaaggcttagaatcttggtccgttgtgtttttgtcaatagtatgtgcatgtgaactataaggaaaggcaaataaatgatgggaaagtttggactaatttctttaagagctgaatttgacattgggctaataaaggatgatttcttgtctctgaggaagtcatggaacattacattcttgaagtccttactagatgtaattctcatatccaattacttaacagatctaatatctctcttggagagaaagaagatagactgatgatgactggattgcacactgtcgccgatatcttctgcgttggctgtggatcgattgttgggtggaaatatgtaagaattagagacattaatgatatgtactcaacagtttttctaaatcctttgccccttgagttattttgatggttgatttcaggagactgctcatgagaagaaccaaaagtacaaagaaggaaagtctgtactcgaacggtcagtaagctatatagagagaacattctaataccaatatcaagtgaatttttcaagtaaatgttgtggattcaatgttgaacagggtcaagattgcaggtcctgatgggaacaattattggattaatcatgagtcacaggttggtggaagtgatgcagatgatgcttaaatctccattcataatcatatcccaattgtacattcttaaaccctcccaattattgttgtttttgttcaaatcatgtgtatctttaaactgtgactcctaattcggggcaccttgcccgcttgttcatcaataacatatctgaaaacatttcattgttgattctaatctcattctaatctgatttgtgttcaaatttcttgcgatcatagcgtgtaatattaaagttttgttgtgttaggcaacaaagtcttgctcttcttgacaagcaaatcagacttgggcatagctttttgtcccctaataggattacttgatttgttgaatgcttgttcaaaccgaaacaatctttgatgtcacagtttgattggtttcttagatttactattctcatcacatattatattatgtctcaatcaaatatgttttgtgcatttagaaaactagttgcaatttcaggacatggtgtttttttaataccttaaaataggttaaaaagctaaaacattgtgatcacatgagaattcaccttccaaacatcaagaaatccaaagcaaacattattagatagacccgagccaactcttttgcagccacattacaaactctagcaaaccaagaaacatgacactcaaaaagttgcaacctacataaactctatcaaaacatggaagataaggaccatcttagaggagactttttctcagtctatgtacaggttagcattatcatactccgattcctccatcacctgtcaaccagcagaaaaaagccaaaaaattgcactctaaaagaccactggccttcatctttttttcgcaaacagagcaaaaacttcccactcgtctttagccaccacccaacagcagcccttccctctttaaaagttgcatcaatcataacacgtattcttcttggctgaggtagggattgacgggagttctaaaaagtaaaaacacacaatcttagcatcatcatcaatattgatcacagtaagcaccttccagttgttgctgacgcctttttcctcttcatttgttataaattccatcaggaaggaggtgttcttgtgaaaagcttcattgcggaagtaccaaacatagacagcataattgcaagaaagatactaaactcctatttttgaatcaaaccaagtgttgcaagaatggagggtctaaaatccaggttacaatatcagccccattaacaaaaccaaactcagtcacccacatgcaccatttgctcttgaacttgaggcctttggacaccatacaaatgagaaaataatggttagctgagtctccacctttctctctacaaaacacacaatggtctggtgctctgccaaatactcaatgcagtatatctcccgtaggaaggatatacatgtacacttttgaaagcaacaattttaatcaatcgtgaatcttaaacttctagagtttttatggaaaactatcgaaagtccggtccaaaaagtatattgaatattagagtaaactaatcataaacagattggagcttttaaaccacttgtggctagctcaagtggccatatagtagtggggtgcgtgtgagttttgggagggtgggggggtcatgagatcgaatccaaataatgtaacttaaaatgtaatttaaagatgcatctatcaaaataaataaatagaagcccttagacaccttgatgcaaatagagatttactccatacattgcatctccctttcttgccttacttatgtatataatctattctctctcacaaactcaccctcaatacaatgactgaactattttttttatttaatctattataccctattgtactatcttggggtgtaatagatacaccctccttgatgtcaaaacatgccaacccagaccaacaatcaaacactacaaacaggtaaaggtcaacaatcaagtactccaaaaaaggcacatccaagtttacacatagacaccaaatacatatgtaaactacaccagttactgcagagtttgacacaacaccagtctacacaacaaccaaacaatgtacaagtgcgaacaatgaatttatgaatggccatcatacacacacactcggccaattttttgttcacaagtttgatgtttggacctacattcaaagttggtgccaaataagttagtactaaactaattaggtctttactcttactttaaatttgagaacaataatctgttttggaataagaacgagttaaaatataaaaaatcctccaaattgtagtaaacaaacctatcataccaatcaattggtatttcttaaaatatataaatatatatatacacattacactaatcttttaattaggctagtttggattgatatgtatagtagtaagaaaaataaaagagaaaaaaaatacatttctttaaaatcaacctttattaaaatttctcaaaagttcatttccgcacaattttaaacccaaataagagaaaattgaaacacattgtaagagttcaaatatagaaagaaagaaagaaaaaaagagtttgtttccataattaaatctacataaaacagggaaacaaaaacatataaaattggcttctccaatccaaaattaagattcaaaaccaataacaaatcacaaaactcctagatgataataacatcaataactagatttcagtttcattaatagaattatagaaataataacgataaaagagcagcggaaacattgaggttgagcttcatgactactgtgaaagtgaagagaatgatgagcacaaaactcaccaccaaagcactcagtccacacacactcagctgattctgccatgaagatctgttccacaacgacgtcatttcctttgttcttctggttcgttccttccgaacttcgtcctcctccttctcacccaaatatatacatataaaaaaatttaacgatgaaaaaattatcaaaccaacccacattaccatgaaacaatgagatactcagtcacgagtgactagtacttgcatgtgagttttgttgtggatattgagtttgctcttctgcgagtgcgacctcttccttgatctctgcaggcgtctccaccgacctcgatgttaccgggacttcaacgccggaagcattcgacggcggcggctgtggtcgatgaggagggccgacggtgccgtcgagacaagaagaacattttctctcgacccacccttcgaaatcgaagtactgaccgtgacccatgactcggcgacctgagcatagccgcccgatcattccggcaacgaatccgaggacagtaatgacagcaaggaccgctataacgggtccgaccgagccgtgacccgaatgggctgtgtaggcttgttggaccacagccatgggaggtggctgctgtggttgttggtcaattattggtgctgtaattgtagacattggtaaagttttgggagatgggtttttttttttggatattctataacaatgacacattctttcttagttactgagtttaataatgatatattctgctttttctagtatatatatatatatatatatatatattttcaaatcactatctctttttaacatttactcttcttaactttgtttttcaaccatggtgtatgcgttaattaaaatatttttattttatgtataaagaaaactatattgctccatgtgaccgccctcagaaaaagagagtaaggcagtactaggcaggcgtccatgttttttgcaggatccactaggcaggcagtccaaggctacctttcatgtttggtaaccctttaaagccttaagcctagttcttattgagaatgagttttagttttagtttttttatattttatggaacgattataagttcgattgagaatgagttaactaaggtaagttttagaaaaataatttaacatggagggacgatggatgttgtaaagactgaaagtaaaagatgatagatattagcaaatgaaagctttgggttgagtcgcgcactaagttgttctctttaaaacgtttgcgacactgcctaaaagaatgtacaagtagtcagaaattgtcagtcgtccccaagataaaacagcccaatcgtgaaatcctcactgtattgaactgtcaaatacactctaaaaatataatattacagatggaagtttttttgtagtgaaatttgtgtttgtttttcgtatgaaaaatatgtatttctcctatcagttcaatcgcataatattttctgaatcgtggaggagttgttgttgaacgtattgttagataaattaacaattaacccaagat

SEQ ID NO: 111021 - DNA, 4111 bp, Cannabis sativa
tttacttagtggaacccaaaaacaatcttttttttataaaggttatagatagaaaaaggaaggagaattttgtaatttactatgggaagcccaaagccacattctcctttttatatagttatagatgttacaaaaattacttatatttgatttggttttggttgtaatacaggtgtatttaatatttcaaaaggattgttcgagtctcaaagtaaatttttttgtttaaattattctgagatcgtttttgtatgttatttggttagacaatgagttttcatagttataaaataatctctccttcaattaagtctgttgcttattcattttgaataaagtaacaaaaaaattaataaataaataataacatatagattgtttcactttgatggttgagtatatgttaagaataaacgttttaaattcagataatgtttttttaatataaaatttattttgtatttttttagtgcttctctttagaatttaaccttcaattattgaagtgaactttttactattatatatattaacttttaattatatatattttgagaaaaagaaataattttattaaaaaaggcacgaagctaaagagatcctctgttaaatgatagtatagttagttacattagttaattatttttctgttattgtgagatgtctgaatcttgttgtaaccaacttctcttctcctagctttgtatataaaagttgtcatgtgtaatcagtgtaacttagttcatcttcatcaatagaatcacactggtttatttacttctagttttaacttttctctgttcttgtcctcaacatggtatcagatgcctaaacagtcctcgtcatttctcaatggccaattatagctcaaattttagaattctttcttctacttcgttacccaaaacaaacaatctcaccatcaatcactcattaactgttaaactcaataaaaataacttcctaccatggggacatcaagtctttgctgccatcaaaggtcgccatctaatcaaatttcttgatccaaaatcgattccacccaatttcctcaccactgaagataaacttacaaatcagatctctgaagaattcattgagtgtgacatattcatgatagtcttctagtttcatggctcttatcctccatgttcgagaagatcctcgctcgaatggttggttgtaacatagctgctgagatctagtccaaccttgaagaatactgctcttctcaaaaacgtgccaagatcagtcaatttcatacacaactttgcaaaatcaagctcacttattctctgaatgattatctactcaagattaagcagctcatagactctcttggtttgatcggccatgttctccccactcaagatcagatcgaagcaatcttcaatggattacctcgagaatactttttattcatcacttccttatcaactcaaaaagatgcttattttgttgctgaagttgaatctctactgatggcacaagaagtacaaaataaaattgctgattctaagcttgacatagccaaaccagaagttaatcttgcagcttagtcaaagaattcgtcacctcaacctagatttccctctcatcctccaccagccactcctcaatcgaatgttagtagaggtatgtcctttttaccaagaggttgtcatcctatgtttggatcttatcctactcctttgtacaacagctatggcttgctttctcttccatcatatccatccttatctcaaccatttcaacctccttgaggtagtttttatggtgctaatacaactagtcgaggttcatccaacacaaaacctcagtgtcaactttgtcacaaacaggggcatactgttaacaaatatttttacaggtttgacaaaaccttcactagtccaaagtgttttcagccattccatggtggatctgtaaatatggcagaaatataggccatgctagccactcctcagactatcaatgactcaagttggtaccctgactcaggggcaactcatcatctcacaccagatgtcacaaatctacaaaacactccagaactccaaggttcagatcgaatttacattggaaatggctcaggttttcatattaaacacactggcttttctaccattcaatctcctttcaattctcaacaactttatttgaaaaatcctcttcatgttggtgctatcactaaaaatctcatcaatatcaatcaatttgctaaatagaatcatgtctttttgaatttcatcctaatctcaaagatcaggtcaatatgaagactttgttggttgggaatattgaatatgaattgtacaagtttgatcaaccaactacctcatttcagtcaagcctcaatcctactgctgtgtcaaactagcactcatttcctattactagtgacgctacttttcaatgctttagttccttttccaatgtacctacttccaatttcaatttgtggcataacagattaggccatccagctaaagccactttatgtctgtaatggaaacatgtaatatttcaaataacaataaaactatttttcgatctatgcactgcttgttgccttggcaaactccacaaactcccttatcctaactcaaaaacaatctacacagctccacttcaagtgttacacactgatctatggggtccttccccaatagactctgtcaatggctatagatattacataagctttgtagatacctactctatgtacacttggatttatctgttaagaactaaggatgaggctcttcctacttttactaagtttgaaacacaaattgaacttcaactaaatctaaatataaaagaaatacaacttgactggggtggggagttcagatcctttacaattcttctagaaagttatggaataattcatagagtctattgtcctcattcccatgagcaaaataggatagtggaaaggaaacataggcataatgtggaaacttgtttgaccttattagcacactctagcttacctttaaaattttgcaatgaggcatatagagttgttgtttatctaatcaatagactacctactatggtgctacacaacatcactcctcatgaaaaactattccacacaaaactagattactctgcttcaaaaacatttggctgcctatgttttcctatcctcagaccctataacaaaaacaagatgagcttcaaatcaacaccatgtactttcctagggtatagtcttacacagaaaggctacaaatgcctttccctgatggtagactttacatgtccagagatgttcttttcaatgaacatgactttccttacaaaaagccagcaaattcatctcatacaacagcatcacctccttctaatttcccgacagcaactccacctattgtttcttctcccttagtctcacaacaatctcctaagtcacctttagtatcactctcattctcctcatccaactctttttctccggtttccaactctgaaacagtgtttgaatcatcttcttcccaaaaaatttctcttccctatcctatatcttctttacctccttcttcctctccatctacacattctaaccctcctgtaaccaaactcatctcagatcccaatttcacattttccttaaaagacctgggggaacttaactatttcttgggaatacaggttgcacatacagattcttggcaatcacttgtccccaaaagaaatatcttcaagacctatgcagaacaaagatgtaggctaccacatcaagctctactcccatgaaaaatggcctcaaactctctcagtttggaagtgatcaagtactttattcttctctttatagatcagtggtaggagctctgcaatatgccacaataaccagacctgacattgcatactcagtcaataaagtatcacagtttatgcaatctccacttgaatctcaatggattgcaatcaaaagaattcttagatacttggcaggttctcttgactatggaattcacttaacaaaattctccaatcttgacattcaaccattctgtgatggtgatgttggaaatattttaccaggatctagatttactactaagtatgtttcattaacatcctactatgaattcta

SEQ ID NO: 111022 - DNA, 3427 bp, Cannabis sativa
aaaaaaaaaaaccaacaacaacaacaaaagaagaccacaatcaacaaacaaattatgcaccactacaaatcttgcaaaacgattttaaggctttttttttttcaaaaattgctacaaccctacatcttatatataaagaagaataacctttgaaacctaccagaaggcattttcctcaggcatcaagagtagtaatatccctgcaaagaaattcatcgcctgcatgtatgtcagcagcatcatcaacataaaaaattatccacacgcagagagagaacgttatgtataacatcaatcatataaatagagtttttcaactcggtgaaagttaattgtaacttcaagatttgagtagaagttaatgtgatagcttcatcaaggccaattgacaaattatttactaaacttgtcctcgttacctggcagtatccaacagatggattatgtcgagcataagctaagagcaaacgcctcaacgagtttctaccattctcatccaaagcaggatgacctggaaatgtgcgtggtatgtcctgcactggaagcaaattcagcacaggaagagagccaaattacaatgtagctcaaaagaagcagcacctacaaatcaaaatgacaaagtccaaggcgcatgcatcaaatgaccttctcaatctgccttttccatttgctggctgcagcagataaggcatcactgtccttgcctttatcagtgttactttcttgagcaagtaaatcatcgtagtatctctccacccgacgggccttcacacctacaaaagcttgccatacctgtgatggtaagattatatcaaatagagcactttgtttagaatcttacgaaaaaaaaaaaattattatttgaaactaaaagtgtaagctaaacctctcctctgagatccttaggcactcctccttgaacgaggcactccagttcttctctccagggaaatataggatcaaaaagattccagccctcagcaattttttctgttccaatgtcatcttctgccctatcacagtcaacactggccgtagctccatcattcacaggtttctctgaatcaccatcagctgtaacaaattcctcactgaaagaactgtcaccaggagggatcccattaacactaatcccttcttccccagtatctgctttctcatagatctcttcaacctccacaatggtagcattcacagtgtcattcaagacatcatttacagagacgtcttccttaattttgtctgaatttttcaaagaacctgtcctgtcgataaattgaagttcattttctcctgcaacaattattagttcatcttttatatccttcttcttcttcttcttaacacgagagcccataatatcttctataacaccaagggatgatcgaatttgagcccatgtgtgaaccttccttggtttagtttcatttgaaagttgcacctcacttttgaggtcaccttctgatgaagtatcatcattagtaatcaattttctgtcacttgcatcgtctcctttcccaagcctctctgagattatttctacttttgtctcagtcgagtttgcctgtgatgcctcgttatgttctttatctgaagagcaaggttgagaatggcttgccagctgttcaaggaagtccttccatctattcgatctttccccttcctcctcctaatatcacaaagacagtgttaagccagaccaacctaatgtaattatatcctcattttatgttctgtttcttttagttgtcaatatttcaagcacaaacatataatcttatcaaaataataagctccaattgatggaataattatttatcatattgtcacaaaccatctcacttatctgaaaataaaaatattcctataaaacattcatttatgaagagttgagatcatatcaattacaccggacagagtcccactattaacaattcaaatagcggataccttgtaaatattagcatactctctgtatcgttgtgtgtgctgaggtctcaaggcaaatccataagaatccctgatggtatcaaacttataagaatctaaaaaagacaaagaaatgatgacaaatctcactgaactcgaagatctcataagagaaattcgaattaaaattcatgaaagtgcaattaagcaaaatataaatgtttcctgtgatcccaaaaataagggaaaattatcaaacgcaaagaaagctctctatttctttttttcacaaacctggaatcaacttccaacgagcggttactcaacaaggacaacaacatagctcaaaaatatttacagctccacttcccatagctctctcactctcatgaaaccagactcagaagtctaaatcctttactcttgtaccacattttacatcactcacactaatcatcaacacaaaacaaaatcaaattgaaaacccaattgacaaacaagatcctggtttgaaatgaacaatgtcttgctatagagagagccaaaaacagcaaacaattgacccaataatgtggaatgacgataacaatctaggactagaatttgtcaaaaggccatgcaagaatttaggggtcacgtggagaaacccaacaaactgcaaacccatatttccatttttttttgtaaactagaaataaaattaaattgttacaatgaatatgtaatgtatgtacatgtatcatctcttacaaaattatttatgcttgttatgtaccttcgaggctcgagattgaaggtgtgatccgccataagagcgattgtatagggtttgacgaagattgttggtcctctataagttgtatattgtaatttgtaaggttccgagttgtagcgagttgaggtgagcgaactcggtaactggctatcgctctcgtctgtttatggtcacgtgtctggtttttttggagggagaaaagggacgaatggctccttcatttaagggttctgtcccacgtgtcgcttctcatgtcttctaactaactacttttttttctaataaaaataagaaattttgataaatatgggaattgaatacatagtttacttttttatggcataaataaataagactatagggttgggttatgggtttttttttttatttttttacatttatatgggtttttttatgccatatttttgtaaaaaaaaaaagtaaaaatctcatatttgtaaaacaacaataagttttgccggaaaagtcattggcaccgaaaaagtcaccgaaaaagtcatatattttctaggtttgcattttgaactttaggggtgattcgaggacttcaatctcaggggagaagggtgatctgcgtgcccggtcaagtttgagattagtgagttttgggccggtcagaccttgtaccatgttttaagttgatctagttgtgcttgcacaaatggatgaactttttcaacttgttgaccggcctgtgtcaca

SEQ ID NO: 111023 - DNA, 6615 bp, Cannabis sativa
tttaaaattttgaaccaatattttccttgtaataatttatatatattattgtttcttgcacataataaatattagagcatatatgtacaatatatataattaagcttacaattattgtgaaataattgattaatagctaacttaactaaacgtatacgtacacatattagattattgggtatggctggtaggtagtctagatattttgttagcaattaattaattaaatttttgttgtatattaattaataattatgggataattaatgaatgaattgcaaatcatataatatagcatggcaatgtgattaacacacatctttatcaaatgattaaatttcaccaaacaaactaacgagagttttatgatctttacctaataatttttttagaaaaaactatagcatggttttgataaatgaaattccaatgatcttcaaccaagcatgcattgcatatacatatataaatatattataatttaatatatatatatatattgattttcacagtatcatcatgcagatcgaaatttaattcctttcacgcaaaattttctcacctactatatgtatgattgcatgttattaatctgtaattgaattattgaaacgaatattttgtcctttttttttctgtggtgatcatcaaattgtgaattgaatgcagttcagaaatctcaaaataatcttatatatctagtcgaaaaatgttaaaagataattataaatatcaattcttagtattaaccatcgtaatatgtcatatcacttttcatgtaattaataattattataaaaaaaattgttagttattcttaaaacgtcaccgtatactgataatatttggcaccaatatgcttatatatatacatattgagcaagaaagcattcaatgaatagtggtaatatatattatagatataaatgtgtaaatatccttagaaggagaaaattgaaaaaactacttatatatatatattctcacgtatattcgaccccataattaatcttataaattctaaatctgaatgggcagttataatgtgaacttgaagaacatttaattaatttatttcaaattaatataattcagaaattgttggaatattcaagggctgtgatcattttgatttatttcatgatactgactactcttttcactaacagttcccaaacttaatgcctatatcaatgatggtccatgctactttcattggataaaacacaaatataaaaaaagtagttgtaaattagtaatgactcgtctcatttttatatttatatttacatatatattaatacactttttaattttgccttttttgaaagtcaaaatttcaaataacaaaatacgggtgatctaactcgttattagtcatctttaatttcatcttgatctgtggactaaatattacaattttacaaatcaagagttgaaaaattgtactaaagtctatgaatatgagctttagtagatcagctagcacaaaaagcagaccaatatatataataataataatatgtacgcttctcgatatataccaaagaaattaattaagattggtgaataaagagaaaagatggtgtgttttatttcttttttcaaagagaaacaaaaccaaaatttgttaattgagcggtgaccaataattctacctaactaaacattttcatgatgctcttccatgcccacaatacaacgataaatattacaattaatcaaaaaacacacacaaattaaataaagcaattaattaaaggtttcttgatctgactcacatttctttttttgacatatatatgtactatactaataataatatttgaccggtcaccaataaataataatatttatataaatcttttatagtaaacccggcggacacataatatattattaattagggtatgattattggatattagtggtgtctaatattttttagatgtgtcatcttagttagtaatattttataaatgttattacattaaactatttgaaacgagatacttaattgcactaatattaagaatggtaattaacatgagttagctaagagttggtatatgacaaaacaaagctgtagtggcctcctttgttgttggacaccagtggtacttagtattttctaaatgtatagtcttgaattagttagtcatacaatttaaattttattacattaaattatataagacccaaatagtgatattgacacgtaaaaaatactaattaaaatgaattagctaagaaggtgctaattagcatttctttgttaattaactaattaacctctgttatattaatgataaaacgaagtagtggccccctttggtcaacttccctatttacatctctcatttaatggctcctataaataatcactactcctcaaccctttttctaccacaatctcatctctctctctctctctctctcattttaacacatctttcaaattacatcaacttactttttctctcttcatcacatatatatacataatattaacactaattagctaattatactatacaatactactatagcaaactatgttctttcctatggtgattctcaagttaatagattggatcatataccaactcttagccaattcatgttacagagctttaagaaagatgagaagaaatttctacgcaatagtactccgttcatcacaacaacaacaacaacaacaactcttccccaccataacaaagtgtggtcttgactctagaggatcacaacatgctcatattgtcactgatttccacggagttctcctgaggactcactctttcttcccttacttcatgttagtggccttcgaaggtggtgggattttaagggcttttcttcttctattgtcttgttcttttttgtggcttttggactatgaaatgaagctcaaagccatgattttcatatccttttgtgggctcaagactaaggacatggacaacgttagcagagctgttttgcccaagttttatttggagaatcttaatgttgaggcgtacgaggttttggcttcggctggtactaagactctgctcactagtcttcctagagttatggttgagggttttgttaaggagtatttgagtgttgatgatgtttttggaactgagttagaagttaatgggaaaagatttagtggttttgtttctcaaaatggtttgcttgttaagcatagagctttgaaggaacattttggtgataaaaagcctgatattggacttggtactccaagctttcatgaccaactcattttatctctatgcaaggtaattaattaaaaataattattaatattgtttttaatttctctttttgttgcatattcatcataacaatgtacttattttgcatttgtattaggaaataacataataattttttagtttttttggatggatttaatcataccaaatatagtttttatctaataattaccgacacctagggttaagacctggaaaatactaggtgtaatatgaatcattatatatatatatatatatacatctgataatagaaaaatctattattaagaaattgaaaacaatccaagagatatattgcttagagataattttaaaaagtataaaaataataaaagaattacaaaatacagtaggtatgaaattttcaacatttttttaagtttttagattttgtttacataaaatacagttttttattggatttttgttatttcgttgttgattttttgttatttatatattatttttatgttattttgatgttcttttcttattacttttatttcttatatttttatagaatatcgtaaatatatatataaaaatttaaacctaagaatgtaattttttttttatttcattgtaattgttcttattggttattgcttcttgttgagagttgtaattaattttttttttatggttttacctaaccttacaagtttacaactataacagtactttcttgtcaaaactctatttatgattaaattaattactttggtttaatactaattaatcctcgaaaattagcgcattaataaatggctgcatgtacttttgatagctagctggctctgtattaatatcattacatgcaaatagggttaaatcttttttactcgtcacaagaagaaaaaggtaaagttaataaatccaaaaatatggagcgtgtgaccattacacgtgtaaaaatataggtgtagaaaataattgcaaccatttatttatcactctaaattaattatcatgatgtgactatgcttatatactaataaatgtattttgtattaatttttgtaggagggttacatagtgaacgtgaaagatgctgagaatataaaaaatggtaacaataaagtaactatgagaagggaaaattacccaaaacccctcattttccatgatggaagattagccttcttgcccacaccagctgcaactctagtcatgttcttatggttacctttgggggtcattttagccattttcagaatctcagttgggtttcttccattccaaattggaaccccattggggattttagctggcgttgacttaacggtcaaaggtgacaccaattgggaaagtaacgatcctcaaaacaaaaagaaaggaatcctgtacgtgtgcaaccacagaactctagtagaccctgttttcataagcatttcattggccaaaccagtgacagctgtcacctacagtctaagcaaaatgtcagaattcatctcaaccattcgaacggttaggttgactagagatagagagcaagatggtttgaccatgaagaaattgcttagtgaaggtgatttggttgtttgtcctgaaggaacaacttgtagagagccttatttgttgaggtttagctctttatttgctgagttaagtgacgaaattgtccctgtagctgttaacgcaaaagccactatgttttatgggactacagctagtgggctcaaatgtttggacccacttttcttcttcatgaatcctaggcctggatatattgttcattttctcgggaaaattccaaaagaaatgtcttgtggtgcaggtggaaaatccagctgggaagtagctaattacatacaaaaacaattggctaatactttgggttttgaatgtactagtcttactaggagagacaagtacttgatgttagctgggaatgaaggaatagttggtgataataataataataataataatgataataagaagaagaaatcagcaggtttctcctatttctagttcaaattatttaaaaaatataatattattattattatgttttaattttgggaaagacttataactttgtattttctcatcttatgatgtaacgtatatatttccttaaatataaatatatgtatttatttagtttattagtactacattctgttttaatatattattttcttttggggtaaattttaatatatagtacttgtttcattaacagtaacaatattattcaacctactgtgtatatattctaaatctatgtatacttgtataggattattattgtgttcatttttcagttctctttttttacagttggtaagaagaattttactgggccttagatgtatttttgaattttggaagaaaaaacgtcaaattggaagatagctgagagagaggggagaagaaattaaaggaagaatttattataatttatagttgcatttaaatgaagattgaaaagggtaggtgatcagacaaaaattatacagtatcaatgaacaaaatcatgaagacgaacagtacaaatgtcaaatgtcaagacacctttaaattattattatcattttatttatcgttgaataaattatttgtttagttgtggttggcgtgggtactaaaattaacaaggtaacataatcgacataagtaaatgttaaacatcgaacttttttggcctctggattaagttagtcctagacacagatttagcccacttaaatttagggttgagcttgttcgtttataaacgagttgacccgacctaatatatttaattatttatattaaaaatcatgtttaatttttattaacttatcaactagtaaatttatttataacaagtttacaatgatacatttatgagtaatcttattgtgtttaacctaaattatcactccctactttatatagtaattttgttttccttttttcaaatgtgtactagtgacaattgacacctatgatgagcagtggtagtactacattatacaatatgtggcaacaatttaatgcttatttacttgaaccaaaaaagacattaaatgcttatttaattgtcccaacgtactctctttttcattattcactgtacgatattaggtttgcctcgtcggtgttgggaaagcttcgaggtttactgggtgtcctctctttggtttatgttttgtttcttactaataagatatcctcccatattgagaaatgttaacctttgccaaactctatatggagtcacttatcagtaatttgcggtataaatactaagtttaactcccaattatatataaatacttaagtttaatttttagcggtaataatatacttaagttataattttgaaacttctgta

SEQ ID NO: 111024 - DNA, 5029 bp, Cannabis sativa
  modified_base (4006)..(4011): a, c, t, g, unknown or other
tttcatttcctctgtttcttctctacctttccactaatagagatattaaagaccctaaaactaaaaaagtttgatgagtttttctttacatgatcatcaaaagagtagtaatatttcttctcatgatcaatggataatttcatagacttactaacaaaattattaccaatatcaacatataagaaaatactatataaaattataatgtctgattaagaaaatcttattgaacctcaaaatgaggagaaaatatacattacactttttgtaaccaagtatttatcccactaaatttctaacaaagtttttaatgagtcaatatccaactaatatttatatatgaatcttcatattgtatttacttttagttacttgattttcttattcgtaaagctacgtgtgtataaaaatgaagatgaacaatgagatacaagattacattctcttttttactctctattttagtttaatctttatactacttttactattaattctgtatcaattaaaaatacaagagaatgttttgatcagtaagtttcaaaactggctgaatagaacatcttcgaacaatagacaaaatttgctgccttctaaaggcaaaatccaagattttaaaccaaatgaacaaatagggagaaaccaagaatttactgcttctacagtagtaacttctttttacatgcttctattttcatactatggtttaaaaataagagtcaacttaccatacaacatatttctaattcatatttatatcaaaagagaaattgagtaactacagtttgttataacatgacctgttgaacaaaccaattaaccgaatatccaacgtcgaatcgaatcattattcttcttcggtagcttcagctgcagctatctcagaatccaatttgttcattagctggtggtcactgacatgtcttgccaccgaaatcatatcaagaatgatgcttggatctaagcctgcaccaccacgtttggtcaaaccacacacatggccctttctattgatagagattgaaacagctgagctcatttgagattcttcttctgcagtagcatccacaatgtagtgcttacccacctatgagagaaataagagaagttaaccatgtgccaagaactaaaagctctaaaatgataagaactttctgtttaaatttagatcacctttgttaatgtgactatgacagggattccagatgtgtcaaactgcatgaattcttcatcacttatttcgacctctggttgatcatcaccagctgaggcacttgaagcaacctggactcttgggatgcctgtattgctcaaagcagcctttcggaacatcagtttcatatgttttcttcttgtagaatcataataagaagtactttcagttgaagtttctagcagattttacaggcgattaactcaataaatcctgaattctatgaaaattgaatttgtaaacatcactggtttagaaggtatcacgtagtaaaaatgtaagtaataatacatatccattctaaattttaccatgtgctgcatcggaaactttaaatgccaattggtgaatgtgacttcaattactattgacagaacagaaaagtaatttttcaattgagaaacagtttcactgtgatacataattactcagatctatacaacacccatttgtaagagtgctggctaaaatagaaatatgtccagaattaagtctagatgttttaataggaaaattgtccgggaattaagtttagatgttcagcaaaaaaacgtctagatgttttactagccaattgtgacatattaaaccaggacaaattacactaaagatatcacaaaaacaaaaacattaaaagattagatcggaagaacaaccaactacctttatagcagcacctagagcatctagcagattcccatctgaactaacaacaaggccgtctatatagagatcccaacaaatttttccttccaccactattaaagatgagggattgattccagcccctgaagaaaaattaattttgaatggcatatcaaattctaatactgtctcatacgaaaaggcaagtacaaagaaatacaagtatcagccatatttttccacagacctgagccacttttaccacccaagagacaacattgtagagcaaatgagagttctgttgacaattcctcacctcctctgccctgtgtaaatgtaacaattagttagctttcatatacaaatatacatccatgaaacataacttacatacgtgcagttagcgagtaaaacacacaggtgggtgttatctaatgcaatgtgtgtgtacatgaaaaaatattactgggtgttttaaatttcattttgttcatacattaagctctcatgcacaaaaataagaaagcaacaaattgaaagtgcacaacctcaaacactggggctgcggttgaactgcaatcaacattaatagcaacctttcctttatcaggttgcaattgactcggcctcccaagctcagcctacacttgaacagtcacaatacattataactcaattgcatcaggggaatgaaaaaaggaagagaatctaagccaataccatacggagagttaggtaccttcacactggcaataacatctgtgccacctaatctgaccctggcagaaccatttgcctgcaataaggcagtgcaagataaggattcaataaattttgttctcaacatcaactgaagaaaagtaatgcaaaaaagaataattcaaactaaatgatgacgaagcattttaataatacaaatgtacctgaggaatgactcctgtttcaacatagataggtctgtaagttaatcttttccggccatcagaacgaaggtcttgagcaataccaccctgtatgaaatgtttctctcccagggatagtcccaccatctttacaagcgcacaaaaaacagagcggataataatggagcagccaatctacaacaacaacaacaccatgctctaatgaaaaaagtgagctaatatgaaacccttttgtcctttgaaaaaaacaaataatactccaaagaaatatttcaaaatacagtaacaagtaaaacaaagttgttttacacatgaaagtataatagtcagattttgaacaatgatgcactctcatcttgtttcagttcaaatgcaattgtttctataaatcatcaaatcaaatgcgcaaaactattcggtccaaatgctttaaaccgaacatcattttaattgacaatgacatagaatttataaattcaatattctaatgttacatacagtaatctgaaatttgttgttctagaaatctttatgaattgtgaaagcttaatcatgttcttatgaactatttgtgagaggtatatcgaagtttgattactaaaagaattataatcaagtaacaaagccattgttccggaacagttcgtcattacacacctgtgagtgaagtagttgtttgatcgagcaatgagtgaagcgcagagcagccgtgcagtgaacccgagttcgacaaccaacgacctatgctcaccaaccggaagaaatccaaaaggggccgatggagagagagagagagaggggttttggtatgagaaagagttgagatttaagctaggttacgaggtatgctatgttaattgggcttctgggctaactcaaacaacaaactaaaggacagcatatatacaattttttcatttttttttttattgtggaatagaattttttttaaaagttactatgaaaattttatactgtgtactgaatttaatattcatagttattctagttattttttagttattattattctgttttgttattttacggttattttataaaaagatagtatttttgaaaaaaaaaattccgtatgacattaaaagtataaatttttgtttaaaatctaatatttttgtaaaaattcttatatttatagggctatttacatttacgggaaaataaaaaaaagaattatattacaaatacataaaaacaataaaannnnnnacaaaaatacaattgtacggaattttaaatatttttacaatttttatgattttatttacagaaattacagtctttttatgttgtactcttgttaatttgttgttaattttttgtaatttgtatgttattttttgttgttattttaatgttatttgaatgttattttcttattacttttatatagttttctttccgttttcgtgttgtttttttatagaatattattaaaaaatatatataaaaaattctttaaatataaaaatataattttttttaccaaagtcttatctaattatcccatacaaaaatatactaaatatgatacttaaaacacaaaacttaacaaatatgagagatgacatttctaatactataaaaaacattaaaataaaatcagtttttttcttttaaattttaaaactaaccaaaatagattacactcctctctctcactccaatctcttctctctatgcgatcaaactctgtaaacaccaatgaatctcttctccaccaatcaatctccacaaatcaatctcagaacaccaaacaatctcatctccaccaaaatttagcaaatataatatccatctccggcagcaataattgaagacctaaaaaagaaaaatacagatcaaaacacaataaaaaaaaaaaagattcaacacaagtaaagagattcacatcattctacctacacatattaaaatgttagatagtatgtaaataaatcatcatcattctgtgattatatatatatatatgcattatgcataaattcataacaactcattttgttatttatcaaaaacatgtatcattatcatcattctataaagaaaaaaaatcatgtatatataagtcatcgttaatctataatttttaatatatatatatttatatatatataatgtaggtgcacttttaatggatattaactatttatgagtaatattgtgaaaatttaaatttttatacttagtttttctactaggtgattgttacgtgccaagccacgta

SEQ ID NO: 111025 - DNA, 10042 bp, Cannabis sativa
tccacgtgtcccctcttgactggtccacgtatattgggcgaatttaggagcaacacctataaatacccttttatttctatacgaagggggcatgagaaccttacatagctaaagttctgccaatattgcttcatttcttcttttcgagagaaactaagaatagaattaggatttcttgctaaatattataaacacatcaaatatgccattaaaggttggactgaggttaattaacacctgaaccacgtaaaaattttcatcttattaatttttgcactttattatttctttagttctcaaatatttagttttcgaaaatctcgataagtattttggtctttcattgagagctgaagaaagacgtaaacctaaagtgttactgctaccatggtttttacacgaaaaatggtaactaaggagactcctcaagacggtgacatccatgttgttatggaggatgtaaaacctttatctccaagcctcgcctagctgagcaatgcgagaaaatgggatacatccaacccaaacaatcgagaggccaacctcgacaaacaacatgacaatgttgatgaagactgagatgttgaggatgaggaggaggagggcgatggagagtacgttaaagatgggtactacaaggacgactactattatgagcaggactctgaggtgattcgaatgtccaaggagttgttcaagactcagtaaaaactagcccaccaagagaaattttctcaaaaaatggaaaggatgatggcccgcctttgaagtaagttcagagacctagatgaaagagattcagacgatgatccctcagtgaaatatgttggaggaaacaatagggaaaaccctactaatgctagaatctctgctattgctcaggacaagggaaaggcaaaagtaggcgacaaccaaaaccttaatgctcccgtacctcctcgaaaaggcatgaatccagccaacgggccttctcaggcgtggaagaccattgatgcctccgggctcgggcatccttttacccagaaaggccctactacgtcaaaagggactggtatgaaagtaccaaagctcaagggatggaaaaaccaccctagtgactctgtcaacaaggacggtaggactaggggacaaaattctgatgacagttggtccgcggtgaatcttagaaggtgtttggatgccaagtatgaaaaaacaaaaagtaaaaaggcaaggccatgtggtaacgacctcaaaaaccatcttaacgacaaagtcctcggaagagatctcccggatagtgataccaaaagattggaagaacaaattgttgtactggcaaaattagtctgaaagcaaagtgaggccctcattgactctgaggatgaggacccaaaattgtgtattagaaggatcatgaaggctctgctcctggagaacttcaagatgccccaaatcaggccgcatgatgagcgcacagattcaaagactcacttagccaagtataacaaaatgatgcatgttgccagagtgagtgaagacgtcaagtgtttgtgttttctccttcaccctcactaagtctgctgaggattggtggaaaaggctggctcccaaatcaatccactcctggaaggatttgcagtctacctttcgaaaataatttatagctgcccgcgactacgacatggagatgagatccatcaccaacatcaaacaacaggcgagagaaagcctaaagagtttcattcagcgaatgatagaggcagcaactaaaactaaagtgacagacgacatgaaacttgtggccctgcaaattggacttgcagttggctccctcttatggggagagatgcaaagaagaagggtcgagacgttttccgagttcatggctaaggcacaaagctttattagtttggaagacgcttatcagtaagcattcaaagtccccttggcatcaactcttattgcttctactcctaaatttacctcactagttcctattcttggaacacaatataccctgacagtctatggaccatctgcatccatataaataatatattacttgaactaaaatagattataactagtaagacattaattaatcatcccgtaaaaataaattaaaagtaatattgagtctatttatagactacatagacaatacctaaactatttttaaacaatgagagggttttaaataaactgataaaagataatatgattttttcctttagtgaaaatttgaaactctcgaaaaattgtaaaattattttgaaaaaattatggcatgtcacgtgatcactcaaaattttttctttatataaatatatataggtaaattttattcaattataatagggtaaatactattttagactatgtgttttgtaaaagttattgatttgaccttctgttttattagatgacaaagtagaccccatatttttcaaaattatacaaatagggtcctgaactaatttcttatcaaaataaaacttaatggtaatccgacttagagatattatgacaaaactggttaaattttctgtatctattcgtgttaaaagttgtcttcaaattagttatattaaaaaaaaaattaaaagctaaacttaaaatcttatttatactattttaaaaaatataagatttattttattatttaataaaatagagagttcaatctacaacgtttctaaaataaagaatctaaaagaagatgggtttaggtttgtttggtacacactcgtcgctacccgaagctaaacctaccttaccaacaaacgagaagacaccaacacacagcgaagccaaccaaaccgaactaagcaactatataatattattattctttaaacacatatgcggacatcaacagtgaccagagacaagagaaaaagagagagaaagagagagagagagagagagattcacctaactcacccctttctttctctctttctaagttcgcctccactgttgcttgtttctgcctcgctttagccgccctcctctgtcatattcctcatctcaaaacccattatcatcttctgctattctgaattgggctctcctcttaccatacccatttggtcataattgattattggcctctcaaacgcctgtaataataataataataaataataataattgaattatagaaggaatgttttggcttttccggtagaaccctagaagaagaagaagcaaataaaagagagcgtgtccgaaagtttgtgtcttttattttttgagattaatgggtaagagaggagttcaactatttgatgagacgaaagatgggttttactccgtcagcggtttagggtcttctcaatggaattcccaagaggggtattatcaccccggtggcttattcgccagcgttggtcaggtgggaatgggttttggtgtttcgccgaaccctccgaacccccgtgacgacggtgggggtggcggcggcatgaagcttccgtacaacgacatgtacatgaagtacgtggagggtattcggagattcggtgttcaggagggggatgggctgacgaagaagcagaataataagaacaatggtcttaaattgaagattaaggtttctaatccatctctacggaggttaataagtggtgccatagctggggctatttctcggactgccgttgcgccattagagactataaggactcatttgatggttgggactagtggccattccacaactgaagtcttcaatgatattatgaagactgatgggtggaagggattgtttagagggaattttgtcaacgtgattcgtgttgcaccgagcaaagccatagaggtacggatttaatagctcgttagactcaaattattgcttcatttcgctccttatgatgaatgtttgtttgttgttaattgatttactggtttatataggtatccaacttttagtgtttagatttgctatccagccatattcgtttctttttgtctttcgttatttctcaatgtttttttttttttccctcttttgtttggctgtctatgtatttttgatactgaattctttacataatgtttttactgacttaattgttgcaactactacaagtgtgtatccatcagaaggaagaacgtccttttcgttgaacgtaagaccgaaaactatagcttctttctcttctaatccaacttaacgttttgtaattaagtactgattagtgaagtcctttgtattttcatatgatatacagaggtttatcgatattctcattcttgatttaaaaatatctatttggagcactgcagtgcatgtggtaaagttcaattgccctttagttatttctgaagcaactgtttcttttctggtaatggtgaaatttgaaaggatttgataaagggttcatatccttggaactacaactacttttacgtcctttattgagtcagactaaaaggttccattgggtacagatatgttttcagaaatcaaatctcttataatgatgatgttcatagttctaaatgataggttgtgttttacattgttttatatgctctatccaatctatgctcatggccttaggtgctgagatatatttatatatatatatatgtttatttttccccctggaatggcaaactttctgttttgtatttaaatattcctatctctgcagctctttgcttacgacacagttaataagcatttgtcaccaaaaccaggcgaacaagccaaacaccctttccctccctcactaattgctggggcctgtgctggagttagctcaacgttgtgtacatatcctctagagttgcttaagactcgtctaacaatacaggtactttcaaaataccaagaccttgaatttctgcatttgatgggcacattgttttcacctctatattaccatcgatttggcagagaggtgtctatgacggtctttttgatgcgttcttgaaaattttacgggaagagggacctgcagaactctacagaggtcttgcccctagtcttattggagtaatcccatatgcagccactaattactttgcatatgactcgttgcgcaaagcatatcgaaattttctcaagcaagataagattggcaacatcgaaactcttctcattggatcagcggctggtgctatttcaagtactgcaactttccctcttgaggttgcccgcaagcatatgcaggttggagccttgagtggaaggcaggtatataagaatgtgattcacgcgcttgcttgtatcctcgaacatgaagggatcccaggtttgtacagaggacttggtcctagctgtatgaagttagttcccgctgctgggatttcattcatgtgctatgaagcgtgcaagaggattttggtggagaacgacgaggaggcatagaaaagtaaccttgtttaaggaaggagaagagttgttactttaacatgtttgttgtgggtgcaaatagaagaaagagtagaatatgctatcccgaacatggcgtctatttaattttccccccttattttactgcaggatttgtttacaatttcagttaggaagccttgttttttcaagagttaaggccaaatgacaatcatttttacttgacaaaagcttcttttgtgttcttcaaaaaataaataagcttcttttgtggacgctcgagttataaataaatatcccaattgcaggtggaatggaatgtattcccacacaaaagataatttgataactgcattggggttcatgctcaccaaaataataagtatatgtatccatatcccatgaagccttggccatatccataaaatttgtcagccttagattatactgaaaatacaaacttgtccacccctcgtgtaaacaccatcgaagcaaatataatctatggtgcccaccattgaagtacgtacccatggaagaaattgtgacatttattatgttttttaatgttttaataattggaatccaatttaaagctaaaactaaagaaattttgtcactttaagacgtcaattcatagatttgattacttgtggatgaattttattttacttttgtttgcacttttattttattgcttaaatctgaaacttaataagttctatacttatgattaaaattgattcatcccatgaaatttgattattaaggtaaaaaaatgatatttaacaatacataataaagtattatgaaaatttttcttttaattcaaaacgatgcctaacgatagtactatgaaaataagatattttagacgaaaaaaaagcaaatttgatgcttaaaaatagttttacaatgattgtataaaaagtttggtaagacatctttttaaataattgttgggataaggtaaaaggtttaagagataatcttttacgttttcatggttatcggtttaagattacttcttttatggcgtgtttggaaagtcatgttgtaattagatttatctataataaaatgtaattacgcaatttgacatatttgtatgatcacgtgattacagtgtaatgtgtaatttaaggtaattgaggggtttcaattacactctctaattctttcagtccccatgaaaattagtgtaattatactatgtaattactaattttttattttattttaatattaactactaaaaaatattatttttttaggtaattattaactattttatgaaacatgatattaagaatttatatgtaattatcactccatattcaaacatattttgtattttaaaatatagtgtaattgctaaattatgtaattactaccctaacaattaccctacttagtaattataaaattacttttacacatacccctaatttcaatattttttggtaatatgtacctttagaatatgaaggacttagaatttggagtgagaacaacaaattttgatattatttatgtattcgtctttattatggtctaaaatagtccaatttgatgttcaacactctaaatttttcactaacaaatttaggaaagtattttatttaattaaagataatcagtcatatatatcaataaatcacatgatgtatacctataaaaaatattgaagatttgttaatgagaaaataatataaacaaatcatatgatttgttgttacgattgattctcttcaattgaataaaataatatattttccaaaattggtcgcatcattattataagtgttcatccaatttaattcatatttttcttctagtgcatctgatttgtactattcgtgaatttcatatttttaatctaatccaatctgtataataactcaaatccaatgtattaatctcgtttttagtcaacgacgcagagtcagtaaatagataatataagtgtctgaataataaaggtaatcaaaaagttatatatgacaaaaaaaaaaaaattaaagattcgaccctgtaatagcccactccactttttgttgcatttctatagagaataacaagatcacatgaacctgatcaagtgagtttcttattatctctcaagtttacaaatatttctgtagagtttttgctctcttcagaatacagaacttcgtcctcttattagtgaatatgatccactatttatatgaagaataatgtagaagatttatatttaattagaataaataattaatgttgattgagtcgatcccacgaaattctctaatctttccttattctcgcaatccctcaattataggagtgtggattaacttatttatagagaaatcagttaaggaaatgaatctggacatttcctttcgtgagagtctttggttggatatccttcctgtggtgagtcattggtgactcgaattgctggtggataaagtctatccagcatatgtctgaggtcgcgcgactccatctggtccatatagccgaccaatatctcttggagagtcttggagggttttcaatcctctcaacctctttcatgtttgtcatgtatcacatcattctatgccacatcaccaaggtaatttttggaataacattttccttgtaagtctgcacaggaacttctagtcgtacgaggactttttggcttatgtgatgcctagctttgctcaattggtctgtccaacctgggcattatacctaccagaggaaaatattcttattgtctttttaagtctttttgccatgattacttctcttgaaaactacactttgaagattgtgtttgacagttacatgttttctcaagtggcttttattgcaaaatggggcttttggggttttttttggaaaaaaatcaatcatttcaaatttaatccccaaatttttttcccacattttcatttcctctataatactccgaaggaaacttcatttggaactttagcacctttgaattttagagaaaaaaagggagagttttttgagttcttgagttttcttctcagactgatcattgcacaaactactcttctagggatatcttcttcacatatcaagtcgaatagtgagtaagtttctttgttctttctctctttgactttttacgattttgaatgtgtatcttgtaagaaatgttcagatgttctttgttttttgatttggaatctgtgatttgctcgactatggttttgtttattccatctattaagggttagtctagatcagcgttctactcttagatttagcaagttttctcatggattttgaattattctagaaactttgggtttttaaaaacccaaaaaaccttttctcattcaaaactctatcaaaaatatgaagtttcttgattttgattcgaatttccttctagtcagagcattgaaagtatttttccatgaaaaactttttccacgatgttcggtgcctcacatctctgtccttcttttgtagatgaatccatgcaaattttgggaaagtgaccactgaatagatgacgacctgctcggactgctctttgagcaccaccaaacactccgagcaacaaatccatcttcattttcaagcaaaacttctttttcatcaaagttcaccgagaaagatctctctagtgactctttggaatcttccttcaaacatcatcactacatcgaccaggtaagtggtgatagttacgaccgacacatttgggaattaaactaaggttggaggtagttcctcccagtcttgtggacgtacatagtctaaccagacgtctaggacacactccctgctggacattccactccgcctaggaaacaaactatcctagcagactttgttgtttctattgcaaaacatacatccaagccaactcaagctgtaaggcttaacctagctcggacaaagtaaacaacttaagtagcctcggttttggatccccacattaggcggctaatggtagctcaagctcaaaatgatttggaaccccaagaggcatccaaggagaaagttgaattggagatggaagagggtggtccccctaacattgatggtcgattcaacactaaggggggacccatgtctccttcttaactggtattagaggttaatgttgactacatcagggaggagcttccagaagccatgcctgttcggaagaaatctaatagggctcaaccgttatatcaatctcctccatctaggctaacaacaaaaaggttgagcaacctctgtgctaccgggtggttcaatggggctgttatttccccccttgcgtgcgggtcaactagctaataggcccggggcaaggtctctatgcatggtctgggccccatgctgagcaagacgccatcctactgctccacccttacttccaaagggtggctaactattacaatatcttctcgacacatatttgcccaaaggggttgaagtacttgtcagtgttgtacgtactgtgcgcccaacaaggttgggggagccttctccccatgagatcaattgttttttcaatctcaaatccaacttccgcaatcactactcggggtactttttgtaacgtctcccgcttcaagcctccattgggcctttacacccacggaatgaatgactcttatacatgagtacgtcactctggctgcttcatggaatgacgactggccccataaaccaacacgagtgttt

SEQ ID NO: 111026 - DNA, 2541 bp, Cannabis sativa
ttttgtaataaaatctctaacaataaattaatttttatagtattgtgttttcgaataagaatataaaaaaataataataaaaaaataacgttttttggatgaatgttggtttgagttcgatggttatgatggttccgcggctaagaaaaatgatgacaaaagagagaaagtgaaaggttttacatttctccaacaaaatataaatccaatttctttgattatttggtaataaccaaagacatatatatatatataggtcttcttttttaaaaaaaaaaaattgatgaattttaattttattttcttatacaaccgaaaatataggttatgagccaataaattctaagtgataaaaaataatttatcttcacttgttatttttttttttattgaaaaaaagttgaagataaatattaaattctagtagcgtgtatattaaccatgaattctaatatttgttgcttattttaacttatatatatatatgatcatagctttcatgagcaggtttgtttccgggcatctacagacgacatcgttagaggtcttaggtagtggaataggtgattatgtcgttggttgtggtgacaatgcatgagagcaacattcatgtattttgtttttggtacttagaatatcataatggtgctaattaaagatcaggaaataaagaattatattaagacgaacaggcgtacgttgcttaattatttgtaatatcttataattaaaagttctaagctgaatataaggggactgacatgactaagtaccaccaaatcttagtttagtacaaatcaaacatgatgcaaattaacacatttatctcttaatataaattttgtcattattattatatatggagttcaattaagacagctattattagtgccataagatgtatgtatggtttgattttatttaaagtgttttgggctaccgtgttatcaaaattgcatgattaatatcattagttaggtatgttggttgttgaaatgtaattgtaccaattcattttattgcaatatataaaagtctatattagtggatttcaatttagatttgtacctcttcgatctttctttttgttcccttttaagctacactaaagctttttcgcacatgggttacacgtgtaatgctctctcgttattttattttctccctattatcccatataatttatgacaaattatcatacatttaattctcaatttatcataataagtgtcggttttaggaataagcaggagataaaatacagataaagtatatttcactcagtaaaaattaatttttggtggtgatgattaattttttatgtttggcgggtcccactaggagttacctggaacttatttttgtaactctcatagggtaaattttgctaacaatagctttgaatttttgactagtgtgtgagacatgacttgatagagggcttaaatagcttcaaaatacaagttgaatcacgtcaatcaaataaaaattgagtgagttatggtcgttttactgatgccagttcaagtgccagggcccaggttgatatccggcatcaaccaagacgctgtgtaagtgtagaaacatccaagggaagtcctttgagatgcctaagtgatggtttgacacccctagtcattttatatgttttggtgaaggtgttcacacattctcaaagatgttgctgttttgcggaaacagacgactcaaaactcctcgcttctgaattggccaaaattagagttgggaatttgatttgacctgacttcatgggtcagtgcacttgtgaaaaacttgatgggcggtcgaaatgacattagatttggatatgaagaacttagcaaaccaggccatttgttgacctgggcgttatggcctttaaaccgagcattcgatatctatttttgatacttccaaggcttccaaggtttctcaacttgaggacgggatctctgcccccatttttgataatgtcaaattcaatggttgcatcgaattttgaatttaagaaattgaaggcagcgtcccacgttgattgtcaacataggagctggaccctgtttccagggactcaagtttgtggtcttctccccgagtttacttgaatctttgttatttttgatgatagtaaagatgccagagcactttttgccgaactgaattggaaacaacccaggttgacaaaatgtcaacctaggcgcagggcctagtcccgggtgtaaacctaggccctgggtccctcttttgcccctttagaagttctgtttggttcaagaggtagttaattctcaataatttctaaagacggagatgatgctcaaaataattccagaaaaactccattttttgtggcccagattggcaaattgccaacctgggcgtaaggccagccctatgtgtcaacttgggtgctaggcccttttttatgcccaggaactgttgttcccaagatgtaaatatctgccagaatagctagcatccacgaacaacttgaagaatataaataatacaactaagttgaacttaaccatatcaggatta

SEQ ID NO: 111027 - DNA, 13341 bp, Cannabis sativa
  modified_base (56)..(57): a, c, t, g, unknown or other
gccactacaaattaaaaaattagtaaatattagcaacaattaagttaagtaattcnnaatggagtgcaaaattaaataaattaaaaaagagagatttaccttgtattcgtatgtggtacaacttcaggggtagctcttctataatgcagtggtaggagctggctgagatcaccgcaatcaaccggaagtacataactgttcacttcaaaatacccactagctccaattattgaatgcaaatagctcgctgtaaggcttcaaatatgactccatgttcttcttagcagtggcaccgatatcacaatcatatacaataatctctcagttgtcaatatctacctcaactgccaaccagtggtgctctgcgagaaggttcaacacaaattagaatcctggttctcccaacacgacaagtgtctgtgctatatccccagcacataattaaaaacggcctcatcccattttatcgtgctcttgtcacttcataataactccaatacatggagaatatctgtggagcagatgtgtccaaaatcacaccttttcgagtgtagacttctggatagaggttccgtcttcttctcaataagtgcgccatggcatcaatttgttatgttcaaaataaaaaaagttaaacatatatcgcacataaatcgcacaaacatcgcacataaatctcacaaaaaccgcaaaaaataattactgtaaaaatcgcataaaatcgcataacggtcgcacaataatcgctaaaataaataaaatacaaaaagtgtaggaatcgcataaaatcgcacataagtcgcataacaatcgcataacgttgacaatattgcaaataaatcgcacatagatcgcacaaaaatttaaaaaacaaaaaaatgaacacttaagaaataacttacagcatcgtcgagccattctccttgcaccatcaaattgatgaaccgggatcgatatgctgggccagtgtgaacatccctaggacgaccgttgtccctcgcgtaagtaatccacttttggaaaaattttaacagctgcgagtctgctggtctcagagtgtctacttcaactggcccacgtctttgtttcttcttccccactatgtagtcgttcaagaaaagcggcttctgttttctcctaaccctggagaattccaccccagcaggtgacccgtccaactcttgcacatccttagattgtgcatcacccagggcaatcataatggcgtctgttggagtagaaggaacctcatctatgttatctttcggatacacatcatcctcatcacaatcatctctcggcggtgatggatgtatcgtctgtaatggatgtgtcgggtctgatggatgtgtcggcgatgattgttgtgtcggccctgatagctgtgtcagctccgaaggctacttctgtaacaaatttatcacggttgcaatttgatccatgataagattcttcatctctttttgacttttttttgaagttagccttcatctcagtttgtgcagtcagaatcgcaagttgttgcacttcgaccttctccaatctctttgccaacaataggtagtcggagtcattggctgcagtaaaggttggcggcacagtggcaggggttaggggcacagtggcagatgtggaggggtctggtgcttctttgggtggtgatggtggaataatttttgcactttgaacataatccgccacccgttttacttgggtctcgaatgcggtcgaatcttgctccctagcttgtgtttcttcgacctcatccaagcccatatccaccatggggacctcaccctcacaattgatcttccaataatcaacctcccaattccgaggatacaaaatttgaagaacaaccatctgcaaaaagtgaacatcgtataaatatcgcaatcatgtcgcattaacatcgcaaaaaatcacataataacagtaaaaaattaaggctttcgtcaattagcatcgcaaaaatgtcacatagtaatcgcattatatcgccaaaaaatctataacacaacagcagaaaatttataaggtactgtcaagtaaatcgcacagcaatcgcataatattgccaaaaaatatacaacacaacaactgaaaatttataaggtattgttaagtaaatcacacacaagtcgcacaaatatcgcacaaatgtcgcataaagcacataatggtaacaaataaagttaaaatcgcgtaaacttaattaatgtcgcacaaatgtcgcatcaatgtcacacataaacacagataacacttatagcaaaaatagatggcaaaaatagagaaagattcacataccattttctcaaatagtgcagccacatcaggttgcttcacatcgtgtttcgtggttgaatcgggagtgctccagttcaacattcgagggaatcgagttcttttgcactggtaatacttcttccccaaaacttgcatggcctcaaatgcccaatattataggcaggtgcatatccgtacacattgtacttcgcttctgtttgagcaacctttttctccttcttgtgtttcttcttcgtcttatcgttcttactcgacaccttatccatgtagttttgcctaagctgttgcatattcttagttgtggaagacaacaacttttgataagaaagaaggcccgaaggatactcaaagaagttgtctacattttctaccaagttcagcatatctgtccagatatacacacccttggcccgtgacaacagaatgccttcgaaaaatgcacacaaccccagcttgtatatatcgtctacaatatcgcatgcctcaaaagctagccaaagggttttaaaggtcaccctttttgaattgttgagatagtctcgcagtatccgattagagtcacattgcgtagtcaattcttttgacgaaggaccaccactcatctttaggcctgtgatcaaatcgaacttagaccgcccaaatctagcttcggttttacccacgtaaaaccacacttcatcatttttgacctcactcactttcttcttccttagtaacagttgatgcacaataacctcagagaatttcaattcactgacattccaaaaaactccaaagggcgtctccttcaccttctgagtcaagtcaaaagcttcaaatttagcatttattgaagcaaagtacctgttccctttgtaagttatacgccatggaaagtgctctgacaatgggagaataagttcttgagtcatttgcatttacaaagattaattagattatatcgcataataatcgcacagaagtcgcataaagacatgaagatatcgcacaaatcgcatttaagtcgcacaaacatcacaaaaaatcgcataatcacagcaaaaaatttataggctactgtcaattagaatcgcacaaatatcgaatagtaatcgcataatatcgccaaaaaatctataacaaaacaacacaaaaatcacataatatcgctaaaaaaatatacaactcaacagttgaaaatttataaggtattgtcaagtaaatcgagcaaaaatcacatagtaattgcataatatcgcttgaaaatttacaacacaacaacctattccacatcgctcaaaatcgcacaatatcgcacaaaaatcgctgaacatacccaaaacacatatacctatgtaaactcgcacaatattgcacacaaatcgcacaatgtcgtaaaaaaatacaaaaccaggtaaaaaaatttagcacgaaacccataattttcccatatttttcttgcactatcacaaaaacacatactaaatcacaatttcagtttaagcacaaattcatccacaaattaagacatattttaaggataaattaaaacaaaaatttcaaaaaaatacctcttttagcttaacggtggaatgtgggacggtggcggtggtagggatggtgctccgagactggtgcgagtgggttttggtggttgctggggtctcgagtgggtcgatgggttgtcggggtcgattgggttagtcttcgtgttgatgggtcgtcggggtcgtcttcgtgggtcgatggggttgattggtcgtctggttcgaatggaggggttgggtttgacggtgctggatcaaacggagggggagggtttctcggatgggggttcgaatggagggtgaaggaggagagagagagggccgttagagagaatggggggaaggtgaaagaataggggtaattttggaaggaaattgaaaaattggcatatatttactatgtgtacatttttgatttaattaaacaccatgtgtaattttttagcataatatatcaaatttccatactaatactagtgacaaaaactcattgttcacaaaaatattaatatctataattttccataataaaattttcttaattattttaacaaaaaaaaaaaaaagaaagagaaatttccttgattatttgtagaaatttcttaacagagcagtgttagagtgtatgtcataattttcagtttttgaaaaaatttccaatgagcccattagagataagtgggccaatttgggaagattgctggaccaagaaatcgtttggggtggtggggtgaggggttccaattctcaaatcaaagacaatggtccaagatgtcatcatcgcccatacttgcgactcttccaatggcgaatcctatacttctcagaggctctccgctcctccgcctccgacttcaactttaccactacagactctctccctccttcatatcgccccctcgttggcatttgttatccactgccgccattgactccactcgcccggaggagaaagcgtcctcatctactgctaactccggttcattacacagcgttaaggactcccccaagtaccagaggtggaacgatgctgattaccgccagtggaaaaataaagaggacgagattctcaaggacatctcgcctattattttgctcaccaaggacatccttcattcgggaatgtgagtgtttcttctcctggatgtgcccaaattttcattatctatatgtatatattcaattttaaatttggtataaattgaggaagtttagggaattaagtagtattttgaagataagggactggctttttggaactatggtttgtgctatcgaactaactaagagcaaagagaacttatcgttgttggcagtggctgcatattcgttttatgaaggattatttaaactgcgaagctcaagttttgtgctgtttatggtccgaaatggtcacttatggttgtgggctgtggttgcttattcgtttattaatgagggttttgaagctgttatgctcaagtcttgctgcctacgatcttaaatgtcacctatactagatgggatattcttaaagtactagaagtttagaactgaaagggcattctaatctatggcgtccaggaaattcctgttgagggggttacgtttgaaatcgataaaaagttaattggagaaggagaaagggggtaactaagtgaagtacctgttgtttgcatttttttttttgcttgatcagatggcggtttatttctgaaatcttatttgtgctggtcagtgtggagtcattctgcatcccatgcgtgctatgattgtcctttatcttcaacttttagtatttaaagtcagactgttgttcatgtgcttgttattggagtgtgttacatgatacataactctaactgatttctctttccaggtatatggatggagaacgattaacacctgaggatgagaaagctgtggtggaaaggcttcttgcctatcatccacatgctgaagataaaatcggatgcggacttgattctattatggtaaaaatgcaatttactctatcattgtgttctattgcttcgattcactgagttgcattactttataaagtcatcccaatcttcttgctgactaagttatacagagtagagcgatagatcttatgctattttgttgtcattatatgcacatattgcttgcttctaactacttagtccattcttctctccaacccccatccccatccccacccccaccccatcacatcacacacgcacacaatgtatgtgaagttcatttgaaatgcttctttagtttttttgccactttgagaacctgtgcaagtttgtgtgtgtgctctttccttttaatggtttgatgccatgaaacacagcacttttctgttgaattttataatgctagttcagtgagactaatacaatttgattccacacgctgttaaggaacaaatgtacttataaaggaacaattatttacactgtatgtttaattgattttatttatcataattcagtaaaatttcctaatgcaattaaatgatgtttgtgataccttttatatttctttttttgaaatgattttatattttttaatataacaattaatatctttaattggatataagatcacaccaatcaccctgattttagagataatgctattgtaaactgggaaagaaaatgctaaattataatgtggattttgaacatttattcaatgggttatgtttgttatattgtaagaagagaagataagcacttgaatattaaagtgttattgaagaggagtagagaggaatgtgattatcttcttcttcttttgattgttttggttttctggtttttggtctttctttgtttttgcggctctgtcttaaaggtctttgagtgtgtgtatgatatatcattgggatgtgtgtttttggttaatgaagatttgatattaatttttagaataaataagatttttacccctgaactatgaagcatatagggttctttcctcataaattactttttttttttttgtaaaaaattctctagtaactatggaaataaatgcaaattttcccctttcgttgcatttcggtcattttttgagataatttattgatgtggccacaaactgtgtgtataattacagtatgagggctttttaactaatttaagctagttggaaccaagtataacaattaaacatgcaaacattaactctaaatttacgaatacacgttctcaaattttattgttagagtactatttatgcaattattttttgcctgaactcccgaagtacagtaggtcagtctgaaaccaggaaacttgttaggcactaggattagtagggtgtgctagcatatagtaaataataagagtatatgagtttttgtttgggaaggtagtattgactattgagtgagaaattactatatataggtaagtaagggaagaattgggtcaggcaatgagttgagtaaaactctttgcatcaaaggggcctaagggctcccataattcataattatttatctcttatactccatataattttcccactgtttggatactattgtgctactattgctattgttggtgctatttgctactggtttggttgatcgaaatagggtcacatcaattggtatcagagcaccaattctcggtgaatgctgtcaacgagaatggaggagaaagttgtagcaatggagaaaagaatggaagctgatatgaacaacataaaagtagacttgagtagtatcatatcggacaaaaacaccattaatgatttttgaaaatctatctcaaacattggcagaccattccgaagagatggaaatggcaataagagaacacaattgcacgtttgctagacttgccagctttagagaaggtgttagtgagacacacactgtattgtcggatcgctcttcttcttgttcatccgtgcttgaggttcgaaggctatacggagaaccaacaaaggggattgactagtttcagctgttggttgactcaccggaggcggtggagaagaagattcagcggctgttgatggtttcgaagaaagaagagcgacagaaaccgatgctagagaagaaggttttgctggatacgactcttccaggaagtattatcttgatagtgatgttgccagagatgaacctgtagtgggagtcgtcgcctgagaagaagaaagaggagacgtggctgttggtggggtcgcctaggcaaagagacgtgatggagacgttgtcactcatagagtcgcctgagaagaatgataaggaaccgttggtagtgacgtcgaaaaagaaccagccactagacatggtgctggagaagacgtgttcgcagactacgatgtcggagatcgggagatggttttattgctggagacaatgatgaagaagtcgctgtcaactgtgtcaacgttgatcatgttgtgggatacaacttaaggtgaaaaaaatgtcacacttaaaccctagaggaaattacactcattatgattttttaaaactttgttacaaaaatatgacacttttaggttttgccactttttatggcatattttagtttttaaattattttttggtatcttttatgccatatatgtgtaaatttaatttttaaattccatatttgatgtttagataaattatttcaaaaaaaatttaaaaatctcaaagttatttcttctcctccattcaagtaccctacctgcctcacccctcaatcgtccatctacctacctccattcaccagcaacacatctagcaaccgacaactcaaacagacattggatataagatctccaccaccaaaaccccacaagatcaaacaagtcatgtcgtagttggaggtctagatactagtttcttaaattgaaaaaccagtttcaacataaacaaatcttatatgagttttggtattcgtaactggtttctttattaagaaacaatccaaattaatttggcccacctcatcaaatttacaagacacacatcattaattactaaaactaatttggtctacttgctttctacttcgagtgtcactgaaataataaaacacgtgagcccaatgtttatttcagcccatgagtttgccacttgggatccaggcccacaactagaaataaatccattgggtcactatgatgggtaactggttggtcttatgggttcttgttcaggctcatttcactatctgtaaccaagaaaaagggctacatcttcgaaacatgtgttttggtcccaacttgaagcgtcaacgaatgaccttgagatgtcttttccctcgtaccaaaaaacgacccaaggtagatcgtgtggtggtcgaaccttcgaacatgccggtggtggtggtggctttgtcaacatcttgggatctgggcaagttgtcttaattttcttctcctcgatcacgaacacgattgttctagtgctgctgcagtgttaggtctttgatcgaggtagaaagctgaaatttattggttcttttgtggatcagaaccttagtttctgaggaggtggctatgcgaatgacattgctggaatggtttttcgattgaggtcgactcgttgagtggtggttgttcttttgtagcttgcgcaactagccaaaacattcactcactggccttgttccttgcattggtacccttaaattaagactgttccacttcaatggatgtttgacagaggacgagcttattcgaatttagcgcttggtgccatcaattaccttgaggacaaggtgaaaccctagcggccggtaatattgggcactaggattagtagagtgtgctagcatataataaaggggaacttacaaaaatattgaaatttgaaatattttcaaatatactgttataaaacaatagtggaacacaatacaaaacaactaaaacaacagttgaacaactaaaaaactacagtggaacaacagaggaaacttaacacagtatacaatataaaacatatacaacattttttaaaaacttctgccctacattaaaaagaaaaaagtggaaaatttcagtatgtggtgtaaaaaaccctataataaatcataagggtatatgagtctttgtttgggaagttaatattgagtgagaaattaatatatataggtaagtaaggaaagaactgggtcaggcaaatgaattgagtaaaacttttgcatcaaaggggtctaatggctctcatatttataattagttctctcttattattcaatatagttttcctactgtttggatactaatttgctactgttctactggtattcttgttgctgggtttgttttgctactgtttggctactgtgttattggttctcttgagctaggatactgcgttttcaaaaatgaatgaaatgctatgcaatcgaaggaacaaatttgcaattattttcaaagtttgagatgaatattttacaaaaattaatattaataataattgagttggcaaaaccctatgagtgtcatagttggggccaaaaatgctgtttattctaatttttatgtttgaagaatcaatcaagccaacattgagataaaattgatgctacaaacacaaagcttattggtgatttaccatatcatatttagaagtgcacattctatgtagtttgcagctgatgtaaacacattaaattgttcgtacacaagttttatgcttttgttttctctggattgaacatcagggtggcagatcctcacttagggtgtaaatccacacaccatgttgtgtttagtatgtgtagcattatcagtttttaattggtttttaactcatgttttccttggaaggtattaataatcctgtactgagcactgtgcagaataatatcatgtgtatttgctggtgtgcattaggttaagcttgcatttttgtttcttcgcattgcaatatcagccctagcacactgtatgtgttctttgttcttttttaacaagaagtcaaatgttgtttatttgtcgttgctgaaggttgatcgacacccccaattcagtcattcacggtgcctgtttatcattagaactgatggagcatggatcgacttctcatatcagaagtgtcttcgacaatatgttagagagaagtacccatctcatgcagaaagattcataagagaacatttcaaacgcggtagtggtttataataaatagtggtaagttgtgacttttttcgccttcaaatgaggaaattgtatattggtttcgtcacctacatatatttagctcactcaattgtcaatgcagcagataatcctagtgaaactaaacagttttcgttaaaaatgtagacagaaaattatttaattggatttcactttgttgacttcatcgatcttttgtgcttttatttgtttattattaagttgttctttgctttctccgcaactctttctggacctacgtctctctctctctctcttcttttaaaaagaaaacaaaaagagaataaaaataaaaatgattagttttgctcaatccattggacctacttatgagatagttgtagtacctgttgacaacttaactgccaatttgctttgcccacataatgaatctctccaatatttgtttgttctataggctgggtcttccttgccccattcgtactttgatcaaagaaataagacgagtacatagctggaagttggtatgtttgcgtagttttcacaaatgtaaatccaaggacatcaaaactcattatctgattatgatacaaggccacgatgatcaatgatgtcgtatctcgtccttggagatccaaatgcgtgtgctatggtaatcaattctctttgtaggcaatgttatcttgtggcttgttttggaagaaaggttacaacttaattgtaactcgcgtgagacacttaacataccatgactaccgtgttcaatggatgaggaatatgttgcctaataacgtctttgatcatcttttgatttttcttagccaaggtttaattgcactatttaaagtcctcgcatcatggactttaatttcttagagcgtctttggtaagcaaagaaaaggtgagggaaatggtggatggattttaggaagaagtttgttttgactggaaaggattttatgtaaggtgtttagttcgagttaagttttaatggactctctcccttctcctaatactgaaagtaaagaaacattccctttgtctcctttttctttccttgaattgtgcagctgttctttctatcttgtctctcttaacaaagcataatgataagtgatgtatctctgtatcactggtaacaactactcgctgaactgaccaatacttcagcttaattttcaattatagtttgataaaatatgcaagtggttgagaccgaggtaatttaagttagtaaagggccaatggcagctaggaattctgtctagtttaggtagtagctcctttctagtcaaaaatatagtctggaagaattcagagaaacttgctgttgtcaaaccatatatgaatgatggagtattacggagtcattaccttgacttagcactagtaatatgcctcagaaattcaaggggacaaaatgttcgacaaaacatggactggatcattacaagtccttgcaaggcatgttcaccttacttactctcttgctaatcgagtgcgttaggtaatttccagtcccccaccaaaaaaaaaaaaaaaatgtttctatgttattaggtggtgaagtgttagtactaatgtaattattagtttttgtttgttattcttatctttattatctcttttgctccagatcttaaatctaactttttctccttggagtttagacagcaaacatattatcttttttagtgtgaaatattcattcataatttaagcatgtttgtagaattcccataaatgtatatcagaatagtagatttctctagttttcgaggggtaaatgattagatttagatctcaaactaaggagagtataggaataaaaaggtttagtgtcatgagttatcgtccttgtgggcaattagttaagaggtcaacgcctctcatctcatcacaccacttaaagcaagaacatcacatttacattttacagccatctttagtagttagcctaaattatgagcaactgatagcaataattagaggtaaaacatgatcattaagttgagatgaattttatatggtggggactcaaaagtaggaatatcctctacacagctggagaaaatctcacgtgggccctactactttcactaccccatgtatgactgtggtttacttggtaattaagtttcacagatgcagtcgagtgaatgatcaatttagttattaaaataaaaaaagaaaaagaaaaaaaccacacacaaatggagaatattttctaccaacatgaacttgtgatttttcatttgtctagctcattatcattaaccaagagtatggggttgatcaacaaggatatttgatgagttccaataaagagagttttgctttctgctacggtgattaaaatgcaagaaaatgaaccactttctgaattttgagagagagagagaga
